United States Patent Application Publication US 2018/0126003 A1 - sequence listing, part 51

SEQ ID NO: 88736 - DNA, 1777 bp, Artificial Sequence
  derived and/or modified sequence
atgccgggggcgggcccggaaccgccacgggtgagtcgggtcgtggctgctgccgggtcctgcgcgctccggactgagaagaagtcttcacttcccaggagagccaaagcgtgtctggccctaggtgggaaaagaactggctgtgacctttgccctgacctggaagggcccagccttgggctgaatggcagcacccacgcccgcccgtccggtgctgacccacctgctggtggctctcttcggcatgggctcctgggctgcggtcaatgggatctgggtggagctacctgtggtggtcaaagagcttccagagggttggagcctcccctcttacgtctctgtgcttgtggctctggggaacctgggtctgctggtggtgaccctctggaggaggctggccccaggaaaggacgagcaggtccccatccgggtggtgcaggtgctgggcatggtgggcacagccctgctggcctctctgtggcaccatgtggccccagtggcaggacagttgcattctgtggccttcttagcactggcctttgtgctggcactggcatgctgtgcctcgaatgtcactttcctgcccttcttgagccacctgccacctcgcttcttacggtcattcttcctgggtcaaggcctgagtgccctgctgccctgcgtgctggccctagtgcagggtgtgggccgcctcgagtgcccgccagcccccatcaacggcacccctggccccccgctcgacttccttgagcgttttcccgccagcaccttcttctgggcactgactgcccttctggtcgcttcagctgctgccttccagggtcttctgctgctgttgccgccaccaccatctgtacccacaggggagttaggatcaggcctccaggtgggagccccaggagcagaggaagaggtggaagagtcctcaccactgcaagagccaccaagccaggcagcaggcaccacccctggtccagaccctaaggcctatcagcttctatcagcccgcagtgcctgcctgctgggcctgttggccgccaccaacgcgctgaccaatggcgtgctgcctgccgtgcagagcttttcctgcttaccctacgggcgtctggcctaccacctggctgtggtgctgggcagtgctgccaatcccctggcctgcttcctggccatgggtgtgctgtgcaggtccttggcagggctgggcggcctctctctgctgggcgtgttctgtgggggctacctgatggcgctggcagtcctgagcccctgcccgcccctggtgggcacctcggcgggggtggtcctcgtggtgctgtcgtgggtgctgtgtcttggcgtgttctcctacgtgaaggtggcagccagctccctgctgcatggcgggggccggccggcattgctggcagccggcgtggccatccaggtgggctctctgctcggcgctgttgctatgttccccccgaccagcatctatcacgtgttccacagcagaaaggactgtgcagacccctgtgactcctgagcctgggcaggtggggaccccgctccccaacacctgtctttccctcaatgctgccaccatgcctgagtgcctgcagcccaggaggcccgcacaccggtacactcgtggacacctacacactccataggagatcctggctttccagggtgggcaagggcaaggagcaggcttggagccagggaccagtgggggctgtagggtaagcccctgagcctgggacctacatgtggtttgcgtaataaaacatttgtattt

SEQ ID NO: 88737 - DNA, 1896 bp, Artificial Sequence
  derived and/or modified sequence
ggcccggaaccgccacgggtgagtcgggtcgtggctgctgccgggtcctgcgcgctccggactgaggtggcgtccctgggccggacggcggtgtcccggcgtggcgggaagccggcactggagcgggagcgcactgggcgcgggaccgggaggcgcagggaccggacggctcccgagtcgcccacctgacgctagaagaagtcttcacttcccaggagagccaaagcgtgtctggccctaggtgggaaaagaactggctgtgacctttgccctgacctggaagggcccagccttgggctgaatggcagcacccacgcccgcccgtccggtgctgacccacctgctggtggctctcttcggcatgggctcctgggctgcggtcaatgggatctgggtggagctacctgtggtggtcaaagagcttccagagggttggagcctcccctcttacgtctctgtgcttgtggctctggggaacctgggtctgctggtggtgaccctctggaggaggctggccccaggaaaggacgagcaggtccccatccgggtggtgcaggtgctgggcatggtgggcacagccctgctggcctctctgtggcaccatgtggccccagtggcaggacagttgcattctgtggccttcttagcactggcctttgtgctggcactggcatgctgtgcctcgaatgtcactttcctgcccttcttgagccacctgccacctcgcttcttacggtcattcttcctgggtcaaggcctgagtgccctgctgccctgcgtgctggccctagtgcagggtgtgggccgcctcgagtgcccgccagcccccatcaacggcacccctggccccccgctcgacttccttgagcgttttcccgccagcaccttcttctgggcactgactgcccttctggtcgcttcagctgctgccttccagggtcttctgctgctgttgccgccaccaccatctgtacccacaggggagttaggatcaggcctccaggtgggagccccaggagcagaggaagaggtggaagagtcctcaccactgcaagagccaccaagccaggcagcaggcaccacccctggtccagaccctaaggcctatcagcttctatcagcccgcagtgcctgcctgctgggcctgttggccgccaccaacgcgctgaccaatggcgtgctgcctgccgtgcagagcttttcctgcttaccctacgggcgtctggcctaccacctggctgtggtgctgggcagtgctgccaatcccctggcctgcttcctggccatgggtgtgctgtgcaggtccttggcagggctgggcggcctctctctgctgggcgtgttctgtgggggctacctgatggcgctggcagtcctgagcccctgcccgcccctggtgggcacctcggcgggggtggtcctcgtggtgctgtcgtgggtgctgtgtcttggcgtgttctcctacgtgaaggtggcagccagctccctgctgcatggcgggggccggccggcattgctggcagccggcgtggccatccaggtgggctctctgctcggcgctgttgctatgttccccccgaccagcatctatcacgtgttccacagcagaaaggactgtgcagacccctgtgactcctgagcctgggcaggtggggaccccgctccccaacacctgtctttccctcaatgctgccaccatgcctgagtgcctgcagcccaggaggcccgcacaccggtacactcgtggacacctacacactccataggagatcctggctttccagggtgggcaagggcaaggagcaggcttggagccagggaccagtgggggctgtagggtaagcccctgagcctgggacctacatgtggtttgcgtaataaaacatttgtatttaa

SEQ ID NO: 88738 - DNA, 1790 bp, Artificial Sequence
  derived and/or modified sequence
cttccggtcgtgggccatgccgggggcgggcccggaaccgccacgggtgagtcgggtcgtggctgctgccgggtcctgcgcgctccggactgaggtggcgtccctgggccggacggcggtgtcccggcgtggcgggaagccggcactggagcgggagcgcactgggcgcgggaccgggaggcgcagggaccggacggctcccgagtcgcccacctgacggtaccgagagggcggcgcccctccgagcagagccgtcccggccactcccctgggatctgacttggctcttgcggtcgcgggcaccgtgaagccctggggtgtgcgtggctcctcctgctagaagaagtcttcacttcccaggagagccaaagcgtgtctggccctaggtgggaaaagaactggctgtgacctttgccctgacctggaagggcccagccttgggctgaatggcagcacccacgcccgcccgtccggtgctgacccacctgctggtggctctcttcggcatgggctcctgggctgcggtcaatgggatctgggtggagctacctgtggtggtcaaagagcttccagagggttggagcctcccctcttacgtctctgtgcttgtggctctggggaacctgggtctgctggtggtgaccctctggaggaggctggccccaggaaaggacgagcaggtccccatccgggtggtgcaggtgctgggcatggtgggcacagccctgctggcctctctgtggcaccatgtggccccagtggcaggacagttgcattctgtggccttcttagcactggcctttgtgctggcactggcatgctgtgcctcgaatgtcactttcctgcccttcttgagccacctgccacctcgcttcttacggtcattcttcctgggtcaaggcctgagtgccctgctgccctgcgtgctggccctagtgcagggtgtgggccgcctcgagtgcccgccagcccccatcaacggcacccctggccccccgctcgacttccttgagcgttttcccgccagcaccttcttctgggcactgactgcccttctggtcgcttcagctgctgccttccagggtcttctgctgctgttgccgccaccaccatctgtacccacaggggagttaggatcaggcctccaggtgggagccccaggagcagaggaagaggtggaagagtcctcaccactgcaagagccaccaagccaggcagcaggcaccacccctggtccagaccctaaggcctatcagcttctatcagcccgcagtgcctgcctgctgggcctgttggccgccaccaacgcgctgaccaatggcgtgctgcctgccgtgcagagcttttcctgcttaccctacgggcgtctggcctaccacctggctgtggtgctgggcagtgctgccaatcccctggcctgcttcctggccatgggtgtgctgtgcaggtccttggcagggctgggcggcctctctctgctgggcgtgttctgtgggggctacctgatggcgctggcagtcctgagcccctgcccgcccctggtgggcacctcggcgggggtggtcctcgtggtgctgtcgtgggtgctgtgtcttggcgtgttctcctacgtgaaggtggcagccagctccctgctgcatggcgggggccggccggcattgctggcagccggcgtggccatccaggtgggctctctgctcggcgctgttgctatgttccccccgaccagcatctatcacgtgttccacagcagaaaggactgtgcagacccctgtgactcctgagcctgg

SEQ ID NO: 88739 - DNA, 2147 bp, Artificial Sequence
  derived and/or modified sequence
ggcccggaaccgccacgggtgagtcgggtcgtggctgctgccgggtcctgcgcgctccggactgaggtggcgtccctgggccggacggcggtgtcccggcgtggcgggaagccggcactggagcgggagcgcactgggcgcgggaccgggaggcgcagggaccggacggctcccgagtcgcccacctgacggtaccgagagggcggcgcccctccgagcagagccgtcccggccactcccctgggatctgacttggctcttgcggtcgcgggcaccgtgaagccctggggtgtgcgtggctcctcctggtaggcgccctttcccggcgtccggcttggggtggtggtggcgttgactccagccccgcctctccctggagaggagggctccactcgctccttcggcctcctcccctggggccgcagcgactcgggccggcttcctgcttccctgcctgccggcggtcccgctggctagaagaagtcttcacttcccaggagagccaaagcgtgtctggccctaggtgggaaaagaactggctgtgacctttgccctgacctggaagggcccagccttgggctgaatggcagcacccacgcccgcccgtccggtgctgacccacctgctggtggctctcttcggcatgggctcctgggctgcggtcaatgggatctgggtggagctacctgtggtggtcaaagagcttccagagggttggagcctcccctcttacgtctctgtgcttgtggctctggggaacctgggtctgctggtggtgaccctctggaggaggctggccccaggaaaggacgagcaggtccccatccgggtggtgcaggtgctgggcatggtgggcacagccctgctggcctctctgtggcaccatgtggccccagtggcaggacagttgcattctgtggccttcttagcactggcctttgtgctggcactggcatgctgtgcctcgaatgtcactttcctgcccttcttgagccacctgccacctcgcttcttacggtcattcttcctgggtcaaggcctgagtgccctgctgccctgcgtgctggccctagtgcagggtgtgggccgcctcgagtgcccgccagcccccatcaacggcacccctggccccccgctcgacttccttgagcgttttcccgccagcaccttcttctgggcactgactgcccttctggtcgcttcagctgctgccttccagggtcttctgctgctgttgccgccaccaccatctgtacccacaggggagttaggatcaggcctccaggtgggagccccaggagcagaggaagaggtggaagagtcctcaccactgcaagagccaccaagccaggcagcaggcaccacccctggtccagaccctaaggcctatcagcttctatcagcccgcagtgcctgcctgctgggcctgttggccgccaccaacgcgctgaccaatggcgtgctgcctgccgtgcagagcttttcctgcttaccctacgggcgtctggcctaccacctggctgtggtgctgggcagtgctgccaatcccctggcctgcttcctggccatgggtgtgctgtgcaggtccttggcagggctgggcggcctctctctgctgggcgtgttctgtgggggctacctgatggcgctggcagtcctgagcccctgcccgcccctggtgggcacctcggcgggggtggtcctcgtggtgctgtcgtgggtgctgtgtcttggcgtgttctcctacgtgaaggtggcagccagctccctgctgcatggcgggggccggccggcattgctggcagccggcgtggccatccaggtgggctctctgctcggcgctgttgctatgttccccccgaccagcatctatcacgtgttccacagcagaaaggactgtgcagacccctgtgactcctgagcctgggcaggtggggaccccgctccccaacacctgtctttccctcaatgctgccaccatgcctgagtgcctgcagcccaggaggcccgcacaccggtacactcgtggacacctacacactccataggagatcctggctttccagggtgggcaagggcaaggagcaggcttggagccagggaccagtgggggctgtagggtaagcccctgagcctgggacctacat

SEQ ID NO: 88740 - DNA, 1676 bp, Artificial Sequence
  derived and/or modified sequence
ccttcggcctcctcccctggggccgcagcgactcgggccggcttcctgcttccctgcctgccggcggtcccgctggctagaagaagtcttcacttcccaggagagccaaagcgtgtctggccctaggtgggaaaagaactggctgtgacctttgccctgacctggaagggcccagccttgggctgaatggcagcacccacgcccgcccgtccggttggagcctcccctcttacgtctctgtgcttgtggctctggggaacctgggtctgctggtggtgaccctctggaggaggctggccccaggaaaggacgagcaggtccccatccgggtggtgcaggtgctgggcatggtgggcacagccctgctggcctctctgtggcaccatgtggccccagtggcaggacagttgcattctgtggccttcttagcactggcctttgtgctggcactggcatgctgtgcctcgaatgtcactttcctgcccttcttgagccacctgccacctcgcttcttacggtcattcttcctgggtcaaggcctgagtgccctgctgccctgcgtgctggccctagtgcagggtgtgggccgcctcgagtgcccgccagcccccatcaacggcacccctggccccccgctcgacttccttgagcgttttcccgccagcaccttcttctgggcactgactgcccttctggtcgcttcagctgctgccttccagggtcttctgctgctgttgccgccaccaccatctgtacccacaggggagttaggatcaggcctccaggtgggagccccaggagcagaggaagaggtggaagagtcctcaccactgcaagagccaccaagccaggcagcaggcaccacccctggtccagaccctaaggcctatcagcttctatcagcccgcagtgcctgcctgctgggcctgttggccgccaccaacgcgctgaccaatggcgtgctgcctgccgtgcagagcttttcctgcttaccctacgggcgtctggcctaccacctggctgtggtgctgggcagtgctgccaatcccctggcctgcttcctggccatgggtgtgctgtgcaggtccttggcagggctgggcggcctctctctgctgggcgtgttctgtgggggctacctgatggcgctggcagtcctgagcccctgcccgcccctggtgggcacctcggcgggggtggtcctcgtggtgctgtcgtgggtgctgtgtcttggcgtgttctcctacgtgaaggtggcagccagctccctgctgcatggcgggggccggccggcattgctggcagccggcgtggccatccaggtgggctctctgctcggcgctgttgctatgttccccccgaccagcatctatcacgtgttccacagcagaaaggactgtgcagacccctgtgactcctgagcctgggcaggtggggaccccgctccccaacacctgtctttccctcaatgctgccaccatgcctgagtgcctgcagcccaggaggcccgcacaccggtacactcgtggacacctacacactccataggagatcctggctttccagggtgggcaagggcaaggagcaggcttggagccagggaccagtgggggctgtagggtaagcccctgagcctgggacctacatgtggtttgcgtaataaaacatttgtattt

SEQ ID NO: 88741 - DNA, 1338 bp, Artificial Sequence
  derived and/or modified sequence
atggcggcccctaccccagcacgacctgtgctgacacacttattggtggcgctgttcggaatgggtagctgggccgcagtcaacgggatctgggtggagttgcccgtggtcgttaaagaactgcctgaaggatggtcactgccatcttacgtaagcgtcttagtggctctgggcaatttagggttacttgtggtgacactttggcggagactggcgccgggcaaagatgaacaggtccctataagggtggtgcaggttctgggcatggtggggacggctttactggctagcctctggcaccatgtggcccctgttgctggacagctgcattccgttgcctttctggctcttgccttcgttctcgctcttgcatgctgcgccagcaacgtgactttcttgccattcctgtcacacctgcctcctcgctttcttcgtagtttctttttgggccagggcctgagtgcactgctcccatgcgtgctggcactggtgcagggcgtgggacggctggaatgcccacctgcccctatcaacggcactcctggtcctccactggattttctggaacggtttccagcaagcacttttttttgggctcttactgccctccttgtggcaagcgctgcggccttccaaggactgcttcttctgctgccccctccaccaagcgtgccgacaggagagctgggctccggcctgcaggtcggggcccccggtgccgaagaggaggtggaggagtcctcaccccttcaggagccaccgtctcaagccgccggcacaacgcccggcccggatccaaaggcttatcagctgttgtcagcccgttcggcctgcttgttgggactgctcgcagccacaaacgctctcacaaacggcgttctgccagcagtccagtctttctcctgtctaccttatggaaggttggcctaccacctggcagtggtcctgggctccgcagccaatccgctggcatgctttctggccatgggagttttgtgccgctccctggctggactcggagggctctcgctcttgggggtgttctgtggcggctacctgatggctctagcagtgctgagtccgtgcccacctttggtcggtacgtctgcaggcgtggtgctggtcgtactgtcctgggtgctctgcctgggagtattctcatatgttaaggtggctgcctcatctctgctgcatggcggaggcagacctgccctcctggctgcaggtgtcgcaatccaagttggatccctccttggggctgtggctatgtttccgcctacctctatctaccatgtgtttcactcacgcaaggattgcgcagacccatgcgactcctag

SEQ ID NO: 88742 - DNA, 1338 bp, Artificial Sequence
  derived and/or modified sequence
atggcggcccccactccggcccggccagtcttaacacatctgctggttgcactctttggaatgggctcatgggcagccgtgaatgggatttgggtcgaactgcctgtcgtcgttaaagaactaccagaaggttggtctctgccttcttacgtctctgttctggtagcgttgggaaatctggggttgctggtcgtgactttatggcgacggctggcaccaggcaaggatgagcaagttcctattcgtgtcgtgcaggtgttagggatggtgggcacagctctgctggccagtctgtggcatcatgtcgcacctgtcgctgggcagctgcacagtgtagcctttttggctctcgcctttgttctggcccttgcatgttgcgcctccaatgttacctttttgcctttcctatcacaccttccccccaggtttcttcggtctttcttccttggacaggggttgtctgcactgctcccctgcgtgctggccctagtccaaggcgtgggccgcctcgagtgtcccccagctcctatcaatggtaccccaggcccacccttagattttctcgagagatttcccgctagtacgtttttctgggcactgacagccctgcttgtggcttcagctgctgctttccaggggctcctgctcttattgcctcccccaccgagtgtgccgacaggtgaacttggatccgggttgcaggttggagccccaggggcagaagaggaagttgaggagtcatcaccactacaagagccgccaagtcaggcagcagggaccactccaggccccgatccaaaggcctaccagctgctaagtgcgagatctgcgtgtcttcttgggctcttagccgctacgaacgctctgacgaacggggtactgcccgcagtgcagtccttctcatgcttgccatatggacgtctagcataccatctcgccgtggtgttaggcagcgccgctaatcctcttgcgtgtttcctggcaatgggagtgctctgccgaagccttgccgggctaggcggtctgtcccttctaggagtcttctgtggcgggtacttgatggcactcgccgttcttagtccttgcccccccctggtcggtacaagtgctggcgttgtcttagtcgtgctctcatgggtcctttgccttggtgtcttctcttatgtcaaagtggctgcctcgtctctgctgcatggtggaggacggcccgccctgttggccgctggcgtcgccattcaagtcggcagtctcctgggcgcagttgccatgtttccgccaacgtcaatttaccacgtattccattctaggaaggactgcgccgacccctgcgactcatag

SEQ ID NO: 88743 - DNA, 1338 bp, Artificial Sequence
  derived and/or modified sequence
atggcagcccctacacctgcaagaccagtacttacacacctgctcgtggctctgtttggtatgggctcctgggccgctgtaaatggtatttgggttgaactgccagtggtggtgaaggagttacccgaaggttggtccctcccatcatatgtcagcgtcctggttgcactgggcaacctcggtctcctcgtcgtcactctctggcgccgcctagcacctggaaaagacgaacaggtgcccatcagggtagtacaggtgctgggtatggtgggaacggctctcctggccagcctgtggcatcacgtggcacctgtagccggccagttgcattcggttgcttttctagccctagcatttgtcttggcactggcgtgctgcgccagtaacgtcacgtttctacccttcctctctcacctgccaccccgatttctgcggtcattttttctcggacagggtctatccgctcttctgccctgtgtgctcgcccttgtgcagggagttggccggcttgaatgccctccggcaccgataaacggtactccgggcccaccactggattttcttgaacgtttccccgcttctactttcttttgggcattaaccgccctgttggtcgcgagcgcagcggcctttcagggactattgctgctgctgcctcctccgccttcagttcccacaggcgagttagggagcggactccaggtgggggcccctggagcagaggaggaagtggaggaaagctccccccttcaggagccaccctcccaggcagctggaaccacccctggccctgatcctaaggcataccagttgctaagtgccaggtcagcctgcctgctgggcctcttagccgcgacgaacgctttgacaaatggggttctgcctgccgtacagtctttcagctgcttaccttatggcaggctggcctaccacttagctgtagtgttgggcagcgccgccaatcctctggcatgcttcctggccatgggggtgctatgtcgcagcctggcgggcctcggcgggcttagtttgttaggcgttttctgtggcggttacctgatggccttagccgtcctgtccccttgtccccctctggtcggaacgtctgctggcgttgtgctggttgtcctgtcctgggtgctctgcctgggtgtgttcagctatgtaaaagtagctgccagctccctgctccacggcggaggcagacctgcactgctggctgctggcgttgctatccaggtgggttcactgctaggagctgtggcaatgttcccccccacttccatctatcatgtgttccacagccgcaaggattgtgcagatccttgcgacagttag

SEQ ID NO: 88744 - DNA, 1338 bp, Artificial Sequence
  derived and/or modified sequence
atggccgctcctactccagctcggccagtgctcacccatttgttagtggccctgtttggaatggggagctgggctgcagtgaacggtatttgggtcgagctccccgttgtcgttaaggagcttcctgaggggtggtccctcccttcttacgtgagtgtgctggtcgccctaggcaacttgggccttctcgtggtcacactctggagaaggctcgcccctgggaaggacgagcaggtgcctatccgcgtggtgcaagttttgggcatggtggggacagctctgctggcttctttgtggcaccacgtggcccctgtagctggccagctgcactctgtggccttcctagcgctcgcttttgtgctggctttagcctgctgcgcttcaaatgtaacatttctgcctttcctctcccatctgccgcctaggttcctgcgctctttttttctgggccagggactgtccgccctgttaccctgtgttttggcactggtgcagggtgtggggcggctggaatgtccccccgctccgatcaacggtaccccaggcccacctttggactttttggagagattcccggctagcactttcttttgggcactgactgccctcttggttgccagtgcagccgcattccagggtctactgctgttactccctccacctccaagcgttcccacaggggagttagggagtggattacaagttggagcgcccggggctgaggaagaagttgaggaatcaagccccctgcaagagcctccatctcaagcagctggtacaacgccaggccccgaccctaaagcataccagctcctgagcgccagatctgcttgtctcttgggcctcctcgctgccacaaacgcactgacaaatggagtcctgccagccgtacagtccttctcctgtctcccatacggaagattggcctaccacctggcagtagttctggggtctgccgctaatcctttagcctgcttccttgctatgggggtgctatgcaggtcactggcaggcctgggtggcctgtccctgctaggagtattctgtggcggatatttaatggccctggccgtgctcagtccatgcccccctctggtcggcacatctgctggagtagtgctcgtcgtcttgtcttgggtcctctgcctgggggtcttttcctatgttaaagttgccgcctcctccctattacacggaggtggacgccccgcccttttggccgccggcgttgctatacaggtagggagcctcctcggggccgtcgccatgttccctcccacttccatctatcacgtgttccactcccggaaagactgtgccgacccctgcgatagctag

SEQ ID NO: 88745 - DNA, 1338 bp, Artificial Sequence
  derived and/or modified sequence
atggccgcccccaccccggcacgaccagtgctgacacatttactcgtcgcattattcggcatgggcagctgggcagccgtgaacgggatatgggttgaactacctgtagttgtaaaggagctgcccgagggctggtcacttccttcctatgtgtctgtcttggtggctctaggaaatctagggctgctggtagtaacactgtggagaaggctggctccaggcaaggatgagcaagttcccatcagagttgttcaggttctggggatggtgggcaccgcgctcctcgcctccctgtggcaccatgtggcgcctgtggctgggcagcttcacagcgttgcgtttctcgcactggccttcgttttggccctcgcatgctgcgcatccaacgtgacattcttaccttttcttagtcatctcccaccacgctttctgcgcagcttctttctaggccagggtctgagtgcgttgctgccctgtgttctggccctagtacagggcgtcggccggctggagtgtcctcctgctcccataaatggcacacccggcccgccattggactttctcgaacgatttcccgctagtacctttttctgggcactgacggccctgttggttgctagtgccgctgccttccaaggcctgctgctgctactgccccctccaccaagcgtaccgaccggcgaactaggcagtggactgcaagtcggggcacctggagccgaagaagaggttgaagagtccagcccactgcaggaaccgccaagccaagcagctggcacaacacccggtcctgaccccaaggcctaccagctcctatcagctcgctccgcttgcttgctcggtctgttggcggcgactaatgccctgacaaacggggtgttgcctgccgttcaatcattcagctgtttaccatatggacggcttgcctaccacctggcggttgtgctgggtagcgcagcgaaccctctcgcctgttttctggctatgggcgtcttgtgtagatcactggcaggattgggagggctctccctgctgggcgtgttttgtgggggctatttgatggccctggccgttctcagtccctgtcctccactcgtgggaacatctgcaggagtggtgctggttgttttgtcttgggtgttgtgccttggcgtattctcatacgtgaaggtcgctgcatcttctctgttacacggaggcggccgccccgccctgctcgcagctggagtcgctatccaagtgggctccctactcggcgccgtggctatgttccccccaacatctatttaccatgtctttcacagcaggaaagactgcgccgatccgtgtgatagctag

SEQ ID NO: 88746 - DNA, 1338 bp, Artificial Sequence
  derived and/or modified sequence
atggccgcccccacccccgcccggcccgtgctgacccacctgctggtagcactgtttgggatggggagctgggcagcagtaaatgggatatgggtggagctgcccgtggtcgtgaaggaactgccagaggggtggtctctcccttcctacgtcagcgtcctcgtggcacttggaaatttaggcctccttgttgtcacactgtggcggcgcctggcacccggtaaggacgagcaggtgccaataagagtagtccaggtgctcggcatggtgggaaccgcactcctcgcatccttgtggcaccatgttgctcctgtggccgggcagctccattcggtcgctttcttggctctggcattcgtgcttgcgctcgcctgttgtgcctctaacgtgacctttctccccttcttgagccatctacctcccaggttcctgaggtccttctttctcggccaaggcctctctgcgttactgccttgtgtccttgccctggtccagggcgtggggaggctggagtgtcccccagcgcccataaatggtacccccggcccaccgctggactttctggaaaggtttcctgcgtcaactttcttctgggccctgactgcgctcctcgtagcgagcgccgccgcatttcagggtctgctactactgttacctccacctccttctgtgcctaccggggaacttggctcaggactgcaggtaggggccccaggtgccgaggaagaagtcgaggagtcttcacctctgcaggaaccaccatcacaagcagctggtacgacccctggtccagatcctaaagcttatcagctgctgagcgcgcgctccgcttgtctgttgggtctgcttgctgcgactaacgcgctgactaatggcgttcttccagccgtgcagtctttttcttgtcttccatacgggcgcttggcgtatcacctggccgtggtgttgggatccgcagcgaacccacttgcttgctttttagctatgggtgtactttgcagaagccttgccgggctgggcggcctgtccttactcggagtcttctgcggagggtacctgatggcgctcgccgtgctgtctccctgtcccccattggtgggcaccagtgctggtgtagtgcttgtggtcctatcttgggtcctgtgtctgggcgtgttcagctacgtcaaggtggctgctagttccttactccacggcgggggcagacctgctctgctggccgcaggcgtggccatccaggtcggatctctccttggcgccgtcgccatgtttccccccacttctatctaccatgtctttcactcaagaaaggactgtgcggatccctgtgattcctag

SEQ ID NO: 88747 - DNA, 1338 bp, Artificial Sequence
  derived and/or modified sequence
atggccgcccccacccccgcccggcccgtgctgacccacctgctggttgcactgtttggtatgggcagttgggccgccgtgaacggtatctgggtcgagctgccggtcgtcgttaaggagctgcccgaaggctggagcctcccgtcctatgtgtcagtgctggtggccctagggaacctggggctgctggtggtgaccctgtggcggaggctggcacctggaaaggatgaacaagtgcctataagggttgtccaggttcttggcatggtgggtacggctttgctggcctccctgtggcatcacgtcgctccagtggccgggcaattgcactccgtcgcttttttggcactggcttttgttttggccctggcttgctgtgcgtctaacgtgactttcctcccatttctttctcacctcccgccgcgcttccttcgctctttcttcctcggacagggcctgtctgccctgctaccctgcgtgttggcactcgtgcagggcgtgggtcgtcttgagtgcccccctgcaccaatcaacggtacaccaggccctcctctagacttcctggagcggtttccggcgtccacatttttctgggctttgactgcactactcgtggcaagcgctgctgctttccagggcctgttgcttctgctgcctcctccgccatccgttcccactggtgagttgggatccggcttgcaggtgggggcacctggggcggaggaggaggttgaggagagctcacctctgcaagagcctccaagccaagctgctggaacaactcccggcccagaccctaaggcctaccagctattgtccgctcgctcagcctgcctgctaggcctgctggcagctacaaatgccctgacaaacggcgtgctgcctgcagtgcagtctttcagctgtctgccatacggtcgtctggcatatcacttggctgtggttctgggctctgccgctaacccccttgcctgctttctcgccatgggcgttctttgtcggagtctggctgggttaggcggtctgtccctgctgggcgtcttttgcgggggctatctgatggccctggccgtcctctccccgtgcccccccttggtcggaaccagtgctggggtggtcctcgtcgtgctgtcttgggtactctgtctgggcgttttctcttatgtgaaggtcgctgctagcagtttgctgcacgggggtggccgcccagccttgcttgctgctggggtggccatccaggtagggtctctcttgggagccgttgcaatgttccccccaacaagcatctatcatgtgttccacagtcgcaaggactgcgccgatccatgtgatagctag

SEQ ID NO: 88748 - DNA, 1338 bp, Artificial Sequence
  derived and/or modified sequence
atggccgcccccacccccgcccggcccgtgctgacccacctgctggtggcgctgtttggcatgggaagctgggcagctgtgaacgggatatgggtggagctccctgtggtggtaaaggagctgcccgaggggtggagcctgccatcctacgtctcagtgttagtcgccctgggcaatttaggcttactggtcgtcactctctggcgcaggctggctccggggaaagacgaacaagtgcccattcgcgtggtccaggtacttgggatggtcggcacagccctgctggctagtctctggcaccacgtggcaccggtcgccgggcagctacactccgtcgcctttctcgctctggcgttcgtcctggcactagcctgctgcgcttctaacgtgaccttcctgccattcttgtcccacctgccccctcggtttttaaggagttttttcctgggacaggggctgtcggccctgctgccatgcgtactcgccctggtacagggtgtcggcaggctcgagtgcccccccgctcctataaacggcacacccgggcccccgttagactttttagaaagatttcccgctagcaccttcttctgggctctgacagccctgctcgtagccagtgctgcagcattccagggtctactactgttattgcccccacccccatctgtgcccaccggggaactgggaagcggcctccaggtgggcgccccaggcgcggaggaagaggttgaagaatctagcccactccaggagccaccgagtcaggccgccggaaccactccaggccccgaccctaaggcataccagctattatccgcccgctcagcttgtcttcttggactcttggccgccacaaacgcactgaccaacggggtgctgcctgctgtgcagagtttttcgtgcctgccatatgggaggcttgcgtaccacttagccgtggtgctggggtcagctgccaacccactcgcctgttttctcgccatgggggtgctgtgtcgatcgttggccggcctgggtggactgagtttactgggcgtcttttgcggcggctacttgatggcgctcgctgtacttagcccatgtcccccccttgtcggaacctcggcgggcgtcgtcctggtagtgctatcctgggtcctgtgcctgggggtcttctcctacgtcaaagtggctgctagctccctcctccacggaggaggaaggccggctctgctcgctgccggagtggccattcaggtcggctctcttctgggagcggtggccatgttcccccctacatcaatttaccacgtgttccactcgagaaaggactgcgcggatccatgcgattcttag

SEQ ID NO: 88749 - DNA, 1338 bp, Artificial Sequence
  derived and/or modified sequence
atggccgcccccacccccgcccggcccgtgctgacccacctgctggtggccctgtttgggatgggttcatgggccgctgtgaatggtatttgggtggaactgccggtggtagtgaaggagctacctgaggggtggtcccttccttcctacgtgtccgtactcgtagcgcttgggaacctgggcctgctcgtggttacactctggagacggctcgcaccaggaaaggacgagcaggtgcccatacgagttgtgcaggtgttggggatggtcggtactgcccttctggccagcctctggcaccatgtggcccctgtcgctggtcagttacattccgtggcttttctagcgctggcctttgtgctggctctggcgtgctgcgcttctaacgtgacattcctgccctttctgagccatttaccacccagattcttgcgctcattttttctcggacaaggcctgagcgcactactgccttgtgtgctggcactggttcagggcgtggggcggctggagtgccctcccgctcccatcaatggtactcccggcccacctttggacttcctcgaacggttccccgcctccacatttttttgggcccttactgcactcctggtggcctccgcagctgccttccaaggtctgctgctgctccttcccccgcccccttctgtgcccactggggaacttggaagtgggctgcaagtgggcgccccaggcgccgaggaagaggtagaggaaagctcacctcttcaagaacctccctctcaggccgccgggacgacaccggggccagaccctaaggcataccagttgctctcagccagaagtgcctgtctgctggggctgcttgccgccactaatgctctgaccaacggcgtactgcccgccgtccagtcatttagttgtcttccctatggcaggctagcctaccacctcgccgtcgtcctcggctctgcggcaaatcccctggcctgcttcctggcaatgggggttttatgtagatccttagctgggctggggggccttagtttactgggcgtcttctgtgggggttatcttatggctctcgcagtacttagtccatgtccacctctcgtcgggacctctgcaggtgttgtgttagtcgtcctaagttgggttctctgtctcggcgtgttttcatatgtcaaagtggccgcttctagcctgttgcatgggggaggtaggccagccctgctcgccgccggagtggccatccaagtcggaagcctgctcggggctgttgcgatgttcccgcctacttctatctaccatgtctttcactctcgaaaagattgtgccgacccctgcgacagttag

SEQ ID NO: 88750 - DNA, 1338 bp, Artificial Sequence
  derived and/or modified sequence
atggccgcccccacccccgcccggcccgtgctgacccacctgctggttgccctttttgggatgggctcctgggccgccgtcaacggtatctgggtggaattgcctgtggtggtgaaggagctgccagaaggatggagcctacctagttacgtaagtgttctggttgcactggggaacctcggccttctggttgtgaccctgtggcgccgtctggctcctggcaaagacgagcaggtgccaatccgagttgtccaggtgcttggcatggttggaactgccttattggccagcctgtggcaccatgtggcccctgtggctgggcaactccacagcgtggcctttctggcattagctttcgtcctggctttggcgtgctgtgcatcaaatgttacattcttgccatttttatcacacctcccccctcgctttctgcggtcattttttctggggcagggactaagcgcacttctaccttgtgtgctcgcccttgtccagggggttgggcgactggaatgtccacccgcacctatcaatggaacccccgggccccccctggactttctcgagcggttcccagcatcaaccttcttctgggcattaaccgccctgctggttgccagtgcagcagccttccagggcctgcttctgctgctaccaccccccccaagcgtgcccacaggagaactggggtccggactccaagtcggtgcaccaggtgccgaagaagaagtggaggaatccagccccttgcaggagcccccgagccaagccgctggcactactcccggccccgatcctaaggcataccagctactaagtgcgagatcggcctgtctgctggggttgttggccgctactaacgccctgaccaatggcgttctccctgccgtacaatcgttctcctgtctcccttacgggaggcttgcgtatcatctggccgtggttctgggttcagctgctaacccacttgcctgcttcctcgccatgggcgtgctttgtaggagcctagccggattaggcggcctctccctcctaggcgtgttttgcggcggttaccttatggctttggcagtgttgtcgccatgcccccccctcgtggggacctctgcaggagtagttctcgttgtgttgtcctgggtactttgtttgggcgtgttctcctacgtaaaggtggctgcctcgagtctcctacacgggggaggacggcctgctctgctggctgcaggcgtagcaatccaggtgggttctctgctgggtgcagtcgctatgttcccccctactagcatctaccacgtgtttcattcgaggaaagattgcgccgacccctgcgattcttag

SEQ ID NO: 88751 - DNA, 1338 bp, Artificial Sequence
  derived and/or modified sequence
atggcagctccgacacccgctagaccagtgttgactcacttactcgtggcactgtttgggatggggtcttgggctgccgtgaatggcatatgggtggaactaccggttgtcgttaaagagttgcctgagggatggtctcttccgagctacgttagcgttcttgtggccctgggcaatctgggattacttgttgtgaccttatggcgaagactcgcgccaggcaaagacgaacaggttcctattagggtggtgcaagtgctaggtatggtcggaacagctcttcttgccagcctatggcatcatgtagccccagttgccggacagctgcactccgttgccttcctggcactggctttcgttttggcactggcgtgctgcgccagtaacgtaactttcctcccctttctgagtcacctgcccccacgcttcctgaggtctttcttcctgggacaagggctgagtgccttgttgccttgcgtactcgctctcgtgcagggggtggggaggctcgaatgccctccggctcctataaatggcacacccggaccaccccttgactttttggaacgattccctgcatccacctttttttgggcacttacagcgcttcttgttgccagtgctgcagccttccagggcctcctgctgctgctcccgccacctccttctgtgccaacaggcgagctgggttctggcctacaggtcggtgcccctggggctgaggaggaggttgaggagtcatctccactccaggagccaccaagccaggcggcaggtactactccgggtccagatccgaaagcttatcagcttctgtctgctcggtctgcttgcttgctgggtctactcgcagccacaaacgcccttacaaacggtgttctcccagcagttcagtcatttagttgtttgccgtacggaaggctggcataccatctggctgtagtcctgggctctgctgcaaacccactcgcctgtttcttggctatgggagtgttgtgccgcagtctggccggactcggagggctctccctgctgggtgttttctgcggcggatacttgatggcccttgctgtgctgagtccatgcccacctctggtgggtacatctgccggagtagtgcttgtcgtgctgtcctgggtgctgtgcctgggcgtgttttcatacgtgaaagtagccgcaagcagcctgctccacggcggaggaaggcctgctctgcttgcagcaggcgtcgccattcaggtcggcagcctgttaggggctgtggctatgttcccccctacctctatttatcacgtgtttcatagtcgtaaggactgtgccgacccctgtgattcctag

SEQ ID NO: 88752 - DNA, 1338 bp, Artificial Sequence
  derived and/or modified sequence
atggcagccccaacacccgcacgacccgtgcttacccacctgcttgtcgccctgtttggtatgggtagctgggccgctgtaaatggaatctgggtggaactgcccgtggtcgtaaaggaacttcctgaaggctggtcgcttcccagctacgtgtccgtgctcgtggcattgggtaatctcgggctcctagtggttactttgtggcggaggctagccccagggaaagatgagcaggtcccaatccgcgttgtgcaggttctggggatggttggtaccgccctgcttgcttcactctggcatcatgtggctccagtggcagggcagttgcattctgtagcctttctggccctcgctttcgttcttgccctggcctgctgcgcctctaatgttactttcctccccttcttgtcgcacctaccacctcgtttcctgcggagcttttttctgggccagggtttatcagccctgcttccgtgcgtgctcgccctagtccagggagtgggcaggttggagtgtccacccgctccaattaacggcacacccggacccccactggactttctggagaggttccctgcctctacttttttttgggcacttacagctctgctggtagcttcagctgcagcattccagggtctacttctcctgctgccccctccgccttcagtgcccactggtgagctgggatccggcctccaggtgggtgctccaggggcagaggaggaagtcgaagagtctagcccgctgcaagagccacccagccaggccgctggaacaacacccggtccagaccccaaagcataccagctcctctccgcacgctctgcttgccttctgggtctgcttgccgcaactaatgcgctgaccaatggtgtcctgccggctgtccaatctttctcctgtctgccctatggccgactcgcgtaccatcttgcggtggtgctgggcagcgctgcaaatccactggcatgctttttagcaatgggagtgctgtgtcgcagcctggcaggactcggtggcttaagtctcctcggcgtgttttgtggcggataccttatggccctagccgtactgagcccctgcccgccactggttggaacaagtgctggggtggttctggtcgtattgtcctgggtgctctgccttggagtgttttcttatgtgaaggtcgccgcttccagtctgctgcatggcggaggacgtcccgcactgctggcagccggagtggccattcaggtgggcagcttactgggggcagtggctatgttccctcctacctctatctaccacgtgtttcacagccgtaaggactgcgcagacccttgcgattcttag

SEQ ID NO: 88753 - DNA, 1338 bp, Artificial Sequence
  derived and/or modified sequence
atggctgccccaacacctgctcggccagtccttacacacctgttggtggcgctgtttggaatgggatcatgggcagcagttaatggcatatgggtcgagctccccgtagtggtgaaggagctgccagagggctggagtctgccttcttacgtgtcagtgctggttgcgctgggcaacctgggcctcctagtggtgaccttgtggcggaggctcgcccctggcaaagatgagcaggtaccaatcagagtggttcaggtgttaggtatggttggcacagccctcctcgcctcactgtggcaccacgtcgccccagtggcgggtcagcttcatagcgtagcttttctggctctggcattcgtgctcgccctggcctgctgtgcctcaaacgtgaccttcctgcctttcctgagccacctcccccctaggttcttgcgctccttctttcttggtcagggcctcagcgctttgcttccatgcgttctggccctggtccagggagtgggtcggcttgagtgcccccctgcccctattaatggcacacccggacctcccctggattttttggagaggtttcccgctagcacgtttttctgggccctgactgcgttactcgtcgcttcggcagctgcctttcagggactacttttgctgctgccccctccccctagtgtgccaaccggtgagctgggcagtgggttgcaggtgggagctcctggtgccgaggaagaggttgaagagagctctccactccaagaaccccctagtcaagccgctggcaccaccccaggacctgatcccaaggcttatcaactgctttcagcccgttcagcatgcttgctggggctgctggccgcaactaacgccttgaccaatggggttctaccggcagttcagagtttttcctgcctcccttatggacgcctagcttaccacctggccgtggtgctggggagtgctgccaatccactcgcgtgttttcttgccatgggagtcttgtgtcgatccctggctgggctcggcggactgagccttctcggggtgttctgtggtggctacctgatggctctcgctgtactaagcccgtgccccccattggtgggcacctccgctggggtggtgttggtcgtgctgtcctgggttctttgcctaggtgtgttcagctacgttaaagtcgctgctagctcgttactgcacggcggaggtcgaccagcactccttgctgctggcgtggctatccaagtggggtctctcctgggggcagtcgcgatgtttcctcctactagtatataccacgtgtttcatagccgcaaagactgtgccgatccttgcgattcttag

SEQ ID NO: 88754 - DNA, 1338 bp, Artificial Sequence
  derived and/or modified sequence
atggccgcaccgactcctgcaaggccagtacttactcatcttttggtcgctcttttcggaatgggctcttgggctgctgtgaacggtatctgggttgaactacctgtcgtggtcaaggagctccctgaggggtggagtctgccgtcctacgttagcgtgctggtagccctcggaaatctgggccttctggtggtcactctttggcgcagactggctcccggtaaagacgaacaagtaccaattcgggtggttcaggttttgggtatggtgggcactgccttgcttgccagcctatggcaccacgttgcgccagtggccggacagcttcactcagtagcgtttcttgctctcgcattcgtgctcgcccttgcgtgctgcgcttcgaacgtaactttcctgcctttcctgtcccaccttccaccacggtttcttcggagcttttttctgggccaaggactgagtgctctcctaccatgtgtgctggcccttgttcagggggtgggtcgcctggaatgcccccctgcccctataaatgggacccctggccctcccttagactttctggagaggttcccagctagcacttttttttgggctctgaccgcgctcctcgtggcctctgctgctgctttccagggcctgcttcttctgctcccaccccctcctagcgtgcccactggcgagctaggatcagggctgcaggtgggagcacctggagctgaagaagaagtcgaagagtcctccccccttcaggaacccccttctcaagcggctggaactacacccggacccgacccaaaagcttatcagctgctcagcgctcggagcgcttgcctcctcggattactagcggcaactaacgcccttaccaacggcgtgcttcccgctgtgcagtcttttagttgccttccatacggcagacttgcgtaccacctggccgtcgtgctgggctctgcagcaaatccactggcttgttttctggctatgggggtcctatgccggtctttggctggcctcggaggcctttctctgctgggggtgttttgcgggggatacctcatggccctcgcggtgttatctccctgtcctccgctcgtaggaactagcgctggggtggtgcttgtagttctctcttgggtcctgtgtctgggggtgttcagctacgtgaaagtggcagcatcatcactcttgcatgggggtggcagaccagctctgctggctgcaggcgtcgccatccaggtggggtccctgttaggggctgtagccatgttccctccaacttcaatctaccacgttttccattctcgcaaagactgcgccgatccctgcgatagctag

SEQ ID NO: 88755 - DNA, 1338 bp, Artificial Sequence
  derived and/or modified sequence
atggccgcacccacccctgccaggcccgtcctgacacacctgttggttgccctttttggaatggggtcttgggctgcagtcaacggcatctgggtcgagctgcctgtggtcgttaaagaactgccggaaggatggagcttgccgtcgtacgttagtgtgctggttgccctgggaaacctcggactcctcgtggtgacactctggcgcaggctcgcaccaggcaaagacgagcaagttccgattcgggtcgtgcaagtgttgggaatggtgggtaccgcactgctggcctctctgtggcatcatgtagcacccgtggcgggtcagctgcacagtgtggccttcttagctcttgccttcgtcctggctcttgcttgttgtgccagtaacgtgacttttttgcccttcttgagtcatttgcccccaagattccttcgctcttttttcctggggcaagggttatcagccctcctgccctgcgtgctggccctggtgcagggcgtggggagattagagtgccccccagcaccaattaacggtacgccgggtcctccactggattttctcgagagatttccagcttctacatttttttgggccctgactgctctgctggtggcgtccgctgccgcttttcaagggttgcttttgttacttcccccaccgccttccgtgcctacaggcgagcttggaagcggacttcaggtgggcgcacccggagctgaggaggaggtggaagagagcagcccgctacaggaacctccctcccaagcagcgggaaccacacctggacccgatcccaaggcttaccagcttctgtccgctcgatccgcttgccttttgggcctgctagctgccactaacgcgctgacgaacggggttcttccagctgtccagtcattctcttgcctcccttacggcagactcgcataccacctggccgtggtgctggggagcgcggcaaacccattagcgtgctttctcgccatgggcgtgctgtgcagatctctggctgggttgggcggacttagtctgttgggagtgttctgcggagggtaccttatggccctggccgttctgtccccatgtccaccattggtgggtacttccgccggagttgtgctagtggtactgtcctgggtgctctgtctgggcgtgttctcatatgtgaaagttgcagcttcatctctgctacacggagggggacgccctgccctgcttgcggcaggcgtagcgatacaagtgggcagcctccttggagccgtggctatgttccctcctacaagcatctatcacgtcttccactctcgcaaggattgtgctgacccctgcgactcctag

SEQ ID NO: 88756 - protein, 557 aa, Artificial Sequence
  derived and/or modified sequence
MRRLTRRLVLPVFGVLWITVLLFFWVTKRKLEVPTGPEVQTPKVWSLFFKVAGMSPWAPQVPVSPTPPYQRGHLPTGGHLAVCHFPCLLQEAQFHLQTQVFLQVRCTLLVYCTDLPPTSIIITFHNEARSTLLRTIRSVLNRTPTHLIREIILVDDFSNDPDDCKQLIKLPKVKCLRNNERQGLVRSRIRGADIAQGTTLTFLDSHCEVNRDWLQPLLHRVKEDYTRVVCPVIDIINLDTFTYIESASELRGGFDWSLHFQWEQLSPEQKARRLDPTEPIRTPIIAGGLFVIDKAWFDYLGKYDMDMDIWGGENFEISFRVWMCGGSLEIVPCSRVGHVFRKKHPYVFPDGNANTYIKNTKRTAEVWMDEYKQYYYAARPFALERPFGNVESRLDLRKNLRCQSFKWYLENIYPELSIPKESSIQKGNIRQRQKCLESQRQNNQETPNLKLSPCAKVKGEDAKSQVWAFTYTQQILQEELCLSVITLFPGAPVVLVLCKNGDDRQQWTKTGSHIEHIASHLCLDTDMFGDGTENGKEIVVNPCESSLMSQHWDMVSS

SEQ ID NO: 88757 - DNA, 1674 bp, Artificial Sequence
  derived and/or modified sequence
atgagaagactgaccagaagactggtgctgcccgtgttcggcgtgctgtggatcaccgtgctgctgttcttctgggtgaccaagagaaagctggaggtgcccaccggccccgaggtgcagacccccaaggtgtggagcctgttcttcaaggtggccggcatgagcccctgggccccccaggtgcccgtgagccccacccccccctaccagagaggccacctgcccaccggcggccacctggccgtgtgccacttcccctgcctgctgcaggaggcccagttccacctgcagacccaggtgttcctgcaggtgagatgcaccctgctggtgtactgcaccgacctgccccccaccagcatcatcatcaccttccacaacgaggccagaagcaccctgctgagaaccatcagaagcgtgctgaacagaacccccacccacctgatcagagagatcatcctggtggacgacttcagcaacgaccccgacgactgcaagcagctgatcaagctgcccaaggtgaagtgcctgagaaacaacgagagacagggcctggtgagaagcagaatcagaggcgccgacatcgcccagggcaccaccctgaccttcctggacagccactgcgaggtgaacagagactggctgcagcccctgctgcacagagtgaaggaggactacaccagagtggtgtgccccgtgatcgacatcatcaacctggacaccttcacctacatcgagagcgccagcgagctgagaggcggcttcgactggagcctgcacttccagtgggagcagctgagccccgagcagaaggccagaagactggaccccaccgagcccatcagaacccccatcatcgccggcggcctgttcgtgatcgacaaggcctggttcgactacctgggcaagtacgacatggacatggacatctggggcggcgagaacttcgagatcagcttcagagtgtggatgtgcggcggcagcctggagatcgtgccctgcagcagagtgggccacgtgttcagaaagaagcacccctacgtgttccccgacggcaacgccaacacctacatcaagaacaccaagagaaccgccgaggtgtggatggacgagtacaagcagtactactacgccgccagacccttcgccctggagagacccttcggcaacgtggagagcagactggacctgagaaagaacctgagatgccagagcttcaagtggtacctggagaacatctaccccgagctgagcatccccaaggagagcagcatccagaagggcaacatcagacagagacagaagtgcctggagagccagagacagaacaaccaggagacccccaacctgaagctgagcccctgcgccaaggtgaagggcgaggacgccaagagccaggtgtgggccttcacctacacccagcagatcctgcaggaggagctgtgcctgagcgtgatcaccctgttccccggcgcccccgtggtgctggtgctgtgcaagaacggcgacgacagacagcagtggaccaagaccggcagccacatcgagcacatcgccagccacctgtgcctggacaccgacatgttcggcgacggcaccgagaacggcaaggagatcgtggtgaacccctgcgagagcagcctgatgagccagcactgggacatggtgagcagctag

SEQ ID NO: 88758 - DNA, 1674 bp, Artificial Sequence
  derived and/or modified sequence
atgcgccgccttaccaggcggctcgtgctacccgtattcggagttctctggatcacagttttactcttcttctgggtgaccaaacgcaagttagaggttccgacaggtccagaggtgcagaccccaaaggtgtggtcactgttttttaaagtcgccggtatgagcccatgggctccccaagttcctgtgtctccgacccccccttaccaaagaggccatctgccgacaggtggtcacctggctgtttgccattttccatgcctgttgcaggaggcccaatttcacttgcagacccaggtttttttgcaggtgcgctgtactctactagtctactgcacagacttgccacccacctccattattatcacttttcataacgaagccaggtctacactactcaggacgatccgcagtgttcttaataggacccccactcacctgatcagagagataatcctggtagacgacttctcaaacgatccggacgactgtaagcagctgatcaagctacctaaagtcaaatgcctacgaaacaatgagaggcaagggctggttaggtctcgcatccgcggcgcggatatcgcccagggaaccacgctcactttcctagactctcactgcgaagtcaacagggattggcttcagcccctattacaccgggtgaaggaggattacactagggtggtgtgcccagttatcgatattattaacctcgatacatttacatatattgagagtgcctctgaactcagagggggctttgattggagtctccattttcagtgggaacaacttagccccgaacagaaagccagacgtcttgatcctaccgagcccatcagaactccaatcatagccggaggtctctttgtgatcgataaggcgtggttcgactatttaggaaaatatgacatggatatggacatctgggggggagaaaacttcgagatatcctttcgggtctggatgtgcggagggtccctcgagatcgtgccctgcagcagggtgggtcacgtatttcggaagaaacatccgtacgtgttccccgacgggaacgccaacacatacattaagaatacaaaacggacagctgaggtgtggatggatgagtataagcagtattactacgccgcaaggccctttgctttagaacggccattcggaaacgtcgaatccagactcgatctgcgcaaaaacttgcgctgccagtcttttaagtggtatctcgagaatatctaccccgagctcagcattcccaaagagtccagtatccagaagggaaatataaggcagcggcagaaatgtttagagtctcagagacagaacaatcaggagacaccaaacctgaaactaagcccatgtgccaaggtcaaaggggaggacgcgaagtcacaggtctgggccttcacatatacccaacaaattctgcaggaagagctttgtctgtcggttatcacactgttccctggagcgcccgtcgtcctggtgctgtgtaagaacggtgacgaccgtcagcagtggacaaagacagggtcacatatcgagcacatcgcaagtcatttatgccttgacaccgatatgttcggggacggcacggagaacggcaaagaaatcgttgtgaacccttgcgagagctcattgatgagtcaacactgggacatggtatcgtcctag

SEQ ID NO: 88759 - DNA, 1674 bp, Artificial Sequence
  derived and/or modified sequence
atgaggcggctgacccggcggctggtgctgcctgtgtttggagtgctgtggatcaccgtgctgctcttcttctgggtgaccaagaggaagctggaggtgcccactggacctgaggtgcagacccccaaggtgtggagcctcttcttcaaggtggccggcatgagcccctgggccccccaggtgcctgtgagccccaccccaccctaccagaggggccacctgcccaccggcggccacctggccgtgtgccacttcccctgcctgctgcaggaggcccagttccacctgcagacccaggtgttcctgcaggtgcgctgcaccctgctggtgtactgcacagacctgccccccaccagcatcatcatcaccttccacaatgaggcccggagcaccctgctgcggaccatccgctctgtgctgaacagaacacccacccacctgatccgggagatcatcctggtggatgacttcagcaatgaccctgatgactgcaagcagctgatcaagctgcccaaggtgaagtgcctgagaaataatgaaaggcagggcctggtgcgcagccgcatcagaggagctgacatcgcccagggcaccaccctgaccttcctggacagccactgtgaggtgaacagagactggctgcagcccctgctgcaccgggtgaaggaggactacaccagggtggtgtgccctgtgattgacatcatcaacctggacaccttcacctacatcgagagcgccagcgagctgcggggcggctttgactggagcctgcacttccagtgggagcagctgagccctgagcagaaggcccggcggctggaccccacagagcccatccgcacccccatcatcgccggcggcctcttcgtcatcgacaaggcctggtttgactacctgggcaagtatgacatggacatggacatctggggcggagaaaattttgagatctccttccgggtgtggatgtgtggcggcagcctggagatcgtgccctgcagccgggtgggccacgtgttcaggaagaagcacccctacgtgtttcctgatggaaatgccaacacctacatcaagaacaccaagaggacagctgaggtgtggatggatgagtacaagcagtactactatgctgcccggccctttgccctggagcggccctttggaaatgtggagagccggctggacctgaggaagaacctgcgctgccagagcttcaagtggtacctggagaacatctacccagagctgagcatccccaaggagagcagcatccagaagggcaacatccggcagaggcagaagtgcctggagagccagaggcagaacaaccaggagacccccaacctgaagctgagcccctgtgccaaggtgaagggggaggatgccaagagccaggtgtgggccttcacctacacccagcagatcctgcaggaggagctgtgcctgagcgtcatcaccctcttccctggggcccctgtggtgctggtgctgtgcaagaatggagatgaccggcagcagtggaccaagacaggcagccacatcgagcacatcgccagccacctgtgcctggacacagacatgtttggagatggaacagaaaatggcaaggagatcgtggtgaacccctgtgagagcagcctgatgagccagcactgggacatggtgagcagctag

SEQ ID NO: 88760 - DNA, 1674 bp, Artificial Sequence
  derived and/or modified sequence
atgcggcggctgacccggcggctggtgctgcccgtgttcggcgtgttatggatcaccgttcttctcttcttttgggtgacgaaaaggaagttagaggtcccaactggacctgaagttcagactccaaaggtgtggtccctgttcttcaaggtagccgggatgagcccatgggcacctcaggtccctgtcagcccaaccccaccataccagagggggcatctgcctactggtggccatctggcagtctgtcactttccgtgccttttacaagaggcccagtttcacctccagactcaggttttcctgcaggtgcggtgcaccctgctggtctattgtacagacctcccccctaccagtatcattataacattccacaacgaagcaaggtctacattgttgcggacaattaggtcagtactgaatagaacacctacccacctgatccgcgaaataatcctggtggacgattttagcaacgaccctgacgattgtaaacaactcataaagctgcctaaagtgaagtgtcttaggaacaatgagcgacaaggtcttgttaggagcagaatcaggggcgccgatattgcccagggcactacactgacttttctagactcccactgtgaagtgaacagagattggctccagccccttctgcaccgtgtaaaggaggattacactcgcgttgtgtgccctgtgattgatatcatcaatctggataccttcacctatattgaatctgcatccgaattgcgtggagggttcgattggtcactgcacttccagtgggagcagcttagtccagagcagaaggccagaagactcgatcccaccgagcccattcgcacacccattattgccggaggactctttgtgattgacaaggcatggttcgattacctggggaagtacgacatggatatggacatctggggaggggagaattttgagataagtttcagggtgtggatgtgtgggggcagcctcgaaattgtgccttgttctcgcgtgggccatgtcttcagaaaaaagcatccatatgtgtttcccgatggcaacgcgaacacatacattaagaatactaagcgaaccgccgaagtatggatggacgaatataagcaatattactacgccgctcgacccttcgccctggagagaccctttgggaacgtagagtcgcgtcttgatctgcggaaaaaccttagatgtcagagctttaagtggtacctggagaacatttatccagaattgtcgatcccaaaggaatcatcaatccagaagggcaacattcgccagcgccagaagtgcctagaatcccagaggcaaaacaaccaggagacccccaacctgaaacttagcccttgtgccaaagtgaagggagaggatgccaaatctcaagtgtgggcatttacttacactcagcaaattctccaggaggaactgtgtctgtccgtgatcactttgttccctggggcccctgtggtgctcgttctgtgtaaaaacggggatgaccgccagcagtggactaaaacaggctcccacatcgaacatattgccagccatctttgcttagatacagatatgtttggggacggtaccgaaaacggcaaagagattgtggtgaatccctgtgagtcatccctgatgtctcaacactgggacatggtgtccagctag

SEQ ID NO: 88761 - DNA, 1674 bp, Artificial Sequence
  derived and/or modified sequence
atgcggaggctgacgcgcaggcttgtgctgccggtcttcggcgttctttggatcaccgtgctgttgtttttttgggtgactaaacgcaaattagaagtgccgactgggcctgaagtgcagacaccgaaggtctggagcctgttctttaaggtggcgggtatgtcgccatgggctcctcaagttcccgtatcccccacgccaccctaccaacgcggacacctgcctactggtggccatctggcagtgtgccactttccttgcctgctgcaggaggcacagttccacctccaaacacaggtgtttctgcaggtaaggtgcacactgttagtgtactgcacggacttgcccccaacaagcattatcatcactttccataacgaggcgagatctacccttctgaggaccatccgaagtgtgctcaataggaccccgactcacttaatcagagagatcatcttagttgatgacttctccaatgacccggatgattgcaagcagttaattaagctgcctaaggtgaaatgcttgcgcaacaatgaacgccagggcctggtgcggagtaggatccgcggagcggacattgcccagggcaccaccctcacttttttggatagccattgtgaagtcaatagggactggctgcagcctttactccaccgggttaaagaggattacactcgggttgtgtgccctgtaatcgatattataaacttggacacttttacatacattgagtcggcttccgagctgcgaggcggattcgactggtccctgcattttcagtgggaacaactctctcccgaacaaaaagcccgacggttagaccctacggaaccaattcgcacacctataatcgccggtggactgttcgttatcgacaaagcgtggttcgactaccttgggaaatacgacatggatatggatatctggggtggagaaaacttcgaaatttcctttcgagtttggatgtgcggcggttccctggagatcgtgccctgcagtcgtgtcggccatgtgtttcgaaagaaacatccctacgtgtttccggacgggaatgctaatacttatatcaagaacacgaagaggactgccgaggtttggatggatgaatacaagcaatattattacgccgctaggccattcgcactcgaacgcccttttggcaacgtagaatccagactggacttgcggaagaacctgagatgccaaagcttcaaatggtatttggaaaacatctatcctgaattatccatccctaaagaatcgtcaatccagaagggtaacatcaggcagaggcagaaatgcttagaatctcagcgccaaaacaaccaagagactccaaacctcaaactgagcccttgcgcaaaagtgaagggtgaggatgcgaagtcccaagtctgggctttcacatatacacagcagattctgcaggaagaactatgcctgagcgtcataaccttgtttcctggagctcctgtggtgcttgtcctgtgtaaaaatggagacgaccggcagcaatggaccaaaactgggagccatattgagcatatcgcatctcacctgtgcctggacactgacatgttcggagatgggactgagaatggcaaagaaattgtggtgaacccatgcgagtcctccctgatgagccagcactgggatatggtctcttcttag

SEQ ID NO: 88762 - DNA, 2169 bp, Artificial Sequence
  derived and/or modified sequence
ctgaccgccggggggtgcccccgggacgtagcgccgcggagaggaagcggcaaaggggaccatgcggcgcctgactcgtcggctggttctgccagtcttcggggtgctctggatcacggtgctgctgttcttctgggtaaccaagaggaagttggaggtgccgacgggacctgaagtgcagacccctaaggtttggtccttgtttttcaaggtggctgggatgagcccttgggcgcctcaggtgcctgtatcacccactcctccctaccaaagagggcatcttcctacaggaggacaccttgctgtatgtcatttcccatgtctcttgcaagaagctcagttccatttgcagactcaggtctttcttcaagtcagatgcacactgctggtgtattgcacggaccttccacccactagcatcatcatcaccttccacaacgaggcccgctccacgctgctcaggaccatccgcagtgtattaaaccgcacccctacgcatctgatccgggaaatcatattagtggatgacttcagcaatgaccctgatgactgtaaacagctcatcaagttgcccaaggtgaaatgcttgcgcaataatgaacggcaaggtctggtccggtcccggattcggggcgctgacatcgcccagggcaccactctgactttcctcgacagccactgtgaggtgaacagggactggctccagcctctgttgcacagggtcaaagaggactacacgcgggtggtgtgccctgtgatcgatatcattaacctggacaccttcacctacatcgagtctgcctcggagctcagaggggggtttgactggagcctccacttccagtgggagcagctctccccagagcagaaggctcggcgcctggaccccacggagcccatcaggactcctatcatagctggagggctcttcgtgatcgacaaagcttggtttgattacctggggaaatatgatatggacatggacatctggggtggggagaactttgaaatctccttccgagtgtggatgtgcgggggcagcctagagatcgtcccctgcagccgagtggggcacgtcttccggaagaagcacccctacgttttccctgatggaaatgccaacacgtatataaagaacaccaagcggacagctgaagtgtggatggatgaatacaagcaatactattacgctgcccggccattcgccctggagaggcccttcgggaatgttgagagcagattggacctgaggaagaatctgcgctgccagagcttcaagtggtacctggagaatatctaccctgaactcagcatccccaaggagtcctccatccagaagggcaatatccgacagagacagaagtgcctggaatctcaaaggcagaacaaccaagaaaccccaaacctaaagttgagcccctgtgccaaggtcaaaggcgaagatgcaaagtcccaggtatgggccttcacatacacccagcagatcctccaggaggagctgtgcctgtcagtcatcaccttgttccctggcgccccagtggttcttgtcctttgcaagaatggagatgaccgacagcaatggaccaaaactggttcccacatcgagcacatagcatcccacctctgcctcgatacagatatgttcggtgatggcaccgagaacggcaaggaaatcgtcgtcaacccatgtgagtcctcactcatgagccagcactgggacatggtgagctcttgaggacccctgccagaagcagcaagggccatggggtggtgcttccctggaccagaacagactggaaactgggcagcaagcagcctgcaaccacctcagacatcctggactgggaggtggaggcagagccccccaggacaggagcaactgtctcagggaggacagaggaaaacatcacaagccaatggggctcaaagacaaatcccacatgttctcaaggccgttaagttccagtcctggccagtcattccctgattggtatctggagacagaaacctaatgggaagtgtttattgttccttttcctacaaaggaagcagtctctggaggccagaaagaaaagccttctttttcactaggccaggactacattgagagatgaagaatggaggttgtttccaaaagaaataaagagaaacttagaagttgtctctgga

SEQ ID NO: 88763 - protein, 279 aa, Artificial Sequence
  derived and/or modified sequence
MERPSLRALLLGAAGLLLLLLPLSSSSSSDTCGPCEPASCPPLPPLGCLLGETRDACGCCPMCARGEGEPCGGGGAGRGYCAPGMECVKSRKRRKGKAGAAAGGPGVSGVCVCKSRYPVCGSDGTTYPSGCQLRAASQRAESRGEKAITQVSKGTCEQGPSIVTPPKDIWNVTGAQVYLSCEVIGIPTPVLIWNKVKRGHYGVQRTELLPGDRDNLAIQTRGGPEKHEVTGWVLVSPLSKEDAGEYECHASNSQGQASASAKITVVDALHEIPVKKGTQ

SEQ ID NO: 88764 - DNA, 840 bp, Artificial Sequence
  derived and/or modified sequence
atggaacgaccatctctgagagccttgctgctgggcgccgcaggacttctgctgctcctgctccctctgtcctccagcagtagttctgatacatgtgggccttgcgagcccgcatcctgccctccgctccccccgctgggctgcttgctgggggagaccagggacgcatgcggctgttgccccatgtgcgccaggggcgaaggcgagccatgcggcggtgggggggcaggcagggggtactgtgctcctgggatggagtgtgtcaaatctaggaaaagacgaaagggcaaagccggcgcagctgctggaggccccggtgtttctggagtttgtgtttgcaaatcccgatatcccgtgtgcggatcagacggaaccacttacccttccgggtgtcagctgcgggctgctagccagcgggccgaatctcgaggagagaaagctataactcaggtgagcaaaggcacatgtgaacaagggcccagcatagtgacgcccccaaaggatatttggaacgtgactggcgcccaggtatacctgagctgcgaggtaataggcattcctacacccgttctaatttggaacaaggtgaagcgggggcactatggcgtgcagcgcaccgagttactgccaggagacagagacaatctcgctatacagaccaggggtggcccagagaagcatgaggtgacggggtgggtgctggtgagccccctgagcaaagaagatgctggagaatatgagtgccacgcttcaaacagccagggtcaggcgtcagcaagcgccaaaattacagtggtggacgcgcttcatgagatccccgtgaaaaaagggacccagtag

SEQ ID NO: 88765 - DNA, 1251 bp, Artificial Sequence
  derived and/or modified sequence
actcgcgcccttgccgctgccaccgcaccccgccatggagcggccgtcgctgcgcgccctgctcctcggcgccgctgggctgctgctcctgctcctgcccctctcctcttcctcctcttcggacacctgcggcccctgcgagccggcctcctgcccgcccctgcccccgctgggctgcctgctgggcgagacccgcgacgcgtgcggctgctgccctatgtgcgcccgcggcgagggcgagccgtgcgggggtggcggcgccggcagggggtactgcgcgccgggcatggagtgcgtgaagagccgcaagaggcggaagggtaaagccggggcagcagccggcggtccgggtgtaagcggcgtgtgcgtgtgcaagagccgctacccggtgtgcggcagcgacggcaccacctacccgagcggctgccagctgcgcgccgccagccagagggccgagagccgcggggagaaggccatcacccaggtcagcaagggcacctgcgagcaaggtccttccatagtgacgccccccaaggacatctggaatgtcactggtgcccaggtgtacttgagctgtgaggtcatcggaatcccgacacctgtcctcatctggaacaaggtaaaaaggggtcactatggagttcaaaggacagaactcctgcctggtgaccgggacaacctggccattcagacccggggtggcccagaaaagcatgaagtaactggctgggtgctggtatctcctctaagtaaggaagatgctggagaatatgagtgccatgcatccaattcccaaggacaggcttcagcatcagcaaaaattacagtggttgatgccttacatgaaataccagtgaaaaaaggtacacaataaatctcacagccatttaaaaatgactagtacatttgctttaaaaagaacagaactaagtatgaaagtatcagacgtagctattgatgaaattctgtagttagcaacccataagggcattaagtatgccattaaaatgtacagcatgagactccaaaagattatctggatgggtgactgaacatcgttattatgacttagatgcttttaccttatctaacatgtaagagtcaaaatcaaacttgcctggaatggcttctatttcccatagctttctacctatctacttggcattttccctttgtgttgtgactattaaattcctatttaaaagaaaatgattgtgggcaattctcgcccttcacttttgcttttaaaag

SEQ ID NO: 88766 - DNA, 840 bp, Artificial Sequence
  derived and/or modified sequence
atggagcggcccagcctgcgggccctgctgctgggcgccgccggcctgctgctgctgctgctgcccctgagcagcagcagcagcagtgacacctgtggcccctgtgagcccgccagctgcccccccctgccccccctgggctgcctgctgggggagaccagagatgcctgtggctgctgccccatgtgtgcccggggggagggggagccctgtggcggcggcggggccggccggggctactgtgcccctggcatggagtgtgtgaagagcaggaagaggaggaagggcaaggccggggctgctgctgggggccctggggtgtctggagtgtgtgtgtgcaagagccgctaccctgtgtgtggcagtgatggcaccacctaccccagcggctgccagctgcgggccgccagccagagagctgagagcagaggagagaaggccatcacccaggtgtccaagggcacctgtgagcagggccccagcatcgtgaccccacccaaggacatctggaatgtgactggagcccaggtgtacctgagctgtgaggtgattggcatccccacccctgtgctgatctggaacaaggtgaagaggggccactatggagtgcagaggacagagctgctgcccggggaccgggacaacctggccatccagacccggggcggccctgagaagcatgaggtgacaggctgggtgctggtgagccccctgagcaaagaagatgctggggagtatgaatgtcatgccagcaacagccagggccaggccagcgccagcgccaagatcaccgtggtggatgccctgcacgagatccctgtgaagaagggcacccagtag

SEQ ID NO: 88767 - DNA, 840 bp, Artificial Sequence
  derived and/or modified sequence
atggagcggcccagcctgcgggccctgctgctgggcgccgccggcttgctcctattgcttctgcccttgagttcctcctctagttcggacacgtgcggtccatgcgagccagcctcatgcccaccactaccacccctgggatgcctgcttggagagaccagggatgcctgcggatgttgtccaatgtgtgctcgtggagagggagaaccgtgcggcggcggaggtgcgggcagagggtactgtgctcccggcatggagtgcgtaaaaagtcgaaaacgccgaaagggaaaagccggcgccgcagcaggcggacccggtgtttcgggcgtttgcgtatgtaagtcaaggtatcctgtctgtggttccgacgggaccacctaccccagcgggtgccagcttcgggcagctagccagcgcgctgagtcaagaggcgagaaggccatcactcaggtgagcaaagggacatgcgagcagggtccgtctatagtaacacctcccaaggacatttggaatgtcaccggcgcgcaggtatacctctcttgtgaagttatcggtattcctactccggtccttatctggaacaaagtcaagcggggacattacggagtccagagaactgagctgctgcctggtgatagggataatctagctatccagacccggggcggcccagaaaaacatgaagtcaccggatgggttcttgtcagcccactatcgaaagaggacgccggggaatatgagtgccatgcctccaacagccagggccaggccagcgcatcggctaagatcacggttgtggacgccctacacgaaatcccagtgaaaaagggtactcagtag

SEQ ID NO: 88768 - DNA, 840 bp, Artificial Sequence
  derived and/or modified sequence
atggaacggccatctctccgcgctctgcttttgggtgccgctggcttgctccttttgctgctgcctctctctagctccagcagctcggatacctgcggcccatgcgaacccgcttcttgccctcccctcccacccctgggctgcctcctgggtgaaactagagacgcttgtggctgttgcccaatgtgcgccaggggcgaaggagagccatgcgggggagggggtgccggtcgaggctattgcgctccagggatggagtgcgttaagtcaaggaagcgtaggaagggcaaggccggagcggctgctggtggacctggggtctcgggagtgtgcgtgtgtaagtctaggtacccggtgtgcggatccgacggcactacctatccctcaggctgccaactgcgagcagcttcacagcgagccgaatctcgtggcgagaaagccatcacacaggtgtcaaaaggtacctgcgagcagggtccctctattgtaaccccgcctaaggatatctggaacgtgacaggagcccaggtgtacctgtcgtgtgaggttatcggaattcctactcctgtgctaatatggaacaaggtgaaaagggggcactatggggtccagaggactgaactgcttccaggagacagagacaaccttgccatccagacaaggggaggcccagaaaagcacgaagtgacaggctgggttcttgtgagccctctctccaaagaagacgccggagagtacgagtgtcatgcatctaactcccaagggcaagcaagtgctagtgccaagatcacggtcgttgatgccctgcacgagatacccgtcaaaaagggcacccaatag

SEQ ID NO: 88769 - DNA, 840 bp, Artificial Sequence
  derived and/or modified sequence
atggagagacccagcctgagagccctgctgctgggcgccgccggcctgctgctgctgctgctgcccctgagcagcagcagcagcagcgacacctgcggcccctgcgagcccgccagctgcccccccctgccccccctgggctgcctgctgggcgagaccagagacgcctgcggctgctgccccatgtgcgccagaggcgagggcgagccctgcggcggcggcggcgccggcagaggctactgcgcccccggcatggagtgcgtgaagagcagaaagagaagaaagggcaaggccggcgccgccgccggcggccccggcgtgagcggcgtgtgcgtgtgcaagagcagataccccgtgtgcggcagcgacggcaccacctaccccagcggctgccagctgagagccgccagccagagagccgagagcagaggcgagaaggccatcacccaggtgagcaagggcacctgcgagcagggccccagcatcgtgaccccccccaaggacatctggaacgtgaccggcgcccaggtgtacctgagctgcgaggtgatcggcatccccacccccgtgctgatctggaacaaggtgaagagaggccactacggcgtgcagagaaccgagctgctgcccggcgacagagacaacctggccatccagaccagaggcggccccgagaagcacgaggtgaccggctgggtgctggtgagccccctgagcaaggaggacgccggcgagtacgagtgccacgccagcaacagccagggccaggccagcgccagcgccaagatcaccgtggtggacgccctgcacgagatccccgtgaagaagggcacccagtag

SEQ ID NO: 88770 - protein, 730 aa, Artificial Sequence
  derived and/or modified sequence
MNAVGSPEGQELQKLGSGAWDNPAYSGPPSPHGTLRVCTISSTGPLQPQPKKPEDEPQETAYRTQVSSCCLHICQGIRGLWGTTLTENTAENRELYIKTTLRELLVYIVFLVDICLLTYGMTSSSAYYYTKVMSELFLHTPSDTGVSFQAISSMADFWDFAQGPLLDSLYWTKWYNNQSLGHGSHSFIYYENMLLGVPRLRQLKVRNDSCVVHEDFREDILSCYDVYSPDKEEQLPFGPFNGTALVVEFPATGGAIPSWQIRTVKLIRYVSNWDFFIVGCEVIFCVFIFYYVVEEILELHIHRLRYLSSIWNILDLVVILLSIVAVGFHIFRTLEVNRLMGKLLQQPNTYADFEFLAFWQTQYNNMNAVNLFFAWIKIFKYISFNKTMTQLSSTLARCAKDILGFAVMFFIVFFAYAQLGYLLFGTQVENFSTFIKCIFTQFRIILGDFDYNAIDNANRILGPAYFVTYVFFVFFVLLNMFLAIINDTYSEVKEELAGQKDELQLSDLLKQGYNKTLLRLRLRKERVSDVQKVLQGGEQEIQFEDFTNTLRELGHAEHEITELTATFTKFDRDGNRILDEKEQEKMRQDLEEERVALNTEIEKLGRSIVSSPQGKSGPEAARAGGWVSGEEFYMLTRRVLQLETVLEGVVSQIDAVGSKLKMLERKGWLAPSPGVKEQAIWKHPQPAPAVTPDPWGVQGGQESEVPYKREEEALEERRLSRGEIPTLQRS

SEQ ID NO: 88771 - DNA, 2193 bp, Artificial Sequence
  derived and/or modified sequence
atgaatgctgtgggatcccctgaaggacaagaattacaaaagctcgggagcggagcttgggataatccggcctattctgggccaccatctccacacgggactcttagagtgtgcaccatcagttcaaccggtcctttgcagccccagccaaaaaagcccgaagacgaaccacaggagaccgcatataggacgcaggttagttcctgctgcctgcacatttgccagggcattaggggcctctgggggactaccttgactgaaaacacggcggagaatcgagagctctacatcaaaaccacgcttcgagagcttttggtttacatcgtgtttctcgttgatatctgtttgttgacctatggcatgacttccagtagcgcctactactatactaaggttatgagcgagttgttcttgcacacacccagtgacaccggagtctcattccaggccatcagtagtatggcggacttttgggactttgcccagggtccgctgttggactcactgtattggacaaagtggtacaacaatcaatccctgggccacgggagccatagtttcatttattatgaaaacatgttacttggagtgccccgcctgcgccagctcaaagtgcgcaatgatagttgcgtagtacatgaggattttcgagaagatatcctgagctgttatgatgtgtactcacctgataaggaggagcagctgcctttcggcccattcaacgggactgcgttagtcgtcgagtttcccgcgaccggcggcgctattcccagctggcagatccggactgtgaagctcatccggtatgtgtctaattgggacttttttatcgtgggatgcgaagttatcttctgcgtgttcatcttttattacgtcgtggaggagattctggaactgcacattcacagattaaggtatttatcctcgatctggaacattctggatctggtagtgatcctactatcaatcgttgctgtgggtttccacattttcagaacgctggaggtaaacaggctgatggggaagctgctccagcagcccaacacatacgccgactttgaattcctggctttctggcagacccagtacaacaacatgaacgccgtcaacctctttttcgcatggattaaaattttcaagtacattagttttaacaagacaatgacccagctttcctcaacattggccagatgcgcaaaagatatccttggctttgcggtgatgttcttcatcgtattctttgcatacgctcagcttgggtatctactgtttggaacccaagtagaaaatttttccacattcattaaatgtatctttacccagttcaggatcattctgggggactttgattacaacgcaatcgataatgcgaatcgtattctgggcccggcctactttgtgacatatgtgtttttcgtgttttttgtgctgttgaacatgttcctggccataattaacgatacatactcagaagtcaaggaagaactggccgggcagaaagacgagctacagctctccgacctcctcaagcagggctacaacaaaaccctcctgcgccttcggctaaggaaagagagggtctctgatgtacaaaaggtgctacagggcggtgaacaggaaattcagttcgaagatttcaccaacactctgcgggagttaggccacgcagagcacgagatcacagaactgacagcaaccttcacgaaattcgaccgcgacggaaacagaatcctggacgaaaaagaacaggaaaagatgaggcaagatctagaggaagaacgcgtagctttgaatacggagatagaaaagctcggaagaagcattgtttcgtctccccaagggaaatcaggccctgaggccgcgagggccggtgggtgggtttccggcgaggagttttacatgctgacacgacgggtgctgcagttagagaccgtactcgagggagtcgtgagtcaaattgatgccgttggtagtaaactaaagatgttagagcgaaaaggttggctagcacctagcccaggcgtgaaggagcaggctatatggaagcacccccaacccgcccctgccgtcactcctgacccttggggcgttcagggcggtcaagaatccgaggtgccttataaaagggaggaggaggctctggaagagcggcggctttccagaggtgagattcctacactgcaaagatcatag

SEQ ID NO: 88772 - DNA, 2193 bp, Artificial Sequence
  derived and/or modified sequence
atgaatgctgtgggcagccctgagggccaggagctgcagaagctgggcagcggggcctgggacaacccagcctacagcggcccccccagcccccacggcaccctgcgggtgtgcaccatcagcagcacaggccccctgcagccccagcccaagaagccagaagatgagccccaggagacagcctaccgcacccaggtgagcagctgctgcctgcacatctgccagggcatccggggcctgtggggcaccaccctgacagaaaatacagcagaaaatcgggagctgtacatcaagaccaccctgcgggagctgctggtgtacatcgtgttcctggtggacatctgcctgctgacctacggcatgaccagcagcagcgcctactactacaccaaggtgatgtctgagctgttcctgcacacccccagcgacaccggggtgtccttccaggccatcagctccatggctgacttctgggactttgcccagggccccctgctggacagcctgtactggaccaagtggtacaacaaccagagcctgggccacggcagccacagcttcatctactatgagaacatgctgctgggcgtgccccggctgcggcagctgaaggtgagaaatgacagctgtgtggtgcatgaggacttccgggaggacatcctgagctgctatgatgtgtacagcccagacaaggaggagcagctgcccttcggccccttcaatggaacagccctggtggtggagttccctgccaccggcggggccatccccagctggcagatcagaacagtgaagctgatccgctacgtgagcaactgggacttcttcatcgtgggctgtgaggtgatcttctgtgtgttcatcttctactacgtggtggaggagatcctggagctgcacatccaccggctgcgctacctgagcagcatctggaacatcctggacctggtggtgatcctgctgagcatcgtggccgtgggcttccacatcttccgcaccctggaggtgaaccggctgatgggcaagctgctgcagcagcccaacacctatgctgactttgagttcctggccttctggcagacccagtacaacaacatgaatgctgtgaacctcttctttgcctggatcaagatcttcaagtacatctccttcaacaagaccatgacccagctgagcagcaccctggcccgctgtgccaaggacatcctgggctttgctgtgatgttcttcatcgtgttctttgcctatgcccagctgggctacctgctgtttggcacccaggtggagaacttcagcaccttcatcaagtgcatcttcacccagttccgcatcatcctgggggactttgactacaatgccatcgacaatgccaaccgcatcctgggccctgcctactttgtgacctacgtgttctttgtgttctttgtgctgctgaacatgttcctggccatcatcaatgacacctacagcgaggtgaaggaggagctggccggccagaaggatgagctgcagctgagtgacctgctgaagcagggctacaacaagaccctgctgcggctgcggctgaggaaggagcgggtgtctgatgtgcagaaggtgctgcagggcggggagcaggagatccagtttgaggacttcaccaacaccctgcgggagctgggccacgccgagcacgagatcacagagctgacagccaccttcaccaagtttgacagagatggcaaccgcatcctggatgagaaggagcaggagaagatgaggcaggacctggaggaggagcgggtggccctgaacacagaaattgagaagctgggccgcagcatcgtgagcagcccccagggcaagagcggccctgaggccgcccgggccggcggctgggtgtctggagaggagttctacatgctgaccaggagagtgctgcagctggagaccgtgctggagggcgtggtgtcccagattgatgctgtgggcagcaagctgaagatgctggagaggaagggctggctggcccccagccctggggtgaaggagcaggccatctggaagcacccccagcctgccccagctgtgaccccagacccctggggcgtgcagggcggccaggagagcgaggtgccctacaagcgggaggaggaggccctggaggagcggcggctgagcagaggagagatccccaccctgcagaggagctag

SEQ ID NO: 88773 - DNA, 2193 bp, Artificial Sequence
  derived and/or modified sequence
atgaacgccgtgggcagccccgagggccaggagctgcagaagctgggcagtggcgcttgggataatcccgcctatagcggccctccttccccgcacggaacactgagggtgtgcactatctccagcacaggcccacttcagccccagcccaagaagccagaggacgaaccccaggagaccgcataccgaacccaggtgtcttcctgttgcctccacatatgccaagggatccggggcctctggggtacaacactaacagagaatacagccgaaaatagagagctatatatcaagaccacacttagagagttgctcgtgtatatcgtattcctggttgatatttgcctgctcacttatgggatgaccagcagctccgcctattactatacgaaagtgatgagtgaactattcctccacacaccctctgacaccggagtttcctttcaagcaatttcttccatggccgacttctgggacttcgcacaggggccccttttggatagcttgtattggaccaaatggtacaacaaccagtctctgggtcatgggagccattcatttatctactacgagaatatgctgctcggtgtgccgaggttacgtcagcttaaagtcaggaacgacagctgtgtggtgcatgaggactttagagaagacatcttgtcatgctatgatgtgtatagcccagacaaggaagagcagctcccctttgggcctttcaatgggactgcactcgtcgtcgagttcccagccactggaggggcaatcccttcctggcagattcggacggtaaagctgatcagatatgttagtaactgggattttttcatagttgggtgcgaggtcatcttttgtgtgtttattttctactacgtcgtcgaggagatcttggaacttcacatacataggctgagatacctgagtagcatctggaacattttagaccttgtggttatcctcctgtcaatcgtggcagtgggatttcatatcttcaggacattagaggtgaatcgcctcatgggtaaattacttcagcaacctaacacatacgccgattttgaatttctggccttctggcaaactcaatataacaatatgaacgcggtcaacttattcttcgcttggattaagatctttaaatacatcagcttcaacaagaccatgacacaattgtccagcactttggccaggtgcgctaaagacattttgggtttcgctgtcatgttcttcatcgtgttttttgcatatgcccagttgggatatctccttttcgggacacaggtggagaatttctccacttttatcaaatgcatatttactcaattcaggattatactgggagattttgactataatgctatcgataacgcgaaccgcattctggggccagcatactttgtgacgtatgtgttttttgtgttttttgtgctgcttaatatgttcctggccattatcaatgacacctacagtgaggtgaaagaagagctcgcgggccagaaagatgaactacagctatctgacctgttaaagcaaggttataataagactttactgagattgcgcctacgaaaggaaagggtgtccgatgtgcaaaaggtcctacagggtggtgaacaggagattcagttcgaggactttaccaatacactccgcgagttggggcatgccgagcacgagatcactgagttaaccgctactttcactaagttcgatcgggatggtaatcggattcttgacgaaaaggagcaggagaagatgcgtcaggacttggaggaggagcgtgtggccttaaacacagaaatcgagaaactgggccggagcattgtgtcttcaccacagggaaagtcggggcctgaggccgcccgggcaggaggctgggtcagcggggaggaattctatatgctcacgaggcgcgtgcttcagctcgagaccgtactagagggcgtcgtgagccagattgatgccgtgggcagtaagttgaagatgttggagcgtaagggctggttagcaccttcccccggcgtcaaggagcaagcgatttggaaacaccctcaaccagcacctgccgtaacccccgacccatggggggttcagggcggtcaggaatcagaggtgccatacaaacgcgaggaggaagccctggaagagaggcggttgagccggggagaaatcccaaccctgcaaagatcttag

SEQ ID NO: 88774 - DNA, 2826 bp, Artificial Sequence
  derived and/or modified sequence
cagcatcgccttttcctcccgtttctccttccactcccagctccacatcctcctcctattctcccctctcccctcttcaaacccccaccttccagttccctcacctcccctttcggctggtcccctggggcttgcagcaagagggagagagagctcctgacaggattgatggtccttccccaccctgtcctctcatccgctccctccccagcaggcacagacatccccctacaaaaggcaggagcccaggctgtgtggaaacagctgctctcagacgcctttccatttgctctctgctggctaggctgggctgtgcctctgctccctcttcctctagctgagagtgggcacctggggtaccgggcccccccacctcattccccatgaatgctgtgggaagtcctgaggggcaggagctgcaaaagctggggagtggagcctgggacaaccccgcctacagtggtcccccttccccacacgggacgctgagagtctgcaccatctccagcacggggcctctccagccccaacccaagaagcctgaagatgaaccccaggagacggcatacaggacccaggtgtccagctgctgcctccatatctgtcaaggcatcagaggactttggggaacaaccctgactgagaacacagctgagaaccgggaactttatatcaagaccaccctgagggagctgttggtatatattgtgttcctggtggacatctgtctactgacctatggaatgacaagctccagtgcttattactacaccaaagtgatgtctgagctcttcttacatactccatcagacactggagtctcctttcaggccatcagcagcatggcggacttctgggattttgcccagggcccactactggacagtttgtattggaccaaatggtacaacaaccagagcctgggccatggctcccactccttcatctactatgagaacatgctgctgggggttccgaggctgcggcagctaaaggtccgcaatgactcctgtgtggtgcatgaagacttccgggaggacattctgagctgctatgatgtctactctccagacaaagaagaacaactcccctttgggcccttcaatggcacagcgctggtggtggagtttccagctacaggaggtgccatcccatcctggcaaatccgcacagtcaagctgatccgctatgtcagcaactgggacttctttatcgttggctgtgaggtcatcttctgcgtcttcatcttctactatgtggtggaagagatcctggagctccacattcaccggcttcgctacctcagcagcatctggaacatactggacctggtggtcatcttgctctccattgtggctgtgggcttccacatattccgaaccctcgaggtgaatcggctcatggggaagctcctgcagcagccaaacacgtatgcagactttgagttcctcgccttctggcagacacagtacaacaacatgaatgctgtcaacctcttcttcgcctggatcaagatattcaagtacatcagcttcaacaaaaccatgacccagctctcctccacgctggcccgctgtgccaaggacatcctgggcttcgccgtcatgttcttcattgttttcttcgcctatgcccaactcggctacctgcttttcgggacccaagtggaaaactttagcactttcatcaagtgcattttcactcagttccggataatcctcggggactttgactacaatgctatcgacaatgccaaccgcatcctgggccctgcctactttgtcacctatgtcttcttcgtcttcttcgtgctcctgaacatgttcctggccatcatcaatgacacatattcagaggtcaaggaggagctggctggacagaaggatgagctgcaactttctgacctcctgaaacagggctacaacaagaccctactaagactgcgtctgaggaaggagagggtttcggatgtgcagaaggtcctgcagggtggggagcaggagatccagtttgaggatttcaccaacaccttaagggaactgggacacgcagagcatgaaatcactgagctcacggccaccttcaccaagtttgacagagatgggaatcgtattctggatgagaaggaacaggaaaaaatgcgacaggacctggaggaagagagggtggccctcaacactgagattgagaaactaggccgatctattgtgagcagcccacaaggcaaatcgggtccagaggctgccagagcaggaggctgggtttcaggagaagaattctacatgctcacaaggagagttctgcagctggagactgtcctggaaggagtagtgtcccagattgatgctgtaggctcaaagctgaaaatgctggagaggaaggggtggctggctccctccccaggcgtgaaggaacaagctatttggaagcacccgcagccagccccagctgtgaccccagacccctggggagtccagggtgggcaggagagtgaggttccctataaaagagaagaggaagccttagaggagaggagactctcccgtggtgagattccaacgttgcagaggagttaagtgtgaggcactcccggagcaaagtctatgaaggatcttctgcaagaggctgcctcctggtccactgaacctggaaactgagtgggctttaaccaggagataaaaatggagcctgaagggaatcaggcaaggaaatgaactcaggattcagagatctttgaattaatatgtggtgggttctgacattattcttccataagaccatgtgggtttccatggtggctatcaataaaactccttaggaaaactt

SEQ ID NO: 88775 - DNA, 2193 bp, Artificial Sequence
  derived and/or modified sequence
atgaacgcagtagggagtcctgagggacaggaactgcagaagctcggaagcggggcatgggacaatcctgcctattcaggccctccatctccccatggcacactgagagtttgtacaatttccagcaccggacccctccaaccacagccaaagaagcccgaggacgaaccccaggagacggcctacagaacccaggtgtcttcttgctgtctgcatatatgccagggcattcgaggcctgtggggcacaacgctgaccgagaacaccgctgaaaatagggaactctacataaagacaactctgagagagctcttagtgtatattgtcttcctggtcgacatttgtctgctgacatatggtatgaccagttcatccgcgtattattacactaaggtcatgtcagagttgttcttacacacacccagcgataccggtgtaagttttcaggcaatctcttctatggcagacttttgggattttgcacagggtccccttctggattccctctactggaccaagtggtacaacaaccagtctctcgggcatggatcccactctttcatatattatgagaatatgttgctgggtgtacccagactgaggcaactgaaggtacgcaacgattcctgcgtcgtccacgaagattttcgtgaggatattctgtcctgttatgatgtctattctcctgacaaggaggagcagctgccgttcgggccatttaacgggaccgccttggtcgtggagttccccgctaccgggggagcaatacctagctggcagattcgaacggtcaagcttataagatacgtttctaactgggatttcttcattgtgggctgtgaggtgattttttgcgtctttattttctactacgtagtggaagaaatcctcgagctgcatatccacaggctgaggtatctcagtagtatctggaacatcttagatcttgttgtgatcttgctcagcatcgtggccgtcggctttcacatattcaggactcttgaggtgaatagactcatgggtaaactccttcagcagcccaacacatacgccgacttcgagttcctggcattctggcagactcagtacaataacatgaacgctgtaaatctcttctttgcctggataaagatatttaaatacatcagcttcaataaaaccatgactcagctgagctccaccctagccaggtgcgcaaaagatattctcggattcgccgtaatgttctttattgtcttcttcgcgtacgcccaactgggctacctccttttcgggacacaagtggaaaactttagcactttcattaagtgcattttcacccaatttcggataatactgggggacttcgattataatgctatcgacaatgcaaaccggatcctggggcctgcctacttcgttacatacgtcttttttgtgttcttcgttctgttaaacatgttcctggccattattaatgatacctattccgaagtgaaagaggaattggcgggacagaaagatgagctacagctttccgatctcctcaagcagggatataataagactttgctgaggctgcgtttgagaaaggaacgcgtttctgacgtccagaaggtgttacaggggggtgagcaggaaattcagttcgaggacttcaccaacactttacgagaactaggacatgctgagcatgagataactgagttgaccgcaacgttcacaaagtttgatcgggacgggaaccggattcttgacgaaaaggagcaggagaaaatgcggcaggatctcgaagaggaaagggtggccctgaacacagagattgagaagctaggtaggtccattgtgtcctcacctcagggaaagtccggacccgaagccgcaagggcgggtgggtgggtatcgggggaggagttttatatgctcacccgccgagtcttgcaactcgaaactgtccttgaaggcgtggtgtctcagattgatgctgtcggtagcaaactcaaaatgttggagcgcaagggctggctagctccaagtcccggtgtcaaagaacaggctatctggaagcacccccagccagcgcctgcggtgacccctgacccctggggggtacaggggggacaggagagtgaggtcccatataaacgtgaggaagaggctctcgaagagcgccgactgtcgcgcggagaaatcccaactctccagaggagttag

SEQ ID NO: 88776 - DNA, 2193 bp, Artificial Sequence
  derived and/or modified sequence
atgaacgccgtgggcagccccgagggccaggagctgcagaagctgggcagcggcgcctgggacaaccccgcctacagcggcccccccagcccccacggcaccctgagagtgtgcaccatcagcagcaccggccccctgcagccccagcccaagaagcccgaggacgagccccaggagaccgcctacagaacccaggtgagcagctgctgcctgcacatctgccagggcatcagaggcctgtggggcaccaccctgaccgagaacaccgccgagaacagagagctgtacatcaagaccaccctgagagagctgctggtgtacatcgtgttcctggtggacatctgcctgctgacctacggcatgaccagcagcagcgcctactactacaccaaggtgatgagcgagctgttcctgcacacccccagcgacaccggcgtgagcttccaggccatcagcagcatggccgacttctgggacttcgcccagggccccctgctggacagcctgtactggaccaagtggtacaacaaccagagcctgggccacggcagccacagcttcatctactacgagaacatgctgctgggcgtgcccagactgagacagctgaaggtgagaaacgacagctgcgtggtgcacgaggacttcagagaggacatcctgagctgctacgacgtgtacagccccgacaaggaggagcagctgcccttcggccccttcaacggcaccgccctggtggtggagttccccgccaccggcggcgccatccccagctggcagatcagaaccgtgaagctgatcagatacgtgagcaactgggacttcttcatcgtgggctgcgaggtgatcttctgcgtgttcatcttctactacgtggtggaggagatcctggagctgcacatccacagactgagatacctgagcagcatctggaacatcctggacctggtggtgatcctgctgagcatcgtggccgtgggcttccacatcttcagaaccctggaggtgaacagactgatgggcaagctgctgcagcagcccaacacctacgccgacttcgagttcctggccttctggcagacccagtacaacaacatgaacgccgtgaacctgttcttcgcctggatcaagatcttcaagtacatcagcttcaacaagaccatgacccagctgagcagcaccctggccagatgcgccaaggacatcctgggcttcgccgtgatgttcttcatcgtgttcttcgcctacgcccagctgggctacctgctgttcggcacccaggtggagaacttcagcaccttcatcaagtgcatcttcacccagttcagaatcatcctgggcgacttcgactacaacgccatcgacaacgccaacagaatcctgggccccgcctacttcgtgacctacgtgttcttcgtgttcttcgtgctgctgaacatgttcctggccatcatcaacgacacctacagcgaggtgaaggaggagctggccggccagaaggacgagctgcagctgagcgacctgctgaagcagggctacaacaagaccctgctgagactgagactgagaaaggagagagtgagcgacgtgcagaaggtgctgcagggcggcgagcaggagatccagttcgaggacttcaccaacaccctgagagagctgggccacgccgagcacgagatcaccgagctgaccgccaccttcaccaagttcgacagagacggcaacagaatcctggacgagaaggagcaggagaagatgagacaggacctggaggaggagagagtggccctgaacaccgagatcgagaagctgggcagaagcatcgtgagcagcccccagggcaagagcggccccgaggccgccagagccggcggctgggtgagcggcgaggagttctacatgctgaccagaagagtgctgcagctggagaccgtgctggagggcgtggtgagccagatcgacgccgtgggcagcaagctgaagatgctggagagaaagggctggctggcccccagccccggcgtgaaggagcaggccatctggaagcacccccagcccgcccccgccgtgacccccgacccctggggcgtgcagggcggccaggagagcgaggtgccctacaagagagaggaggaggccctggaggagagaagactgagcagaggcgagatccccaccctgcagagaagctag

SEQ ID NO: 88777 - protein, 148 aa, Artificial Sequence
  derived and/or modified sequence
MARIPTAALGCISLLCLQLPGSLSRSLGGDPRPVKPREPPARSPSSSLQPRHPAPRPVVWKLHRALQAQRGAGLAPVMGQPLRDGGRQHSGPRRHSGPRRTQAQLLRVGCVLGTCQVQNLSHRLWQLMGPAGRQDSAPVDPSSPHSYG

SEQ ID NO: 88778 - DNA, 535 bp, Artificial Sequence
  derived and/or modified sequence
cgcccacgcccggcgccccgaccgcggaggactccccgagccccgcccgccatggcccggatcccgacggccgccctgggttgcatcagcctcctctgcctgcagctccctggctcgctgtcccgcagcctgggcggggacccgcgacccgtcaaacccagggagcccccagcccggagcccttccagcagcctgcagcccaggcaccccgcaccccgacctgtggtctggaagcttcaccgggccctccaggcacagaggggtgccggcctggcccctgttatgggtcagcctctccgggatggtggccgccaacactcgggcccccgaagacactcgggcccccgcaggacccaagcccagctcctgcgagtgggctgtgtgctgggcacctgccaggtgcagaatctcagccaccgcctgtggcaactcatgggaccggccggccggcaggactcagctcctgtggaccccagcagcccccacagctatggctgaggtggggccgggccacacccctgcccatcccagccag

SEQ ID NO: 88779 - DNA, 4276 bp, Artificial Sequence
  derived and/or modified sequence
attcagccctggaggtgccatcccgggccgcgactccgctccaggcaggacccccaacccgcccagcccgctccgccttgcgccccggacccgcggccgaccccagacccgctgcccgcttcgcgcccgaggcctgcgccccgacggacgcccgtgcccagcttgccacgcccacgcccggcgccccgaccgcggaggactccccgaggtgccggcggagggggtggctcgcggctcaggctgcccccgacgtgcccggctcaccgccccctcccctgcagccccgcccgccatggcccggatcccgacggccgccctgggttgcatcagcctcctctgcctgcagctccctggctcgctgtcccgcagcctgggcggggacccgcgacccgtcaaacccagggagcccccagcccggagcccttccagcagcctgcagcccaggcaccccgcaccccgacctgtggtctggaagcttcaccgggccctccaggcacagaggggtgccggcctggcccctgttatgggtcagcctctccgggatggtggccgccaacactcgggcccccgaagacactcgggcccccgcaggacccaagcccagctcctgcgagtgggctgtgtgctgggcacctgccaggtgcagaatctcagccaccgcctgtggcaactcatgggaccggccggccggcaggactcagctcctgtggaccccagcagcccccacagctatggctgaggtggggccgggccacacccctgcccatcccagccagggtgctgtgcccccgtccagagctgcagctgagccccatctgaagcccagtccctcggagctgcagacagcaggtcctgcagcaacaatacctgcacggctttgcacacgtaaacctaggctggtctacacgcagtgctggtacgtcaaggagcctaaacaccctgaaattgtgaccccctgggggacagctgccagacacagctggcggcagcaccagatgctaagcgcttcagagaggaggtgtctgcccagagatgtggagcagaagctgggccctgaacacacggggccatgtctggacgagcaggggagagaggctgaactggccagaagtggcccctccgctgctggtccagtcagactgaagcccggccttgtgcctgggctgttcctgctctcatgcacaaccagcccttccacgtgcctgcctgtgggacaggagggggagcgtgggatgctgtagcccccggggttgggcaagggaaggatggtggccctccagaggtcatgaagggacctctgtggctccagctgccaaccctggagcccagaccgaggtggccatggagactccacctggatcccctgtaggaggccagggaggggaactcagcagttcaggagccaccccaaaccattctgggacagggacacccctttctaccccagggcagggcagggctgggtggggcaagatcccccagcccgactagacccacctcacctgaagggggtgagacccttgttggcagccagacaagggtggggctccacaggcagcacaggcgccccaccaccacccagtttggggacccagtgggaccaggtgcgggggcagagggtgacttaccaagagccagggagggcagcccaggcccaagtgacagcaagaacaagaaccactgccggcgtgcacagacttggtgtgtgtccttccctggggggacgggggactcacatgtgcctgccactggagcctctcaaccgtccagcagaacacggggttcagaaagggctccttctgctatttagcgaacactgagcatttaatttacaaatgtttgctagggtcaccctctcggccatcccacgagggtcgccatgatcaccccaactctagaggccgcagcagagctcaggacattcccccacagagcttgcccctcagttcctacctccaagggggagggtcctggaagcgcccacccaggcgccgcccctgtgcttgctccccgagctcagggattgccgagtccacgtaactgacctgtactccacgaggccctgtgggaacggtccaggctggtcctgccctgtggaggcctccgtgcactgagagatgtactaggattgcagcaaaggtggtcagggtgatgggccgcacagcgaggcagtcaaggccagctccctgggagaagcactgggtcaggtgaggtctgaggacagcaggccttccctaggggaaggagctgggagtgccaaggccccaggtgcacaggaggcgtggctgctgagaggctgcagggtggaggggcctcggcctcagagtcatgtgccctgtgaccactgaagggtgtcagcagagcacacggcatgaggacagagggaggggcacggggagtgaaggagggggccctggggcaaggctcgggggtcaggagctcagcgtccgctactcagcccagccaaaaccctcccagacgtctcctctcctgcctgggcaaagtccagcttggcaccccgtctggggcctgcctgtggtcagggccaagtgttccctcctccaggaaagcctttaccctcctcatgccctgtagtcaggaggccgcctgctgtaaccctccgtgtcgcctcgggtgcgaaatcagacccacctgacaccatcacgcggaggcccagcagcacctgcacccacttccagctgctctggccaaaatctccgctcggccaggccccgtggctcacacctgtaatcctagcacattgggaggccaaggcaggcacatcacctgagttcaggagttcaagaccagcctggccaacatggtgaaatcccgtctctactaaaaacagaaaattatccgggcgtggtggcacatgactgtaatcccagctactcaggaggctgaggcaggaggatcacttgaacctgggaggcggaggttgcagtgagctgagattgcgccattgcactccagcctgggcaacaagagcaaaattctgcctcaaaaaaaaaaatagtaataatacaaaaattagctgggcgtggtggcacatgccagtaattccatctactcgggaggctgaggcaggagaatcgtctaagcccgggaggtggaggttgcagtgagcccagatggcgctgctgcactcaagcttggatgacagagcaagactccgtttcaaaaaaaaaaaacctcctctcttccttcacaccttcctctgaatcccacccggtcccacctcctgaacctatccagacaccttctcctgacccaggcaccacctgctttcggggcgatggccgtagcctcctcccaggcacctgtctgcatccctctggccagtgcatgctgagcacgtgacctacccgtgttgggacacgtgaggatacagccttgacccccaggggctgacattctagggggagatagaaggagacaaacgtagaaggtagaataagtgggtggtggagtggcagggagtgctgagtgccacaggaagtcagacaaggaaggagagtgtggggcaggtgccgtttaaatggggggcgctggggtctcctcacagttgcttctcagctcagctgtgccaggatcttgttgagtcaggtcagctgcccacagccctcttgcctgacccctgaagcccagaactctgatcttcacagccctaggtatggccccagcaccccactgccctctctcctgccccagccgactgctgttcccagacttccctggccacgctccaagacgccagctctgccgcgggcactttgttctcacggtgtcctccatgcctgcagggcccatgcatgggaagttgcgttggcggcctgggtgttggcggttccgtgcctgctccaactctccgtgaggcccctctcccagagcctgacacactctgtggccgaactctaggcaggtgcccctgagtcctttcctcgacgaggcctgaccccatccccatcctcgctgggcccgccgaccccggtgttagcaagaatcctctaaatcagtttatggagaattacccaccctcgatatctgatcccattcctcatctcccacccttgatctcatcaccctgccggcctcctgcaagatcctcattgagccactccagtgagaatccccctaccctcgaaggccgccctaacaacttcccatccgctgacccctccaacgccatcaatctccagctgtggttgttgaactcggaggtgagctcctctcaccactctcttgaataaagcttttctcaccattttaacaa

SEQ ID NO: 88780 - DNA, 699 bp, Artificial Sequence
  derived and/or modified sequence
atggtagccgcaaacacaagggccccagaagatacccgggctcctgccggacccaaaccgtcatcttgcgaatgggccgtctgctgggcacccgcacgctgtcggatcagcgcaaccgcttgtgggaattcgtgggaccgccctgcaggacggacgcaactgctgtggactccggctgcacctaccgccatggccgaagtggggccaggacacacacccgcacatcccagccaaggagctgtcccacccagtcgcgcagcagcagagccacacctgaagcctagcccctccgagctgcaaaccgctggcccagccgctacaatccccgctcggctctgtactaggaaacccaggctcgtctacacacaatgttggtatgtgaaggagcccaaacaccccgagatcgttaccccgtggggtaccgccgctcggcattcttggagacagcatcagatgctgtccgcaagcgaaagacggtgtctgcctcgggacgtggagcaaaagctgggcccagagcatactgggccttgtcttgacgaacaggggcgagaggctgagctggccaggtccggcccttcagccgctgggcctgtgcgattgaaacctggcctggtccccggactattcctgctgtcctgtacaacctcgcctagcacttgtctcccagtgggccaagaaggcgaacgaggcatgctgtag

SEQ ID NO: 88781 - DNA, 447 bp, Artificial Sequence
  derived and/or modified sequence
atggccagaattcccacggctgcccttggttgcattagtttgctgtgcctccagctacctgggtctctgtctagatccttaggaggagatccaaggcccgtgaagcctcgggagcctcccgctcgatccccttccagctcgctacagcctagacacccagcaccgcgtccagttgtatggaaactgcatcgtgccctgcaagcccagaggggtgctggcctcgcacccgtgatgggccagcccctacgcgatggtgggcgtcagcacagtggtccgaggcgccactccggaccacgcagaacccaggcccaactcttaagagtcggatgtgtgctcgggacatgccaggtgcagaatctgtcccatcggctttggcagctgatgggacctgccggacgtcaggactctgcccctgtggacccatccagcccacactcctatgggtag

SEQ ID NO: 88782 - DNA, 447 bp, Artificial Sequence
  derived and/or modified sequence
atggctaggattccaaccgccgcactcgggtgcattagtctgctatgtctccagttgcccggttccctatcaaggagcctgggtggtgaccctcgcccagtgaagcctcgcgaaccaccagccagatccccatctagttcactgcagcctcgccaccccgcaccacgtcccgtggtttggaagcttcacagggccctccaggcccagcgcggagcgggactggctcctgtcatgggccaaccgctgcgagacggtgggcgacagcattcaggtccgagaagacactcaggtcctcgtcgtacccaggcccaactattaagggttggctgcgttctggggacctgtcaggtccaaaatctttcccatcggctttggcaacttatgggcccagcaggccgacaagacagtgcgcctgtggatcccagcagtcctcacagttatggatag

SEQ ID NO: 88783 - DNA, 447 bp, Artificial Sequence
  derived and/or modified sequence
atggccaggatcccaactgccgccctaggttgtatatcactcctctgcctgcagctgcctgggtctctgtctcgctctctcggcggcgacccccgtccggtaaagccacgcgaacctccagccaggtccccttcttcatctctccagccccgacatcccgcaccccgacccgtggtgtggaaattgcacagagccctccaagctcagcgaggagccggccttgcccctgttatgggccagccactccgcgatggcggacgacaacactcagggccccgtagacattctggaccgcgacgaacccaagctcagctgctaagagttgggtgtgtgctcgggacctgccaagtccagaatctaagccatcggttgtggcagttaatggggcccgctggcaggcaagacagcgctcccgtcgacccatccagcccacactcctacggttag

SEQ ID NO: 88784 - DNA, 447 bp, Artificial Sequence
  derived and/or modified sequence
atggcgcggatcccaactgccgcactggggtgtatttccctcctctgcctccaactccccggttctctttccagaagtttagggggggacccccgaccagtgaagcctcgcgagcctccggcacgctcaccctcctcatcgcttcagcctagacatcccgcccccagacccgttgtctggaaactccacagagccctgcaggcccagcgaggcgccggactcgcacccgtcatgggtcagcctttacgagacggtggtaggcagcattccgggccccgacgacatagtggcccccgcagaacacaggcccaactcttgcgcgtgggctgcgtgttaggtacctgccaggtccaaaacctctcacatcggctgtggcagctgatgggaccagcggggagacaagactccgctcccgtagacccatctagccctcactcatacggatag

SEQ ID NO: 88785 - DNA, 447 bp, Artificial Sequence
  derived and/or modified sequence
atggccaggatcccaactgccgccctaggttgtatatcactcctctgcctgcagctgcctgggtctctgtctcgctctctcggcggcgacccccgtccggtaaagccacgcgaacctccagccaggtccccttcttcatctctccagccccgacatcccgcaccccgacccgtggtgtggaaattgcacagagccctccaagctcagcgaggagccggccttgcccctgttatgggccagccactccgcgatggcggacgacaacactcagggccccgtagacattctggaccgcgacgaacacaagcacagctcctgagggtgggttgcgttttgggtacttgccaggtgcagaatttatcccatcgactgtggcaactaatgggtcctgctggccgccaagattccgctcctgtcgatccttccagcccacatagttacggctag

SEQ ID NO: 88786 - DNA, 447 bp, Artificial Sequence
  derived and/or modified sequence
atggcgcggatcccaactgccgcactggggtgtatttccctcctctgcctccaactccccggttctctttccagaagtttagggggggacccccgaccagtgaagcctcgcgagcctccggcacgctcaccctcctcatcgcttcagcctagacatcccgcccccagacccgttgtctggaaactccacagagccctgcaggcccagcgaggcgccggactcgcacccgtcatgggtcagcctttacgagacggtggtaggcagcattccgggccccgacgacatagtggcccccgcagaacacaggcacagttactaagagtgggttgtgtgctcggaacatgtcaggtgcaaaacttaagccacaggttatggcaactcatggggcctgccggccgtcaagactctgctcccgtagacccctcctccccccattcttatggatag

SEQ ID NO: 88787 - DNA, 699 bp, Artificial Sequence
  derived and/or modified sequence
atggtggccgccaacaccagagcccccgaggacaccagagcccccgccggccccaagcccagcagctgcgagtgggccgtgtgctgggcccccgccagatgcagaatcagcgccaccgcctgcggcaacagctgggacagacccgccggcagaacccagctgctgtggacccccgccgcccccaccgccatggccgaggtgggccccggccacacccccgcccaccccagccagggcgccgtgccccccagcagagccgccgccgagccccacctgaagcccagccccagcgagctgcagaccgccggccccgccgccaccatccccgccagactgtgcaccagaaagcccagactggtgtacacccagtgctggtacgtgaaggagcccaagcaccccgagatcgtgaccccctggggcaccgccgccagacacagctggagacagcaccagatgctgagcgccagcgagagaagatgcctgcccagagacgtggagcagaagctgggccccgagcacaccggcccctgcctggacgagcagggcagagaggccgagctggccagaagcggccccagcgccgccggccccgtgagactgaagcccggcctggtgcccggcctgttcctgctgagctgcaccaccagccccagcacctgcctgcccgtgggccaggagggcgagagaggcatgctgtag

SEQ ID NO: 88788 - DNA, 447 bp, Artificial Sequence
  derived and/or modified sequence
atggccagaatccccaccgccgccctgggctgcatcagcctgctgtgcctgcagctgcccggcagcctgagcagaagcctgggcggcgaccccagacccgtgaagcccagagagccccccgccagaagccccagcagcagcctgcagcccagacaccccgcccccagacccgtggtgtggaagctgcacagagccctgcaggcccagagaggcgccggcctggcccccgtgatgggccagcccctgagagacggcggcagacagcacagcggccccagaagacacagcggccccagaagaacccaggcccagctgctgagagtgggctgcgtgctgggcacctgccaggtgcagaacctgagccacagactgtggcagctgatgggccccgccggcagacaggacagcgcccccgtggaccccagcagcccccacagctacggctag

SEQ ID NO: 88789 - DNA, 699 bp, Artificial Sequence
  derived and/or modified sequence
atggtggccgcaaatactcgggccccagaggacacgcgcgctccggccggacccaagccatcttcgtgcgagtgggcagtgtgctgggcaccagctagatgtagaattagcgccaccgcttgcggtaatagctgggatcgacctgccggccggacacagctgctgtggacgcccgcggcccctaccgccatggctgaggtaggacccggccacacccccgcacacccaagtcaaggggctgtgcccccatcccgtgctgcagcagagccgcatttgaagccttccccttcagaactgcagaccgccggtcctgccgccaccataccagctcgcttatgtacacgcaaacccagacttgtttatacccagtgttggtatgtcaaagagccaaaacaccctgagattgtgaccccgtgggggacggcagccaggcatagctggcgccagcatcaaatgctcagtgcgtccgaaaggagatgtctccccagggatgtcgaacagaagttgggaccagagcatactggcccctgcttagatgagcaaggacgtgaggctgaactggcaaggagcggcccttctgctgctggcccagtgcgtcttaaaccaggactggtgcctgggctgttcctgttgagttgcactacttctccttcaacgtgcctgcctgtgggccaggagggcgaaaggggaatgctgtag

SEQ ID NO: 88790 - DNA, 447 bp, Artificial Sequence
  derived and/or modified sequence
atggctcggatcccaaccgccgccctgggttgcatcagccttctttgtcttcagctccccggctcactgtcaagatcgctcggcggtgatccaagaccagtcaagccccgggaacccccagccagatccccctcatcatcccttcagcctcgccatccagcccctaggcccgtggtgtggaagcttcacagggccttgcaagcccaaaggggcgcaggcctggccccagtgatgggacaacccctacgcgatggcggcagacaacatagcggcccaaggagacactctgggcctaggcggactcaggcacagttgctccgtgtgggatgcgttttgggtacttgccaggttcaaaatctgtcccacaggctctggcagctgatgggacccgctggacggcaggattcagcacctgtcgatcctagctcccctcactcttacggctag

SEQ ID NO: 88791 - DNA, 447 bp, Artificial Sequence
  derived and/or modified sequence
atggcacggattccaactgcagccctgggatgtatctctctgctgtgtctgcagttgcctggaagtctcagcagatctctgggcggggaccccaggcctgtaaagccccgggagccacctgccagaagcccctcatcatcgctgcaaccacggcacccagccccccgccccgtggtgtggaaattgcatagggctctgcaggcccagagaggggcgggactcgcccccgtgatgggacagccactacgcgacgggggccgccaacattccgggccacggcggcactctggaccccgcagaactcaggcccagttgctacgcgttggatgcgtgctggggacctgccaggttcaaaacctgtctcatcggctttggcagttgatggggcctgctggccgacaggacagtgcacctgtggaccccagctctcctcattcttacgggtag

SEQ ID NO: 88792 - DNA, 4246 bp, Artificial Sequence
  derived and/or modified sequence
ccgcgactccgctccaggcaggacccccaacccgcccagcccgctccgccttgcgccccggacccgcggccgaccccagacccgctgcccgcttcgcgcccgaggcctgcgccccgacggacgcccgtgcccagcttgccacgcccacgcccggcgccccgaccgcggaggactccccgaggtgccggcggagggggtggctcgcggctcaggctgcccccgacgtgcccggctcaccgccccctcccctgcagccccgcccgccatggcccggatcccgacggccgccctgggttgcatcagcctcctctgcctgcagctccctggctcgctgtcccgcagcctgggcggggacccgcgacccgtcaaacccagggagcccccagcccggagcccttccagcagcctgcagcccaggcaccccgcaccccgacctgtggtctggaagcttcaccgggccctccaggcacagaggggtgccggcctggcccctgttatgggtcagcctctccgggatggtggccgccaacactcgggcccccgaagacactcgggcccccgcaggacccaagcccagctcctgcgagtgggctgtgtgctgggcacctgccaggtgcagaatctcagccaccgcctgtggcaactcatgggaccggccggccggcaggactcagctcctgtggaccccagcagcccccacagctatggctgaggtggggccgggccacacccctgcccatcccagccagggtgctgtgcccccgtccagagctgcagctgagccccatctgaagcccagtccctcggagctgcagacagcaggtcctgcagcaacaatacctgcacggctttgcacacgtaaacctaggctggtctacacgcagtgctggtacgtcaaggagcctaaacaccctgaaattgtgaccccctgggggacagctgccagacacagctggcggcagcaccagatgctaagcgcttcagagaggaggtgtctgcccagagatgtggagcagaagctgggccctgaacacacggggccatgtctggacgagcaggggagagaggctgaactggccagaagtggcccctccgctgctggtccagtcagactgaagcccggccttgtgcctgggctgttcctgctctcatgcacaaccagcccttccacgtgcctgcctgtgggacaggagggggagcgtgggatgctgtagcccccggggttgggcaagggaaggatggtggccctccagaggtcatgaagggacctctgtggctccagctgccaaccctggagcccagaccgaggtggccatggagactccacctggatcccctgtaggaggccagggaggggaactcagcagttcaggagccaccccaaaccattctgggacagggacacccctttctaccccagggcagggcagggctgggtggggcaagatcccccagcccgactagacccacctcacctgaagggggtgagacccttgttggcagccagacaagggtggggctccacaggcagcacaggcgccccaccaccacccagtttggggacccagtgggaccaggtgcgggggcagagggtgacttaccaagagccagggagggcagcccaggcccaagtgacagcaagaacaagaaccactgccggcgtgcacagacttggtgtgtgtccttccctggggggacgggggactcacatgtgcctgccactggagcctctcaaccgtccagcagaacacggggttcagaaagggctccttctgctatttagcgaacactgagcatttaatttacaaatgtttgctagggtcaccctctcggccatcccacgagggtcgccatgatcaccccaactctagaggccgcagcagagctcaggacattcccccacagagcttgcccctcagttcctacctccaagggggagggtcctggaagcgcccacccaggcgccgcccctgtgcttgctccccgagctcagggattgccgagtccacgtaactgacctgtactccacgaggccctgtgggaacggtccaggctggtcctgccctgtggaggcctccgtgcactgagagatgtactaggattgcagcaaaggtggtcagggtgatgggccgcacagcgaggcagtcaaggccagctccctgggagaagcactgggtcaggtgaggtctgaggacagcaggccttccctaggggaaggagctgggagtgccaaggccccaggtgcacaggaggcgtggctgctgagaggctgcagggtggaggggcctcggcctcagagtcatgtgccctgtgaccactgaagggtgtcagcagagcacacggcatgaggacagagggaggggcacggggagtgaaggagggggccctggggcaaggctcgggggtcaggagctcagcgtccgctactcagcccagccaaaaccctcccagacgtctcctctcctgcctgggcaaagtccagcttggcaccccgtctggggcctgcctgtggtcagggccaagtgttccctcctccaggaaagcctttaccctcctcatgccctgtagtcaggaggccgcctgctgtaaccctccgtgtcgcctcgggtgcgaaatcagacccacctgacaccatcacgcggaggcccagcagcacctgcacccacttccagctgctctggccaaaatctccgctcggccaggccccgtggctcacacctgtaatcctagcacattgggaggccaaggcaggcacatcacctgagttcaggagttcaagaccagcctggccaacatggtgaaatcccgtctctactaaaaacagaaaattatccgggcgtggtggcacatgactgtaatcccagctactcaggaggctgaggcaggaggatcacttgaacctgggaggcggaggttgcagtgagctgagattgcgccattgcactccagcctgggcaacaagagcaaaattctgcctcaaaaaaaaaaatagtaataatacaaaaattagctgggcgtggtggcacatgccagtaattccatctactcgggaggctgaggcaggagaatcgtctaagcccgggaggtggaggttgcagtgagcccagatggcgctgctgcactcaagcttggatgacagagcaagactccgtttcaaaaaaaaaaaacctcctctcttccttcacaccttcctctgaatcccacccggtcccacctcctgaacctatccagacaccttctcctgacccaggcaccacctgctttcggggcgatggccgtagcctcctcccaggcacctgtctgcatccctctggccagtgcatgctgagcacgtgacctacccgtgttgggacacgtgaggatacagccttgacccccaggggctgacattctagggggagatagaaggagacaaacgtagaaggtagaataagtgggtggtggagtggcagggagtgctgagtgccacaggaagtcagacaaggaaggagagtgtggggcaggtgccgtttaaatggggggcgctggggtctcctcacagttgcttctcagctcagctgtgccaggatcttgttgagtcaggtcagctgcccacagccctcttgcctgacccctgaagcccagaactctgatcttcacagccctaggtatggccccagcaccccactgccctctctcctgccccagccgactgctgttcccagacttccctggccacgctccaagacgccagctctgccgcgggcactttgttctcacggtgtcctccatgcctgcagggcccatgcatgggaagttgcgttggcggcctgggtgttggcggttccgtgcctgctccaactctccgtgaggcccctctcccagagcctgacacactctgtggccgaactctaggcaggtgcccctgagtcctttcctcgacgaggcctgaccccatccccatcctcgctgggcccgccgaccccggtgttagcaagaatcctctaaatcagtttatggagaattacccaccctcgatatctgatcccattcctcatctcccacccttgatctcatcaccctgccggcctcctgcaagatcctcattgagccactccagtgagaatccccctaccctcgaaggccgccctaacaacttcccatccgctgacccctccaacgccatcaatctccagctgtggttgttgaactcggaggtgagctcctctcaccactctcttgaataaagcttttctcaccattttaa

SEQ ID NO: 88793 - DNA, 447 bp, Artificial Sequence
  derived and/or modified sequence
atggcccgcatccccacagctgccctgggctgcatcagcctgctgtgcctgcagctgcccggcagcctgagccgcagcctgggcggggaccccaggcctgtgaagccccgggagcccccagcccggagccccagcagcagcctgcagcccaggcacccagcccccaggcctgtggtgtggaagctgcaccgggccctgcaggcccagagaggagctggcctggcccctgtgatgggccagcccctgagagatggcggccggcagcacagcggccccaggaggcacagcggccccaggaggacccaggcccagctgctgcgggtgggctgtgtgctgggcacctgccaggtgcagaacctgagccaccggctgtggcagctgatgggccctgctggccggcaggacagcgcccctgtggaccccagcagcccccacagctatggatag

SEQ ID NO: 88794 - DNA, 699 bp, Artificial Sequence
  derived and/or modified sequence
atggtggccgccaacacccgggcccccgaggacacccgggcccccgctgggcctaaaccctcgagctgcgaatgggccgtttgctgggcccctgctcgttgtaggatctctgcgacggcatgtggcaactcttgggacagacctgccggtagaacacagctgctgtggacacccgcagcacccactgctatggctgaagtggggcccgggcacactcctgcccatccttcccagggtgccgtcccaccaagccgagccgcagcagaacctcatctgaagcctagtccatctgagctacagactgcaggccctgccgccactatcccagctcggctttgtacgaggaagcctagactggtgtacacccagtgctggtatgtcaaggagcctaaacaccctgagattgtgacaccctggggtaccgccgcccggcactcatggaggcagcatcagatgctctccgcctccgagagaagatgtttaccaagagacgtcgagcagaagcttggacccgagcataccgggccctgcttggatgagcagggtagggaagctgaacttgccagatccgggccgtcagccgccggccctgtgcgcctgaagcccggcctggtaccagggctgtttctgctctcctgtactactagtccttctacttgtttaccggtgggccaggaaggagaaagaggtatgctatag

SEQ ID NO: 88795 - DNA, 447 bp, Artificial Sequence
  derived and/or modified sequence
atggcccggatccccaccgccgccctgggctgcatcagcctgctgtgcttacagttacctggcagtcttagccgatcccttggaggggacccacgtcctgtgaagcctcgcgaaccccccgctcgcagtccttcctcatccctgcagccccgtcaccccgctcctcgcccagttgtgtggaaattacatcgagcactgcaggcccagcgcggagccggattagccccagtgatggggcagcctttaagagatgggggacggcagcactcagggcccagaagacactccgggcctaggcgtacccaggctcaattgttgcgggtgggatgcgttttgggaacgtgtcaggtacaaaacctgtcgcaccgtttgtggcagttgatgggccctgcgggaagacaagactcagcccctgtggatccatcctcgccgcacagttacggttag

SEQ ID NO: 88796 - DNA, 447 bp, Artificial Sequence
  derived and/or modified sequence
atggcccggatccccaccgccgccctgggctgcatcagcctgctgtgtctgcagctgcccgggtcactgtcgcgtagcctcgggggggacccccgaccagtgaagcctagggaaccgccagccagatctccttcaagttccctacagccaagacatcctgctcccagaccggtcgtgtggaagctgcatcgcgcccttcaggcccagagaggggcgggccttgctccggtaatgggacaacccctgcgcgacggaggacggcagcactccggccccaggagacacagcgggccccgccggacccaggctcagctgctaagggtgggctgtgtgctcggcacgtgccaggtccagaacctctcacatcggctgtggcaactaatgggtcccgcaggaaggcaagactcagcccctgtggacccaagctcaccccattcttatggatag

SEQ ID NO: 88797 - RNA, 447 nt, Artificial Sequence
  derived and/or modified sequence
auggccaggaucccaacugccgcccuagguuguauaucacuccucugccugcagcugccugggucucugucucgcucucucggcggcgacccccguccgguaaagccacgcgaaccuccagccagguccccuucuucaucucuccagccccgacaucccgcaccccgacccgugguguggaaauugcacagagcccuccaagcucagcgaggagccggccuugccccuguuaugggccagccacuccgcgauggcggacgacaacacucagggccccguagacauucuggaccgcgacgaacccaagcucagcugcuaagaguugggugugugcucgggaccugccaaguccagaaucuaagccaucgguuguggcaguuaauggggcccgcuggcaggcaagacagcgcucccgucgacccauccagcccacacuccuacgguuag

SEQ ID NO: 88798 - RNA, 447 nt, Artificial Sequence
  derived and/or modified sequence
auggcgcggaucccaacugccgcacugggguguauuucccuccucugccuccaacuccccgguucucuuuccagaaguuuagggggggacccccgaccagugaagccucgcgagccuccggcacgcucacccuccucaucgcuucagccuagacaucccgcccccagacccguugucuggaaacuccacagagcccugcaggcccagcgaggcgccggacucgcacccgucaugggucagccuuuacgagacggugguaggcagcauuccgggccccgacgacauaguggcccccgcagaacacaggcccaacucuugcgcgugggcugcguguuagguaccugccagguccaaaaccucucacaucggcuguggcagcugaugggaccagcggggagacaagacuccgcucccguagacccaucuagcccucacucauacggauag

SEQ ID NO: 88799 - RNA, 447 nt, Artificial Sequence
  derived and/or modified sequence
auggccaggaucccaacugccgcccuagguuguauaucacuccucugccugcagcugccugggucucugucucgcucucucggcggcgacccccguccgguaaagccacgcgaaccuccagccagguccccuucuucaucucuccagccccgacaucccgcaccccgacccgugguguggaaauugcacagagcccuccaagcucagcgaggagccggccuugccccuguuaugggccagccacuccgcgauggcggacgacaacacucagggccccguagacauucuggaccgcgacgaacacaagcacagcuccugaggguggguugcguuuuggguacuugccaggugcagaauuuaucccaucgacuguggcaacuaauggguccugcuggccgccaagauuccgcuccugucgauccuuccagcccacauaguuacggcuag

SEQ ID NO: 88800 - RNA, 447 nt, Artificial Sequence
  derived and/or modified sequence
auggcgcggaucccaacugccgcacugggguguauuucccuccucugccuccaacuccccgguucucuuuccagaaguuuagggggggacccccgaccagugaagccucgcgagccuccggcacgcucacccuccucaucgcuucagccuagacaucccgcccccagacccguugucuggaaacuccacagagcccugcaggcccagcgaggcgccggacucgcacccgucaugggucagccuuuacgagacggugguaggcagcauuccgggccccgacgacauaguggcccccgcagaacacaggcacaguuacuaagaguggguugugugcucggaacaugucaggugcaaaacuuaagccacagguuauggcaacucauggggccugccggccgucaagacucugcucccguagaccccuccuccccccauucuuauggauag

SEQ ID NO: 88801 - protein, 342 aa, Artificial Sequence
  derived and/or modified sequence
MCKMDGSYLAEFLLEKGYEVHGIVRRSSSFNTGRIEHLYKNPQAHIEGNMKLHYGDLTDSTCLVKIINEVKPTEIYNLGAQSHVKISFDLAEYTADVDGVGTLRLLDAVKTCGLINSVKFYQASTSELYGKVQEIPQKETTPFYPRSPYGAAKLYAYWIVVNFREAYNLFAVNGILFNHESPRRGANFVTRKISRSVAKIYLGQLECFSLGNLDAKRDWGHAKDYVEAMWLMLQNDEPEDFVIATGEVHSVREFVEKSFLHIGKTIVWEGKNENEVGRCKETGKVHVTVDLKYYRPTEVDFLQGDCTKAKQKLNWKPRVAFDELVREMVHADVELMRTNPNA

SEQ ID NO: 88802 - DNA, 1029 bp, Artificial Sequence
  derived and/or modified sequence
atgtgtaaaatggatggaagctacctagctgagtttttgctcgagaagggatatgaggtgcatggaattgtgaggagatctagcagttttaacaccggaagaatcgagcatctttataaaaatccacaggctcatatagaaggtaatatgaagctgcattacggtgacctcacagactcaacctgcctggtgaagatcattaatgaggtgaaacccaccgagatttataaccttggcgcgcagtcccacgtgaagatttcatttgatttggctgaatatacagcggacgtggacggcgtgggcaccttacgcctgctggacgctgtgaagacctgcggcctcattaatagtgtaaagttttaccaggcaagtactagtgaactgtacggaaaagtccaagagatccctcagaaggaaaccacacccttctatccccgctccccctatggagccgctaaactgtatgcatattggatagttgtgaacttccgtgaagcttataatctcttcgccgttaatggaatcctgtttaaccatgagagcccacgtagaggtgcaaacttcgtaacgagaaagatttcccgaagcgtcgcaaagatatacttaggccaattagaatgtttcagtctaggtaatctggacgcaaagcgcgattggggccatgctaaagactatgttgaggccatgtggctgatgctgcaaaacgatgagcccgaggattttgtcattgccacgggtgaagtgcattctgtcagggaatttgtggagaagtcattcttacatatcggcaagaccattgtatgggagggcaaaaatgaaaatgaagttgggcgatgcaaggagacaggcaaagtgcatgtcaccgttgaccttaaatattaccggcccacggaagtagacttcctccagggggattgtacgaaagccaagcagaaactgaactggaagcctcgggttgcctttgacgagcttgtcagggagatggtgcacgcagatgtggagttgatgcggactaaccctaatgcttag

SEQ ID NO: 88803 - DNA, 1440 bp, Artificial Sequence
  derived and/or modified sequence
tgtacacaggcagtttgttgggagcgttaccattgcctctggttcctcatgtgtaaaatggatggttcctacctggctgagttcctgctggagaaaggctatgaggtccatggaattgtacggcggtccagttcatttaatacgggtcgaattgagcatctgtataagaatccccaggctcacattgaaggaaacatgaagttgcactatggcgatctcactgacagtacctgccttgtgaagatcattaatgaagtaaagcccacagagatctacaaccttggagcccagagccacgtcaaaatttcctttgacctcgctgagtacactgcggacgttgacggagttggcactctacgacttctagatgcagttaagacttgtggccttatcaactctgtgaagttctaccaagcctcaacaagtgaactttatgggaaagtgcaggaaataccccagaaggagaccacccctttctatccccggtcaccctatggggcagcaaaactctatgcctattggattgtggtgaacttccgtgaggcgtataatctctttgcagtgaacggcattctcttcaatcatgagagtcccagaagaggagctaatttcgttactcgaaaaattagccggtcagtagctaagatttaccttggacaactggaatgtttcagtttgggaaatctggatgccaaacgagattggggccatgccaaggactatgtggaggctatgtggttgatgttgcagaatgatgagccggaggacttcgttatagctactggggaggtccatagtgtccgggaatttgtcgagaaatcattcttgcacattggaaaaaccattgtgtgggaaggaaagaatgaaaatgaagtgggcagatgtaaagagaccggcaaagttcacgtgactgtggatctcaagtactaccggccaactgaagtggactttctgcagggcgactgcaccaaagcgaaacagaagctgaactggaagccccgggtcgctttcgatgagctggtgagggagatggtgcacgccgacgtggagctcatgaggacaaaccccaatgcctgagcagcgcctcggagcccggcccgccctccggctacaatccccgcagagtctccggtgcagacgcgctgcggggatggggagcggcgtgccaatctgcgggtcccctgcggcccctgctgccgctgcgctgtcccggccgcaagagcggggccgccccgccgaggtttgtagcagccgggatgtgaccctccagggtttgggtcgctttgcgtttgtcgaagcctcctctgaatggctttgtgaaatcaagatgttttaatcacattcactttacttgaaattatgttgttacacaacaaattgtggggccttcaaattgtttttctcttttcatattaaaaatggtctttctgtgaactagca

SEQ ID NO: 88804 - DNA, 1029 bp, Artificial Sequence
  derived and/or modified sequence
atgtgcaagatggatggcagctacctggccgagttcctgctggagaagggctatgaggtgcatggaattgtgagaagaagcagcagcttcaacacaggaagaattgagcacctgtacaagaacccccaggcccacatcgagggcaacatgaagctgcactacggggacctgacagacagcacctgcctggtgaagatcatcaatgaggtgaagcccacagagatctacaacctgggcgcccagagccacgtgaagatcagctttgacctggccgagtacacagcagatgtggatggagtgggcaccctgcggctgctggatgctgtgaagacctgtggcctcatcaacagcgtgaagttctaccaggccagcaccagcgagctgtatggcaaggtgcaggagatcccccagaaggagaccacccccttctaccccaggagcccctatggagctgccaagctgtatgcctactggatcgtggtgaacttccgggaggcctacaacctgtttgctgtgaatggcatcctcttcaaccacgagagccccaggagaggagccaactttgtgaccaggaagatcagccgctctgtggccaagatctacctgggccagctggagtgcttcagcctgggcaacctggatgccaagagggactggggccacgccaaggactatgtggaggccatgtggctgatgctgcagaatgatgagccagaagattttgtgattgccactggagaggtgcacagcgtgcgggagtttgtggagaagagcttcctgcacatcggcaagaccatcgtgtgggagggcaagaatgaaaatgaggtgggccgctgcaaggagaccgggaaggtgcacgtgacagtggacctgaagtactaccggcccacagaggtggacttcctgcagggcgactgcaccaaggccaagcagaagctgaactggaagccccgggtggcctttgatgagctggtgcgggagatggtgcatgctgatgtggagctgatgaggaccaaccccaatgcctag

SEQ ID NO: 88805 - DNA, 1029 bp, Artificial Sequence
  derived and/or modified sequence
atgtgcaagatggacggcagctacctggccgagttcctgctggagaaagggtacgaggttcacggcatagtgaggagatcatccagttttaacaccggaagaatcgagcacctatacaagaacccccaggctcacatcgaagggaatatgaagcttcattatggggatcttaccgactccacatgcctggtgaagatcattaacgaggtcaaacctacagaaatctacaacctcggggcccagtcacatgtcaaaataagtttcgatctggcagagtataccgccgatgtagacggtgtggggacccttaggctgctggacgcggtcaagacatgtgggctaattaatagcgtgaagttctatcaggcaagtacatccgaactgtatggcaaagtacaggaaattccgcagaaagagacaacaccattttacccaaggtcaccgtatggggccgctaaactgtacgcttactggatagtggtaaacttccgggaagcatacaatctgtttgctgttaacggcatcctgttcaaccacgagagcccaaggcgtggggccaatttcgtcacccggaagatctcccggagcgtggccaagatctatctcggccagctcgagtgcttcagcttgggtaatctggacgccaagagagattgggggcatgctaaagattatgtcgaggcgatgtggcttatgctccagaacgatgagccagaggattttgtgatcgcaacaggcgaggtccactccgtcagggagttcgtggaaaaatcctttctgcacatcggtaagaccatcgtttgggaaggaaaaaatgaaaatgaagtggggagatgtaaggaaaccggcaaagtgcacgtgacagttgatctgaaatactatcgcccaaccgaggtcgactttctccagggtgactgtacaaaggccaagcagaaactgaactggaaacctagagtcgccttcgatgaactcgtgcgagagatggtgcacgccgatgtcgagctgatgcggaccaaccctaacgcgtag

SEQ ID NO: 88806 - DNA, 1029 bp, Artificial Sequence
  derived and/or modified sequence
atgtgtaaaatggatgggtcctacctcgctgagttccttctagagaagggatacgaagtgcatggcattgtccgtcggagcagctctttcaatactggcaggatcgagcacctgtataagaatccccaggctcacattgaaggcaacatgaagctgcattatggagacctcacagattccacttgtttggtgaaaatcattaacgaggtgaaacccaccgagatttacaatctgggagcccagagccacgtaaaaattagctttgacctcgccgagtacactgccgacgtggacggggtggggactctcaggctgttggacgctgtgaagacatgcgggctgatcaatagcgtgaagttttaccaagcctctacctctgagttgtatggaaaagtccaggagataccccagaaagaaaccacacccttttaccccaggtctccatatggggctgccaaactgtatgcttattggatagttgtgaattttcgggaagcctataacttatttgccgtgaatggaattttgttcaaccatgaatccccaagacgcggtgctaatttcgttacacgcaaaatttcaagatccgtggcaaaaatatatctgggccagctcgagtgctttagtctcggcaatctggatgctaagcgagattgggggcatgccaaagactacgtggaagctatgtggttgatgctgcaaaatgacgaaccggaggatttcgtgatcgcaacaggggaggtgcactctgtgagggaattcgttgagaagtcttttctacacatcgggaaaactatcgtgtgggaaggtaaaaacgagaacgaggtgggacgttgcaaagagacgggaaaggtccacgtgactgttgatctgaagtactaccgtcctaccgaggtagattttttgcaaggcgattgtacaaaggctaagcagaaactgaactggaagccccgtgtggcttttgacgaattggtgcgtgagatggtccacgccgatgtcgagttgatgcgcactaatcccaatgcttag

SEQ ID NO: 88807 - DNA, 1029 bp, Artificial Sequence
  derived and/or modified sequence
atgtgcaagatggacggcagctacctggccgagttcctgctggagaagggctacgaggtgcacggcatcgtgagaagaagcagcagcttcaacaccggcagaatcgagcacctgtacaagaacccccaggcccacatcgagggcaacatgaagctgcactacggcgacctgaccgacagcacctgcctggtgaagatcatcaacgaggtgaagcccaccgagatctacaacctgggcgcccagagccacgtgaagatcagcttcgacctggccgagtacaccgccgacgtggacggcgtgggcaccctgagactgctggacgccgtgaagacctgcggcctgatcaacagcgtgaagttctaccaggccagcaccagcgagctgtacggcaaggtgcaggagatcccccagaaggagaccacccccttctaccccagaagcccctacggcgccgccaagctgtacgcctactggatcgtggtgaacttcagagaggcctacaacctgttcgccgtgaacggcatcctgttcaaccacgagagccccagaagaggcgccaacttcgtgaccagaaagatcagcagaagcgtggccaagatctacctgggccagctggagtgcttcagcctgggcaacctggacgccaagagagactggggccacgccaaggactacgtggaggccatgtggctgatgctgcagaacgacgagcccgaggacttcgtgatcgccaccggcgaggtgcacagcgtgagagagttcgtggagaagagcttcctgcacatcggcaagaccatcgtgtgggagggcaagaacgagaacgaggtgggcagatgcaaggagaccggcaaggtgcacgtgaccgtggacctgaagtactacagacccaccgaggtggacttcctgcagggcgactgcaccaaggccaagcagaagctgaactggaagcccagagtggccttcgacgagctggtgagagagatggtgcacgccgacgtggagctgatgagaaccaaccccaacgcctag

SEQ ID NO: 88808 - protein, 484 aa, Artificial Sequence
  derived and/or modified sequence
MHSLTMDLWIPNGQAGVMSLLRTLLLDVVPTIQQTAALALGRLANYNDDLAEAVVKCDILPQLVYSLAEQNRFYKKAAAFVLRAVGKHSPQLAQAIVDCGALDTLVICLEDFDPGVKEAAAWALRYIARHNAELSQAVVDAGAVPLLVLCIQEPEIALKRIAASALSDIAKHSPELAQTVVDAGAVAHLAQMILNPDAKLKHQILSALSQVSKHSVDLAEMVVEAEIFPVVLTCLKDKDEYVKKNASTLIREIAKHTPELSQLVVNAGGVAAVIDCIGSCKGNTRLPGIMMLGYVAAHSENLAMAVIISKGVPQLSVCLSEEPEDHIKAAAAWALGQIGRHTPEHARAVAVTNTLPVLLSLYMSTESSEDLQVKSKKAIKNILQKCTYLPALEPFLYDAPPNILKHVVGQFSKVLPHDSKARRLFVTSGGLKKVQEIKAEPGSLLQEYINSINSCYPEEIVRYYSPGYSDTLLQRVDSYQPLNN

SEQ ID NO: 88809 - DNA, 813 bp, Artificial Sequence
  derived and/or modified sequence
atgagccagagacaggtgctgcaggtgttcgagcagtaccagaaggccagaacccagttcgtgcagatggtggccgagctggccaccagaccccagaacatcgagaccctgcagaacgccggcgtgatgagcctgctgagaaccctgctgctggacgtggtgcccaccatccagcagaccgccgccctggccctgggcagactggccaactacaacgacgacctggccgaggccgtggtgaagtgcgacatcctgccccagctggtgtacagcctggccgagcagaacggcgtgccccagctgagcgtgtgcctgagcgaggagcccgaggaccacatcaaggccgccgccgcctgggccctgggccagatcggcagacacacccccgagcacgccagagccgtggccgtgaccaacaccctgcccgtgctgctgagcctgtacatgagcaccgagagcagcgaggacctgcaggtgaagagcaagaaggccatcaagaacatcctgcagaagtgcacctacctgcccgccctggagcccttcctgtacgacgccccccccaacatcctgaagcacgtggtgggccagttcagcaaggtgctgccccacgacagcaaggccagaagactgttcgtgaccagcggcggcctgaagaaggtgcaggagatcaaggccgagcccggcagcctgctgcaggagtacatcaacagcatcaacagctgctaccccgaggagatcgtgagatactacagccccggctacagcgacaccctgctgcagagagtggacagctaccagcccctgaacaactag

SEQ ID NO: 88810 - DNA, 1455 bp, Artificial Sequence
  derived and/or modified sequence
atgcacagcctgaccatggacctgtggatccccaacggccaggccggcgtgatgagcctgctgagaaccctgctgctggacgtggtgcccaccatccagcagaccgccgccctggccctgggcagactggccaactacaacgacgacctggccgaggccgtggtgaagtgcgacatcctgccccagctggtgtacagcctggccgagcagaacagattctacaagaaggccgccgccttcgtgctgagagccgtgggcaagcacagcccccagctggcccaggccatcgtggactgcggcgccctggacaccctggtgatctgcctggaggacttcgaccccggcgtgaaggaggccgccgcctgggccctgagatacatcgccagacacaacgccgagctgagccaggccgtggtggacgccggcgccgtgcccctgctggtgctgtgcatccaggagcccgagatcgccctgaagagaatcgccgccagcgccctgagcgacatcgccaagcacagccccgagctggcccagaccgtggtggacgccggcgccgtggcccacctggcccagatgatcctgaaccccgacgccaagctgaagcaccagatcctgagcgccctgagccaggtgagcaagcacagcgtggacctggccgagatggtggtggaggccgagatcttccccgtggtgctgacctgcctgaaggacaaggacgagtacgtgaagaagaacgccagcaccctgatcagagagatcgccaagcacacccccgagctgagccagctggtggtgaacgccggcggcgtggccgccgtgatcgactgcatcggcagctgcaagggcaacaccagactgcccggcatcatgatgctgggctacgtggccgcccacagcgagaacctggccatggccgtgatcatcagcaagggcgtgccccagctgagcgtgtgcctgagcgaggagcccgaggaccacatcaaggccgccgccgcctgggccctgggccagatcggcagacacacccccgagcacgccagagccgtggccgtgaccaacaccctgcccgtgctgctgagcctgtacatgagcaccgagagcagcgaggacctgcaggtgaagagcaagaaggccatcaagaacatcctgcagaagtgcacctacctgcccgccctggagcccttcctgtacgacgccccccccaacatcctgaagcacgtggtgggccagttcagcaaggtgctgccccacgacagcaaggccagaagactgttcgtgaccagcggcggcctgaagaaggtgcaggagatcaaggccgagcccggcagcctgctgcaggagtacatcaacagcatcaacagctgctaccccgaggagatcgtgagatactacagccccggctacagcgacaccctgctgcagagagtggacagctaccagcccctgaacaactag

SEQ ID NO: 88811 - DNA, 813 bp, Artificial Sequence
  derived and/or modified sequence
atgtcccaaagacaggttctgcaggtgttcgaacagtaccagaaagcaaggacccaattcgtacagatggttgccgagctcgcaacccgccctcaaaacatcgagacattgcagaacgccggagtgatgagtttgttgagaactctgctcctggatgtggtcccaactatccagcaaacagccgctctcgcactgggacggctagctaattataacgacgacttggccgaagcggtggttaaatgtgatatcctgccccaactggtttatagtctggctgagcagaacggcgtgcctcagttgtccgtatgtctaagcgaggagcctgaggatcacatcaaagcagccgccgcttgggcgctgggtcagatcggaaggcacactcccgagcatgcccgggctgtcgctgtgacaaacacactgccagtgctgctctcgctctatatgtctacggaatcaagtgaagacctccaagttaaatctaagaaggctatcaaaaacatcctgcaaaagtgcacttatctgcctgcactagaaccgttcctttacgacgcaccgcctaacatccttaagcatgttgtaggccagttctctaaggttctaccccatgactctaaagcccgccgactgtttgtgacgtccggcggtctcaagaaggtgcaggaaattaaagctgagccgggcagcttacttcaggaatacatcaactccatcaactcctgctacccagaggagatcgtccgatactactcccctgggtactcagacacactcttgcaacgggtagattcttaccagccgcttaacaattag

SEQ ID NO: 88812 - DNA, 1455 bp, Artificial Sequence
  derived and/or modified sequence
atgcacagtcttacaatggatctctggatccccaacgggcaagccggcgtgatgagtctgctgaggacactgttgttggacgtggtaccaactatacagcaaacagccgccttggccttaggacgcttagccaactataatgatgacctggccgaagccgtcgtcaagtgtgatatcctgcctcaactggtttatagcctcgcggagcagaatagattttataaaaaggcagccgcatttgtgctgagggctgtcggaaagcacagcccccagctggcgcaggcaattgtcgactgcggtgccctcgacacccttgtcatttgcttggaggattttgacccaggcgtcaaggaagcagctgcttgggccctgagatatatagctagacacaacgcagaactgagccaggcagttgtggacgcaggggccgtcccgctgttagtcttatgcatccaggagccagaaattgccttaaagcgaatagccgcttcagcgctgtccgatatcgcaaagcactcacctgaactggcccagacagtagtcgatgcaggcgccgtcgcgcatctggcccaaatgatcctgaatccagacgccaaattaaagcaccagatactgagcgctttatcgcaagtctccaagcatagcgtagatcttgccgaaatggtggtggaggctgagatatttcccgtcgtgcttacttgtctgaaggataaagacgagtatgtgaaaaagaacgctagtactctgattcgggagatcgctaagcatacacctgaactttcacagctggtcgtcaatgccggcggcgtggccgctgtgattgactgtatcggaagctgcaaaggtaacacccggctcccgggtattatgatgctgggctatgtggctgctcatagcgagaacttggccatggctgttatcatatccaaaggagtgcctcagcttagcgtctgcttgagcgaagagccagaggaccacattaaagctgccgctgcctgggccctgggacaaatagggcgacatacaccagagcatgcacgcgcagtggccgttactaacacactgcccgttctcctgtcactctatatgtcaactgagagttccgaggatcttcaggtaaaaagcaaaaaggccattaagaacatcctccagaaatgcacatatttgccagccctggagcccttcttatatgatgcgcccccaaacatactgaaacacgttgtaggccaattcagtaaggtgctcccacatgattcaaaggccagaaggttgtttgtgacgagcgggggactgaagaaggtgcaagaaatcaaggccgagcccggctctctgctgcaggagtacattaactcgatcaattcctgctatcccgaagaaatcgtgcggtactattcccctggctattctgatactctgttgcagcgtgttgactcgtatcagcctttgaataattag

SEQ ID NO: 88813 - DNA, 813 bp, Artificial Sequence
  derived and/or modified sequence
atgagccagaggcaggtgctgcaggtgtttgagcagtaccagaaggcccggacccagtttgtgcagatggtggccgagctggccacccggccccagaacatcgagaccctgcagaatgctggggtgatgagcctgctgcggaccctgctgctggatgtggtgcccaccatccagcagacagctgccctggccctgggccgcctggccaactacaatgatgacctggccgaggccgtggtgaagtgtgacatcctgccccagctggtgtacagcctggccgagcagaatggagtgccccagctgtctgtgtgcctgtctgaggagcctgaggaccacatcaaggctgctgctgcctgggccctgggccagatcggccgccacaccccagagcacgcccgggctgtggccgtgaccaacaccctgcctgtgctgctgagcctgtacatgagcacagagagcagcgaggacctgcaggtgaagagcaagaaggccatcaagaacatcctgcagaagtgcacctacctgcctgccctggagcccttcctgtatgatgccccacccaacatcctgaagcacgtggtgggccagttcagcaaggtgctgccccatgacagcaaggcccggcggctgtttgtgaccagcggcggcctgaagaaggtgcaggagatcaaggccgagcccggcagcctgctgcaggagtacatcaacagcatcaacagctgctacccagaggagatcgtgcgctactacagccctggctacagcgacaccctgctgcagagggtggacagctaccagcccctgaacaactag

SEQ ID NO: 88814 - DNA, 1455 bp, Artificial Sequence
  derived and/or modified sequence
atgcacagcctgaccatggacctgtggatccccaacggccaggccggcgtgatgagcctgctgcggaccctgctgctggatgtggtgcccaccatccagcagacagctgccctggccctgggccgcctggccaactacaatgatgacctggccgaggccgtggtgaagtgtgacatcctgccccagctggtgtacagcctggccgagcagaaccgcttctacaagaaggccgccgcctttgtgctgcgggctgtgggcaagcacagcccccagctggcccaggccatcgtggactgtggggccctggacaccctggtgatctgcctggaggactttgaccccggggtgaaggaggccgccgcctgggccctgcgctacatcgcccggcacaatgctgagctgagccaggccgtggtggatgctggagctgtgcccctgctggtgctgtgcatccaggagcctgagatcgccctgaagagaattgctgccagcgccctgagtgacatcgccaagcacagccctgagctggcccagacagtggtggatgctggagctgtggcccacctggcccagatgatcctgaacccagatgccaagctgaagcaccagatcctgagcgccctgagccaggtgtccaagcacagcgtggacctggccgagatggtggtggaggccgagatcttccctgtggtgctgacctgcctgaaggacaaggatgaatatgtgaagaagaatgccagcaccctcatccgggagatcgccaagcacaccccagagctgagccagctggtggtgaatgctgggggcgtggccgccgtcatcgactgcatcggcagctgcaagggcaacacccggctgcccggcatcatgatgctgggctacgtggccgcccacagcgagaacctggccatggctgtgatcatcagcaagggcgtgccccagctgtctgtgtgcctgtctgaggagcctgaggaccacatcaaggctgctgctgcctgggccctgggccagatcggccgccacaccccagagcacgcccgggctgtggccgtgaccaacaccctgcctgtgctgctgagcctgtacatgagcacagagagcagcgaggacctgcaggtgaagagcaagaaggccatcaagaacatcctgcagaagtgcacctacctgcctgccctggagcccttcctgtatgatgccccacccaacatcctgaagcacgtggtgggccagttcagcaaggtgctgccccatgacagcaaggcccggcggctgtttgtgaccagcggcggcctgaagaaggtgcaggagatcaaggccgagcccggcagcctgctgcaggagtacatcaacagcatcaacagctgctacccagaggagatcgtgcgctactacagccctggctacagcgacaccctgctgcagagggtggacagctaccagcccctgaacaactag

SEQ ID NO: 88815 - DNA, 813 bp, Artificial Sequence
  derived and/or modified sequence
atgagccagcggcaggtgctgcaggtgttcgagcagtaccagaaggccaggactcagttcgtgcaaatggttgctgaactcgccacgcgccctcaaaacatcgagacgctgcagaatgccggcgttatgagcctgctgcgtacattacttctggacgtggtacctactattcaacaaactgcagccctcgctctgggcagactggctaactataacgatgacctggctgaagctgtcgtcaaatgcgatatcctgcctcagctggtgtacagtctcgccgagcagaatggcgtgcctcagctgtctgtctgtctgtcagaggaacccgaggatcacataaaggccgctgccgcctgggctctggggcagatcggaaggcataccccagaacatgctcgcgccgtggcagtcacgaacacccttcccgttctgttatcactctatatgtccaccgagtcaagtgaggacctgcaagtgaagtcaaagaaggctatcaagaatattctacagaagtgtacatacctgcctgctttggagcccttcctttacgacgcgcctcctaacatactcaaacatgttgtcggacagttttctaaggtcctccctcatgactcaaaagcccggcggctgtttgtgacctcgggtggtctcaaaaaggtgcaggagatcaaggccgagcccggttctttactgcaggaatacattaactccatcaattcctgctatccagaagaaatcgtacggtattacagccctggatacagcgacacactgttacagcgggtagacagctatcagccacttaataattag

SEQ ID NO: 88816 - DNA, 1455 bp, Artificial Sequence
  derived and/or modified sequence
atgcacagcctgaccatggacctgtggatccccaacggccaggccggcgttatgagcttactgaggacgctcttgcttgacgtcgtaccaaccattcagcagaccgctgccctggctttgggccgcctggccaattataacgacgatttggcagaggccgttgttaaatgcgacatcctaccccaactcgtgtattcactcgctgaacaaaacaggttctacaaaaaagcggcagctttcgtgctccgcgcagtcggcaaacacagtcctcagctcgcgcaggccattgtcgattgcggtgcgctcgataccctcgtgatatgcctggaggattttgatccgggcgttaaggaggcagcagcatgggcccttcgctatatagcgagacataatgcagagctgagccaggcagtggttgatgcgggggctgtgcctttgttagtgttgtgcattcaggaacctgagatcgccctgaagcggatcgctgcgtccgccttaagcgacattgctaaacatagcccagagcttgcccagacagtcgtggacgccggggccgtcgctcacctggctcagatgatcctgaaccctgatgctaagctgaagcaccaaatactttctgccctgtctcaggtgagtaagcactccgtggacctggccgagatggttgtcgaggcagaaatcttcccagtggtgctaacatgccttaaggacaaagacgagtatgtgaaaaaaaacgcctccaccttaattagagagatagcgaagcacacccccgagctctcccaactggtggttaatgctggaggcgtcgctgctgttattgactgtatcgggagctgcaaaggaaacacgaggttgcccggaatcatgatgttgggatatgttgcagcacacagcgagaatctggccatggcagtgatcatctcaaagggtgtcccccaactatctgtctgtctcagcgaagaaccagaagaccatataaaggcagctgccgcgtgggctttggggcagatcggacgacacactcccgagcatgccagggctgtcgcggtgactaacacactgccagtcttgctaagtttgtatatgagtactgaaagctcagaggacctccaagtaaaatcaaagaaggctataaaaaacattctccagaagtgtacctacctgcctgccctcgaacctttcctgtatgatgcccccccaaacatcctgaaacacgtggtggggcaattctcaaaagttttgcctcatgattcaaaggccagacggctgttcgtcacgagcggcggtctgaaaaaggtccaggaaataaaggccgaacccggctccttattgcaggagtacattaattcaataaactcatgttacccagaagagattgtaagatactattccccaggctattcggataccctgctgcagagggtggacagctaccagcccctgaataattag

SEQ ID NO: 88817 - DNA, 813 bp, Artificial Sequence
  derived and/or modified sequence
atgtcacagaggcaggtactccaagtgtttgaacagtaccagaaggctagaacccagtttgttcagatggtagcggaattggctaccaggccccagaacatagaaaccttgcagaacgcaggggtcatgagtctgctgaggactctgctgttggacgtcgtgcctaccattcaacagacggccgcactcgccttgggaagactggcaaactacaatgatgacttagctgaagcggtggtaaaatgtgacatcctcccacagttagtctattcactggctgaacagaacggagtcccccagctgtctgtctgcctctctgaagagcctgaggatcacatcaaagccgctgcagcctgggccctgggccagatcggcaggcacacgccagaacatgcccgagcagtggctgtaacaaacacactgccagttctgctgtctttgtatatgtcaaccgagagctcagaagacctgcaggtgaagtctaagaaggccattaagaacatcctgcagaagtgcacctatctacccgctctggagccatttctttacgacgctcctcccaatatcctgaagcatgtcgtggggcaatttagtaaagttcttccccatgatagcaaggccagacggctgtttgtcaccagcggtggcctgaaaaaggtgcaggagattaaggcagagcctggcagtctactgcaggagtatattaatagcataaatagttgttatcctgaggagattgtgcgttattactctcctggctacagtgataccctactgcagagagtggactcataccagccattaaataactag

SEQ ID NO: 88818 - DNA, 1455 bp, Artificial Sequence
  derived and/or modified sequence
atgcactcactcaccatggatctttggattccaaacgggcaggcgggtgtcatgtcccttctcaggacacttctgctggatgtggtccccactatacagcagaccgcagcacttgccctcggcaggctggcaaactataatgacgatctggccgaagctgtggtcaaatgcgatatactcccacagctagtgtactccctcgctgagcagaatcgattctacaaaaaggcagccgcttttgtgctgagagcagtcgggaagcatagcccacaactggctcaggctattgtcgactgtggggcactcgatacccttgtgatctgtctggaggattttgaccccggtgtcaaggaagctgccgcatgggccctaaggtacatagcaaggcataatgccgagctgtcacaggccgtcgtggacgcgggtgccgtcccactgttggttctgtgcatacaagagcctgagatcgcgctgaagcgtatcgcggcatcggcactgtcagatattgcaaaacattcacccgaactcgcgcaaacagtagttgatgcgggagcagtagcacatcttgcgcagatgattctcaacccggacgcgaaactgaagcatcaaatactctccgcactttcccaggtaagcaagcattcagtcgatctcgcagagatggtcgtggaagccgaaatcttcccagtagtactgacctgtctgaaagataaggacgagtacgtgaagaagaacgccagcactctgatcagggaaatagccaagcatacccccgagctgagtcagttagtggtcaatgcaggaggcgtggcagcagttatcgactgcataggctcttgcaaggggaacacccgccttcccggtattatgatgctaggttatgttgcagcgcactccgagaatctggccatggcagtcattatttcaaaaggagtacctcaactgagcgtttgcctgagcgaggagccagaagaccacatcaaagctgcagcggcatgggctctgggccagatcggtcgccacactcctgaacatgctagggctgtcgccgttacaaacacattgcccgtactgctttctctgtatatgtccacagagtcttccgaagatttgcaggtgaaatctaaaaaggctattaagaacatattgcagaagtgcacctacctaccagctctggaaccattcttatatgatgcacctcccaacatactaaagcacgtagtcggacaattcagtaaagttctgccccatgactcaaaagctaggcggctgttcgtcacttccggagggctcaagaaggtacaagagatcaaagccgagcccggatccctgcttcaagagtatatcaattctattaacagctgttacccagaggagatcgtgagatattactctcctggttactccgacacactcctgcaacgagtcgacagttatcaacctctgaacaactag

SEQ ID NO: 88819 - DNA, 1863 bp, Artificial Sequence
  derived and/or modified sequence
aggttgcccgggagacgcgggtacacagagaagcggctcccgtcggaggccgagtcgtcgccacgatcgcccccttggtggactcgcaggccgagcggcttccccgcagagctcgaggagggcagacggcggcgggggcgccatgagtcagaggcaggtgctgcaagtgttcgagcaataccagaaggccaggacccagttcgtgcagatggtggcggagctggcgactagaccccaaaacatcgagacgctgcagaacgcgggtgtaatgtctttgctgagaactcttcttctggacgtggtcccaacaattcaacagactgctgctttggctcttgggagactggccaattataatgatgacctagcagaagctgttgtgaagtgcgacattcttccacagcttgtttattcattggcagaacagaatggtgtaccccagttgtcagtctgcttgtcagaagaaccggaagatcatattaaggctgcagctgcttgggccttaggacagattggaagacacactcctgaacacgcacgggctgttgcagtcacaaatactttgccagttctgctttctttgtacatgtcaacagaaagttctgaggatctccaagtaaaaagtaaaaaagccataaagaatatcctgcaaaaatgtacctacttaccagcccttgaaccatttctatatgatgctcctcccaatattctgaaacatgtggttggacagttcagtaaggtgctgccgcatgatagcaaagctcgacgactttttgtaacaagtggtggccttaaaaaagttcaagagataaaagcagaacctggttctctccttcaagaatacatcaacagtattaacagttgttaccccgaggaaatagtgaggtattattcccctggatattcagatacacttctgcagagggtggacagctatcaaccacttaataactgagcaaagttatattgtgatactcaaattcacagcagagtagttttgagtaacagtaattaaatccttctaaatatttgaactaagtatattctagatttatttaatgggaaatacctttagataatattttctaaatttatgtaatactttaaacattcgtagcttgaatatgtgaggaactattcatggtcattcgcatgcataggatttgttctacaggtagattttaaaaacacgttaaagggccttaaggcattttgttattctgttaaaaaccacacacactcgtacatgcagacacctccaatgagatatagttaagagatggcattcaaaaaccctaaattattctagccaatttgtcataggcataggcaaggaaagctggccttgctaactatatagtagtatacacaagagaaatctttgaaggaggaaactgatgacagatatacagggcacttgaaggagactctgatgctagttatataagtgcattaacttaagacacggactctgtgggtaacctgttaggttttactaagaatttaggaaaaatttactcctctttatcacaagttttccaaacctccttccccaccctatctaaagtgttccttacctttcatgggcccagcgagggtagaattcagaatagagagttatactcctgcatacatgctctccctctcattgaaaggtttcttagtctagctctgctcatgaatgaacaaagaagcaggcatgtaaaatggatccttgtcctaacgtcactttcccaagtttcaaaagtcacattttcaggtatttaaggaatagtttgaagctaataccatcaggctcagagtttacatgcatttttacttaggaagtggtaaacgggtgaaagagggtttcaataaaatttt

SEQ ID NO: 88820 - DNA, 2112 bp, Artificial Sequence
  derived and/or modified sequence
aggttgcccgggagacgcgggtacacagagaagcggctcccgtcggaggccgagtcgtcgccacgatcgcccccttggtggactcgcaggccgagcggcttccccgcagagctcgaggagggcagacggcggcgggggcgccatgagtcagaggcaggtgctgcaagtgttcgagcaataccagaaggccaggacccagttcgtgcagatggtggcggagctggcgactagaccccaaaacatcgagacgctgcagaacgcggagtcttgctctgttgccaggctagagtgcagtggcatgatctcggctcactacaacctccgcctcccaggttcaagcgattctcctgcctcagcctcctgagtagctgagactacagatggagtctcattcactctgtcacccaggctggagtgcagtggcaccatccttgcccactgcagcctccacctccccggatcaagtgattctcctgcctcagtctcccaaagtgctgggattaaagaggccttgtttatcagatattgtggcaactattcagactgctttaatttgtgaactctaaatttccatgcattcactcaccatggatctctggatacctaatggacaggcaggtgtaatgtctttgctgagaactcttcttctggacgtggtcccaacaattcaacagactgctgctttggctcttgggagactggccaattataatgatgacctagcagaagctgttgtgaagtgcgacattcttccacagcttgtttattcattggcagaacagaatcgcttctacaagaaagcagctgcctttgtgttacgagcagttggtaaacattctccccagctagctcaggcaatagtcgattgtggagcactggatacgctggtcatatgcttggaagattttgaccctggagtcaaggaggctgcagcctgggcacttagatatattgcaagacataatgcagaactgtcacaagctgtggtggatgcaggagctgttcctcttttagtactctgtatccaggagccagaaattgctttgaaaaggattgctgcttcggccctcagtgatattgcaaagcattctccagagttagcacagacagtagtggatgcaggagctgttgctcatttagcccagatgatcctgaaccctgatgctaaattgaagcatcagatcctttcagctctcagtcaggtttcaaaacattccgtggatctggcagaaatggttgttgaagcagagatttttccagttgtacttacctgtctgaaggacaaggatgaatacgtgaagaaaaatgcttctactttaattagagagattgcaaaacatacacccgagctttcacagctggtagttaacgcaggaggggttgctgccgtgattgactgcattgggtcctgcaaagggaacacacggctgcctggcatcatgatgcttggttatgtagcagctcattctgagaacctagcaatggcagtcatcatttctaagggtgtaccccagttgtcagtctgcttgtcagaagaaccggaagatcatattaaggctgcagctgcttgggccttaggacagattggaagacacactcctgaacacgcacgggctgttgcagtcacaaatactttgccagttctgctttctttgtacatgtcaacagaaagttctgaggatctccaagtaaaaagtaaaaaagccataaagaatatcctgcaaaaatgtacctacttaccagcccttgaaccatttctatatgatgctcctcccaatattctgaaacatgtggttggacagttcagtaaggtgctgccgcatgatagcaaagctcgacgactttttgtaacaagtggtggccttaaaaaagttcaagagataaaagcagaacctggttctctccttcaagaatacatcaacagtattaacagttgttaccccgaggaaatagtgaggtattattcccctggatattcagatacacttctgcagagggtggacagctatcaaccacttaataactgagcaaagttatattgtgatactcaaattcacagcagagtagttttgagtaacagtaattaaatccttctaaatatttgaactaagt

SEQ ID NO: 88821 - protein, 683 aa, Artificial Sequence
  derived and/or modified sequence
MFSLSSTVQPQVTVPLSHLINAFHTPKNTSVSLSGVSVSQNQHRDVVPEHEAPSSEPSLNLRDLGLSELKIGQIDQLVENLLPGFCKGKNISSHWHTSHVSAQSFFENKYVFIQSRGFKTLKSRTRRLQSTSERLAETQNIAPSFVKGFLLRDRGSDVESLDKLMKTKNIPEAHQDAFKTGFAEGFLKAQALTQKTNDSLRRTRLILFVLLLFGIYGLLKNPFLSVRFRTTTGLDSAVDPVQMKNVTFEHVKGVEEAKQELQEVVEFLKNPQKFTILGGKLPKGILLVGPPGTGKTLLARAVAGEADVPFYYASGSEFDEMFVGVGASRIRNLFREAKANAPCVIFIDELDSVGGKRIESPMHPYSRQTINQLLAEMDGFKPNEGVIIIGATNFPEALDNALIRPGRFDMQVTVPRPDVKGRTEILKWYLNKIKFDQSVDPEIIARGTVGFSGAELENLVNQAALKAAVDGKEMVTMKELEFSKDKILMGPERRSVEIDNKNKTITAYHESGHAIIAYYTKDAMPINKATIMPRGPTLGHVSLLPENDRWNETRAQLLAQMDVSMGGRVAEELIFGTDHITTGASSDFDNATKIAKRMVTKFGMSEKLGVMTYSDTGKLSPETQSAIEQEIRILLRDSYERAKHILKTHAKEHKNLAEALLTYETLDAKEIQIVLEGKKLEVR

SEQ ID NO: 88822 - protein, 253 aa, Artificial Sequence
  derived and/or modified sequence
MFSLSSTVQPQVTVPLSHLINAFHTPKNTSVSLSGVSVSQNQHRDVVPEHEAPSSEPSLNLRDLGLSELKIGQIDQLVENLLPGFCKGKNISSHWHTSHVSAQSFFENKYVFIQSRGFKTLKSRTRRLQSTSERLAETQNIAPSFVKGFLLRDRGSDVESLDKLMKTKNIPEAHQDAFKTGFAEGFLKAQALTQKTNDSLRRTRLILFVLLLFGIYGLLKNPFLSVRFRTTTGLDSAVDPVQMKNVTFEHVKG

SEQ ID NO: 88823 - DNA, 2052 bp, Artificial Sequence
  derived and/or modified sequence
atgttcagcctgagcagcaccgtgcagccccaggtgaccgtgcccctgagccacctgatcaacgccttccacacccccaagaacaccagcgtgagcctgagcggcgtgagcgtgagccagaaccagcacagagacgtggtgcccgagcacgaggcccccagcagcgagcccagcctgaacctgagagacctgggcctgagcgagctgaagatcggccagatcgaccagctggtggagaacctgctgcccggcttctgcaagggcaagaacatcagcagccactggcacaccagccacgtgagcgcccagagcttcttcgagaacaagtacgtgttcatccagagcagaggcttcaagaccctgaagagcagaaccagaagactgcagagcaccagcgagagactggccgagacccagaacatcgcccccagcttcgtgaagggcttcctgctgagagacagaggcagcgacgtggagagcctggacaagctgatgaagaccaagaacatccccgaggcccaccaggacgccttcaagaccggcttcgccgagggcttcctgaaggcccaggccctgacccagaagaccaacgacagcctgagaagaaccagactgatcctgttcgtgctgctgctgttcggcatctacggcctgctgaagaaccccttcctgagcgtgagattcagaaccaccaccggcctggacagcgccgtggaccccgtgcagatgaagaacgtgaccttcgagcacgtgaagggcgtggaggaggccaagcaggagctgcaggaggtggtggagttcctgaagaacccccagaagttcaccatcctgggcggcaagctgcccaagggcatcctgctggtgggcccccccggcaccggcaagaccctgctggccagagccgtggccggcgaggccgacgtgcccttctactacgccagcggcagcgagttcgacgagatgttcgtgggcgtgggcgccagcagaatcagaaacctgttcagagaggccaaggccaacgccccctgcgtgatcttcatcgacgagctggacagcgtgggcggcaagagaatcgagagccccatgcacccctacagcagacagaccatcaaccagctgctggccgagatggacggcttcaagcccaacgagggcgtgatcatcatcggcgccaccaacttccccgaggccctggacaacgccctgatcagacccggcagattcgacatgcaggtgaccgtgcccagacccgacgtgaagggcagaaccgagatcctgaagtggtacctgaacaagatcaagttcgaccagagcgtggaccccgagatcatcgccagaggcaccgtgggcttcagcggcgccgagctggagaacctggtgaaccaggccgccctgaaggccgccgtggacggcaaggagatggtgaccatgaaggagctggagttcagcaaggacaagatcctgatgggccccgagagaagaagcgtggagatcgacaacaagaacaagaccatcaccgcctaccacgagagcggccacgccatcatcgcctactacaccaaggacgccatgcccatcaacaaggccaccatcatgcccagaggccccaccctgggccacgtgagcctgctgcccgagaacgacagatggaacgagaccagagcccagctgctggcccagatggacgtgagcatgggcggcagagtggccgaggagctgatcttcggcaccgaccacatcaccaccggcgccagcagcgacttcgacaacgccaccaagatcgccaagagaatggtgaccaagttcggcatgagcgagaagctgggcgtgatgacctacagcgacaccggcaagctgagccccgagacccagagcgccatcgagcaggagatcagaatcctgctgagagacagctacgagagagccaagcacatcctgaagacccacgccaaggagcacaagaacctggccgaggccctgctgacctacgagaccctggacgccaaggagatccagatcgtgctggagggcaagaagctggaggtgagatag

SEQ ID NO: 88824 - DNA, 762 bp, Artificial Sequence
  derived and/or modified sequence
atgttcagcctgagcagcaccgtgcagccccaggtgaccgtgcccctgagccacctgatcaacgccttccacacccccaagaacaccagcgtgagcctgagcggcgtgagcgtgagccagaaccagcacagagacgtggtgcccgagcacgaggcccccagcagcgagcccagcctgaacctgagagacctgggcctgagcgagctgaagatcggccagatcgaccagctggtggagaacctgctgcccggcttctgcaagggcaagaacatcagcagccactggcacaccagccacgtgagcgcccagagcttcttcgagaacaagtacgtgttcatccagagcagaggcttcaagaccctgaagagcagaaccagaagactgcagagcaccagcgagagactggccgagacccagaacatcgcccccagcttcgtgaagggcttcctgctgagagacagaggcagcgacgtggagagcctggacaagctgatgaagaccaagaacatccccgaggcccaccaggacgccttcaagaccggcttcgccgagggcttcctgaaggcccaggccctgacccagaagaccaacgacagcctgagaagaaccagactgatcctgttcgtgctgctgctgttcggcatctacggcctgctgaagaaccccttcctgagcgtgagattcagaaccaccaccggcctggacagcgccgtggaccccgtgcagatgaagaacgtgaccttcgagcacgtgaagggctag

SEQ ID NO: 88825 - DNA, 2052 bp, Artificial Sequence
  derived and/or modified sequence
atgttttcactttccagcactgtgcagcctcaggtgacagtgccactgtctcacttgatcaatgccttccacacacccaaaaacacatcagttagcctgtctggcgtctcagtgtcccagaatcaacacagagacgtggttcctgaacacgaagcgcctagcagcgagccatcactcaacctgagggacctgggccttagcgaactaaaaattggccaaattgatcagcttgttgagaacctgctcccgggtttttgcaaaggaaaaaatatcagttcccattggcacacatctcacgtcagcgcccagtccttctttgaaaacaagtacgtgtttattcaatcccggggcttcaaaaccctaaagtcaagaactcgacgcttgcaaagcacctcagagcgccttgccgaaactcagaacattgcaccatctttcgtgaagggctttttgctgcgggatcgtggttcagacgtagagtcactggacaaactgatgaagaccaaaaatatccctgaggcacaccaggatgcgtttaagacagggtttgccgagggctttctgaaggcacaggccttaacccagaaaaccaatgactctttaagacggacacgcctgatactttttgtgttgcttttgtttggtatctacgggctgttgaaaaatccttttttatccgtccggtttaggaccactaccggactcgattccgccgtggaccctgtgcagatgaagaacgtgacctttgagcacgtcaagggagtcgaggaggcgaaacaggagctgcaagaagtggttgaattcctgaagaacccacagaagttcacgatcttagggggcaaattgcctaaaggcattctgctggtcgggccccccggcacagggaaaaccctcctggctcgcgccgtagccggagaagccgacgtacccttctactatgctagtggaagcgagtttgacgaaatgtttgtgggcgtgggagccagccgcatccgtaacctgtttagggaggccaaagcaaacgctccttgcgtgatcttcattgatgaactggatagcgtgggcggcaaacgcattgagagtccaatgcacccatattcacgtcagaccataaaccaactgctggcagagatggacggctttaagcctaatgagggggtcattatcattggggcgacgaacttcccagaagcattggataatgctctgattcgaccagggcgctttgatatgcaggtgaccgtgccacggcctgatgtcaagggaagaaccgaaatcctcaaatggtatctgaataagataaaattcgatcaatcagtagacccggagatcatcgcccggggcaccgtgggattcagcggggcagagctagagaatctggtgaatcaggctgcgctgaaagccgctgtcgacggcaaggaaatggttacaatgaaagaactggagttcagtaaagataaaattctgatgggcccggaacggcgcagtgttgagatagacaacaagaacaaaacgatcaccgcgtaccacgagagtggacatgccatcatcgcgtactatacaaaggacgctatgcccatcaacaaggccacgattatgccccgaggtcccacacttgggcatgtctctcttctcccagaaaatgatcgctggaatgaaacaagggcccagctgctcgcacagatggacgtatccatgggggggcgagtggcagaggaattgatcttcggcaccgatcacatcacaaccggggctagctccgacttcgataacgctaccaaaatagctaaaaggatggtaaccaaattcggcatgagcgagaaactgggagtgatgacttactccgataccggaaaactgagtccagaaactcagagcgctattgagcaggagattagaatcctactcagagatagttacgagcgggcgaagcacatcctgaagactcacgccaaggaacacaagaatctggctgaagctcttctgacatacgaaaccctggacgcgaaggagatccaaatagttttagagggtaagaagctggaagtgcgctag

SEQ ID NO: 88826 - DNA, 762 bp, Artificial Sequence
  derived and/or modified sequence
atgttcagcttatccagtacggtccagccacaggttacggtgccgctctcccatctgattaatgctttccacacgcccaagaatacatctgtgtcactcagtggtgtttcagtgtcacaaaaccagcaccgggacgttgtccctgaacacgaagctccaagtagtgaaccatcactgaatctccgcgatctgggtttaagcgagctgaagatcgggcagatcgaccagcttgtcgagaatttgctccccggtttttgcaaaggaaaaaacatctcttcccactggcacacatcccacgtgagcgcccagagctttttcgagaataagtatgtgttcatccaatccagagggtttaagacccttaagtccagaactcggagacttcagagtacgtctgagagactagccgaaacccagaatatcgctccatctttcgtgaaggggttcctgctaagggatcgcgggtcagacgtggagagcttggataaactaatgaagacaaaaaatatacctgaagcccatcaagacgccttcaagactggttttgccgagggctttctaaaagcccaagccctgacacagaagactaacgattctctgcggagaacccgcctcattctattcgtcctcctgctgtttggcatctatggtctgctaaagaacccttttctttcagttaggttccgcaccaccaccggattggactctgctgtggatccagtccaaatgaagaacgtcacctttgaacatgtgaaggggtag

SEQ ID NO: 88827 - DNA, 2052 bp, Artificial Sequence
  derived and/or modified sequence
atgttcagcctgagcagcacagtgcagccccaggtgacagtgcccctgagccacctgatcaatgccttccacacccccaagaacacctctgtgtccctgagcggcgtgtctgtgtcccagaaccagcacagagatgtggtgcctgagcacgaggcccccagcagcgagcccagcctgaacctgcgggacctgggcctgtctgagctgaagattggccagattgaccagctggtggagaacctgctgcccggcttctgcaagggcaagaacatcagcagccactggcacaccagccacgtgtctgcccagagcttctttgagaacaagtatgtgttcatccagagccggggcttcaagaccctgaagagcaggacccggcggctgcagagcaccagcgagcggctggccgagacccagaacatcgcccccagctttgtgaagggcttcctgctgcgggaccggggcagtgatgtggagagcctggacaagctgatgaagaccaagaacatccctgaggcccaccaggatgccttcaagacaggctttgctgagggcttcctgaaggcccaggccctgacccagaagaccaatgacagcctgcggaggaccaggctcatcctgtttgtgctgctgctgtttggcatctacggcctgctgaagaaccccttcctgtctgtgcgcttccgcaccaccaccggcctggacagcgctgtggaccctgtgcagatgaagaatgtgacctttgagcacgtgaagggcgtggaggaggccaagcaggagctgcaggaggtggtggagttcctgaagaacccccagaagttcaccatcctgggcggcaagctgcccaagggcatcctgctggtgggccccccaggcaccgggaagaccctgctggcccgggctgtggccggggaggctgatgtgcccttctactatgccagcggcagcgagtttgatgagatgtttgtgggcgtgggcgccagccgcatccggaacctcttccgggaggccaaggccaatgccccctgtgtgatcttcattgatgagctggacagcgtgggcggcaagagaattgagagccccatgcacccctacagccggcagaccatcaaccagctgctggccgagatggatggcttcaagcccaatgaaggagtcatcatcattggagccaccaacttccctgaggccctggacaatgccctgatccggcccggccgctttgacatgcaggtgacagtgcccaggccagatgtgaagggccgcacagagatcctgaagtggtacctgaacaagatcaagtttgaccagagcgtggaccctgagatcatcgcccggggcaccgtgggcttcagcggggctgagctggagaacctggtgaaccaggccgccctgaaggctgctgtggatggcaaggagatggtgaccatgaaggagctggagttcagcaaggacaagatcctgatgggccctgagaggagatctgtggagattgacaacaagaacaagaccatcacagcctaccatgaaagtggccacgccatcatcgcctactacaccaaggatgccatgcccatcaacaaggccaccatcatgccccggggccccaccctgggccacgtgtccctgctgcctgaaaatgaccgctggaatgagacccgggcccagctgctggcccagatggatgtgtccatgggcggccgggtggccgaggagctgatctttggaacagaccacatcaccaccggggccagcagtgactttgacaatgccaccaagatcgccaagaggatggtgaccaagtttggcatgtctgagaagctgggcgtgatgacctacagcgacaccgggaagctgagccctgagacccagagcgccatcgagcaggagatccgcatcctgctgcgggacagctatgagcgggccaagcacatcctgaagacccacgccaaggagcacaagaacctggccgaggccctgctgacctatgagaccctggatgccaaggagatccagatcgtgctggagggcaagaagctggaggtgaggtag

SEQ ID NO: 88828 - DNA, 762 bp, Artificial Sequence
  derived and/or modified sequence
atgttcagcctgagcagcacagtgcagccccaggtgacagtgcccctgagccacctgatcaatgccttccacacccccaagaacacctctgtgtccctgagcggcgtgtctgtgtcccagaaccagcacagagatgtggtgcctgagcacgaggcccccagcagcgagcccagcctgaacctgcgggacctgggcctgtctgagctgaagattggccagattgaccagctggtggagaacctgctgcccggcttctgcaagggcaagaacatcagcagccactggcacaccagccacgtgtctgcccagagcttctttgagaacaagtatgtgttcatccagagccggggcttcaagaccctgaagagcaggacccggcggctgcagagcaccagcgagcggctggccgagacccagaacatcgcccccagctttgtgaagggcttcctgctgcgggaccggggcagtgatgtggagagcctggacaagctgatgaagaccaagaacatccctgaggcccaccaggatgccttcaagacaggctttgctgagggcttcctgaaggcccaggccctgacccagaagaccaatgacagcctgcggaggaccaggctcatcctgtttgtgctgctgctgtttggcatctacggcctgctgaagaaccccttcctgtctgtgcgcttccgcaccaccaccggcctggacagcgctgtggaccctgtgcagatgaagaatgtgacctttgagcacgtgaagggctag

SEQ ID NO: 88829 - DNA, 2052 bp, Artificial Sequence
  derived and/or modified sequence
atgttcagcctgagcagcaccgtgcagccccaggtgaccgtgcccctatctcacttaattaatgcttttcacacgcccaaaaatacctcggttagcttaagcggagtctctgttagtcagaaccagcatcgcgatgtggttcctgagcatgaagcacccagcagcgagccatctctgaatctgcgggaccttggactcagcgagctgaagatcgggcagattgatcaattggtggagaacctgctacctggattttgcaaaggaaaaaacatcagttcgcattggcacactagtcatgtgtctgcccagagcttctttgagaataaatatgtctttattcaaagcaggggttttaagaccttgaagtctcggacgcggcggctccagagcacgtccgagcgactggctgaaactcaaaatatcgcgcctagtttcgttaaggggtttctgttacgggatagaggaagtgacgttgaatctctcgacaaattgatgaaaaccaaaaacatccctgaggcgcaccaggacgcatttaaaactggttttgcagaaggcttcctaaaggcgcaggctctgactcagaagaccaacgactcattgcgaaggacacgactcatcctctttgttctgttactgttcggaatctatgggctgctgaagaatcccttcctctccgtgcggtttagaactacgactggactcgacagcgcagtcgatccagttcagatgaaaaatgttacttttgaacatgtgaagggggtggaagaagcaaagcaggagctgcaggaggtcgtggagtttctaaagaacccccagaaatttaccatcttgggtgggaaattgcccaagggcattctcctcgtggggcccccgggcaccgggaaaacattgcttgccagggccgtagctggcgaagctgatgtgcctttctattacgccagcgggagcgaattcgatgagatgtttgttggcgtcggcgcatctcggatccggaacctcttccgcgaagccaaggccaacgctccctgtgtcatatttatcgacgagcttgactctgtcggagggaagcggatcgagagtcccatgcacccgtatagtcggcaaactatcaatcagctcctggctgagatggatggcttcaagcctaatgaaggcgttataattatcggggcaacaaattttcctgaagccctcgacaacgcgctgatcagaccaggacggtttgacatgcaagtgactgttccaagacccgatgttaaaggtcgtaccgagatcctgaaatggtacctgaacaaaattaaattcgatcagagtgtggaccccgaaatcatcgctaggggcactgtgggcttcagcggcgccgagctagaaaatttggttaatcaagccgcacttaaggctgcggtggatggaaaagagatggttactatgaaggaactggagttcagcaaggacaagatactgatgggacccgaacgaagaagcgtggaaatcgacaacaagaacaaaaccattacagcatatcacgagagtgggcatgccattatcgcgtactatactaaagatgcgatgccaatcaataaggcgaccatcatgccccgaggccctacactgggccacgtgtccctgctccccgagaacgacaggtggaatgaaaccagagctcagttgctggcacagatggacgtgagcatgggcggacgagtagccgaagagctcatattcggaacagatcatattaccaccggcgcatccagtgattttgataatgcaacaaagatcgcaaaacgcatggttactaaatttggcatgtctgagaagctgggagtcatgacttactctgataccgggaaactctctccagaaacacaatccgctattgagcaagaaatcagaatacttctacgcgattcatatgaacgagccaagcacatattaaagacccacgcgaaggaacacaaaaacctggcagaagctcttctgacctatgagacactagacgctaaggagatccagatcgtactcgaaggcaaaaaactggaagttcgctag

SEQ ID NO: 88830 - DNA, 762 bp, Artificial Sequence
  derived and/or modified sequence
atgttcagcctgagcagcaccgtgcagccccaggtgaccgtgcccctttcacacctgatcaatgcttttcatacaccaaagaacacctcagttagcctgagcggggtgagcgtgtcccaaaaccagcaccgcgacgtggtcccagagcacgaagctccgtccagtgaaccaagccttaacctgcgcgacctgggactttcagagctgaaaatcggccagatcgatcagttggtggaaaatctgctccccgggttctgtaagggaaagaacatttcaagccattggcatacctcgcatgtgagtgcccaatccttcttcgagaacaaatacgtgtttattcagagtaggggctttaagactctcaaatctcggacacgtaggctgcagtccacttcagaacggctcgcagaaacccagaacatcgcgccgtcatttgtcaagggcttcctgttaagggacaggggctcggacgtagaatcgctggacaaactgatgaaaactaaaaatattccggaagctcatcaagacgccttcaagaccggtttcgcagaaggcttcctcaaagcccaggcacttactcagaaaacgaatgattccctcaggagaactaggctgatcctcttcgtcctgctgctctttggcatttacggactgctcaagaacccctttctaagtgtgcgcttcagaaccactactggcttggactccgctgtagatcctgtgcagatgaagaacgtgaccttcgagcatgtcaaaggctag

SEQ ID NO: 88831 - DNA, 2052 bp, Artificial Sequence
  derived and/or modified sequence
atgttttcactgtcaagcaccgtgcaacctcaggtaaccgtacctctatcacacctgatcaacgcttttcacacccctaagaacactagtgtttccctgtcgggggtttctgtgtcccagaaccagcatagggatgtagtcccggaacatgaagccccatcctctgagccctcccttaatctgcgcgatctggggctgtcagagttgaagatcggccagatcgaccagctcgtggagaatctgctgccgggtttctgcaaggggaagaacatctcatcacactggcacaccagccacgtgagcgcccagagcttttttgaaaataaatacgtgtttatacagtcccgtggatttaagacactcaagtcccggacacgcaggcttcaatccactagcgagaggctcgctgaaacccaaaatatcgctcctagctttgttaagggtttcctgctccgggatagaggaagcgacgtggagtcacttgataaactcatgaagacaaaaaatataccagaggcccatcaggatgccttcaaaacaggatttgctgagggattcctgaaggctcaagccctcactcagaagacaaatgacagtctgcgcagaaccagactgatcctgtttgtgctgctgctcttcggcatttacggtctgttgaagaacccctttttgtctgtccgtttccgaaccacaacaggcctggactcagctgtggatccagtacagatgaaaaacgtgactttcgaacatgtgaagggggtggaggaggcaaagcaggagctgcaggaggtggtggagtttctcaaaaacccacaaaagttcactatactggggggaaagttgcctaaaggcatcctgcttgtaggcccacctgggaccgggaagacccttcttgccagggctgtggcaggtgaagccgatgtgccattctactatgcttctggctccgagtttgatgagatgttcgtcggcgtgggcgcatcacggatacgcaatttgtttcgagaagccaaggcaaacgcaccttgcgtgattttcatagacgagctcgattccgtggggggaaaacggattgagagccccatgcacccctactcaagacaaacaatcaatcagctgctcgctgagatggacggattcaagccaaacgagggagtgataattatcggcgctacgaattttccagaagccctggataacgccctcattagacccggtagattcgacatgcaggttacagtgcctaggccggacgttaagggtcggactgagatactcaagtggtacctcaacaagatcaaattcgatcaatccgtcgaccctgagatcatagccaggggaactgtcggcttctcaggcgctgagctggaaaacctggtgaaccaagccgctctgaaggcagcggtggatgggaaggaaatggtgactatgaaggaactggaattctctaaggacaagatcctgatgggaccagaacgtcgctccgtggaaatagacaataaaaacaagactataacagcctaccacgagagtgggcacgccataattgcttattacaccaaggatgcaatgccaatcaataaggcaaccattatgccgagaggccctacattggggcacgtctcattactgccggagaatgatcggtggaatgaaacccgcgctcagcttctggcacagatggacgttagtatgggaggccgagtcgctgaagagctcatctttgggacagaccatatcacaacaggagcatcgtcagatttcgataatgctaccaagatcgccaagcggatggttactaagttcggaatgtccgaaaagctgggggtgatgacatactcagataccgggaaactctcaccagaaacccagtctgccatcgaacaggaaatccgaatccttctgcgcgactcctacgaacgtgccaagcatattctcaagacccacgccaaggaacacaagaacctcgccgaggcattgttaacatatgagacgctcgacgcaaaggagatacaaattgtgttggaggggaaaaagctcgaggtacgttag

SEQ ID NO: 88832 - DNA, 762 bp, Artificial Sequence
  derived and/or modified sequence
atgtttagcctttcgagcaccgtccagcctcaggtgaccgtgcccctgtcacacttaatcaacgccttccataccccgaaaaatacgtctgtgtcactttccggagtaagtgtatcacaaaatcaacatagagatgtagtgcccgaacacgaagcgccttcttctgaaccatcgttgaacctgagagatttgggactgtccgaattgaaaattgggcaaattgaccagctcgtcgaaaatctgctgccgggtttttgtaagggcaaaaatatttcctctcattggcatacatcacatgttagtgcccagtcgtttttcgaaaataaatacgtgttcattcagtctcggggattcaagacactaaaaagtcggactcggagacttcagtccacaagtgaacggctcgccgagacgcagaacatcgctccgtcatttgtgaaaggcttcctgcttagagatcggggatcagatgtagaaagcctggataaactgatgaaaacgaaaaacatccccgaagcgcaccaggacgcctttaaaactggattcgcagagggattcctgaaggcccaggccctgacacagaaaaccaacgacagcctccgtagaactagactgattctgttcgtgctgctcctgttcggcatctatggcctgctgaaaaatccatttctatctgtgagattcagaacgactaccgggttggattcggccgtagacccggtacaaatgaagaacgttacttttgagcacgtgaaggggtag

SEQ ID NO: 88833 - DNA, 2469 bp, Artificial Sequence
  derived and/or modified sequence
gtctgtcgttgcagtagctgtaggaaggggaggccattttccgtttctgggaggagtgaggggcaacgggtcggagaaaaaggaaaaaagaagggctcagcgcctccccgccgggccgtggacagaggggcacagtttcggcaggcgggtgaggtcgctgagggcccgccggagatgttttccttgtcgagcacggtgcaaccccaggttacagttcctctgagtcatctcatcaatgccttccatacaccaaaaaacacttctgtttctctcagtggagtgtcagtttctcaaaaccagcatcgagatgtagttcctgagcatgaggctcccagcagtgagccttcacttaacttaagggaccttggattatctgaactaaaaattggacagattgatcagctggtagaaaatctacttcctggattttgtaaaggcaaaaacatttcttcccattggcatacatcccatgtctctgcacaatccttctttgaaaataaatatgttttcatacagtctcggggttttaaaactttgaaatcaaggacacgacgtctccagtctacctccgagagattagctgaaacacagaatatagcgccatcattcgtgaaggggtttcttttgcgggacagaggatcagatgttgagagtttggacaaactcatgaaaaccaaaaatatacctgaagctcaccaagatgcatttaaaactggttttgcggaaggttttctgaaagctcaagcactcacacaaaaaaccaatgattccctaaggcgaacccgtctgattctcttcgttctgctgctattcggcatttatggacttctaaaaaacccatttttatctgtccgcttccggacaacaacagggcttgattctgcagtagatcctgtccagatgaaaaatgtcacctttgaacatgttaaaggggtggaggaagctaaacaagaattacaggaagttgttgaattcttgaaaaatccacaaaaatttactattcttggaggtaaacttccaaaaggaattcttttagttggacccccagggactggaaagacacttcttgcccgagctgtggcgggagaagctgatgttcctttttattatgcttctggatccgaatttgatgagatgtttgtgggtgtgggagccagccgtatcagaaatctttttagggaagcaaaggcgaatgctccttgtgttatatttattgatgaattagattctgttggtgggaagagaattgaatctccaatgcatccatattcaaggcagaccataaatcaacttcttgctgaaatggatggttttaaacccaatgaaggagttatcataataggagccacaaacttcccagaggcattagataatgccttaatacgtcctggtcgttttgacatgcaagttacagttccaaggccagatgtaaaaggtcgaacagaaattttgaaatggtatctcaataaaataaagtttgatcaatccgttgatccagaaattatagctcgaggtactgttggcttttccggagcagagttggagaatcttgtgaaccaggctgcattaaaagcagctgttgatggaaaagaaatggttaccatgaaggagctggagttttccaaagacaaaattctaatggggcctgaaagaagaagtgtggaaattgataacaaaaacaaaaccatcacagcatatcatgaatctggtcatgccattattgcatattacacaaaagatgcaatgcctatcaacaaagctacaatcatgccacgggggccaacacttggacatgtgtccctgttacctgagaatgacagatggaatgaaactagagcccagctgcttgcacaaatggatgttagtatgggaggaagagtggcagaggagcttatatttggaaccgaccatattacaacaggtgcttccagtgattttgataatgccactaaaatagcaaagcggatggttaccaaatttggaatgagtgaaaagcttggagttatgacctacagtgatacagggaaactaagtccagaaacccaatctgccatcgaacaagaaataagaatccttctaagggactcatatgaacgagcaaaacatatcttgaaaactcatgcaaaggagcataagaatctcgcagaagctttattgacctatgagactttggatgccaaagagattcaaattgttcttgaggggaaaaagttggaagtgagatgataactctcttgatatggatgcttgctggttttattgcaagaatacaagtagcattgcagtagtctacttttacaacgctttcccctcattcttgatgtggtgtaattgaagggtgtgaaatgctttgtcaatcatttgtcacatttatccagtttgggttattctcattatgacacctattgcaaattagcatcccatggcaaatatattttgaaaaaataaagaactatcaggattgaaaac

SEQ ID NO: 88834 - DNA, 775 bp, Artificial Sequence
  derived and/or modified sequence
tgagggcccgccggagatgttttccttgtcgagcacggtgcaaccccaggttacagttcctctgagtcatctcatcaatgccttccatacaccaaaaaacacttctgtttctctcagtggagtgtcagtttctcaaaaccagcatcgagatgtagttcctgagcatgaggctcccagcagtgagccttcacttaacttaagggaccttggattatctgaactaaaaattggacagattgatcagctggtagaaaatctacttcctggattttgtaaaggcaaaaacatttcttcccattggcatacatcccatgtctctgcacaatccttctttgaaaataaatatgttttcatacagtctcggggttttaaaactttgaaatcaaggacacgacgtctccagtctacctccgagagattagctgaaacacagaatatagcgccatcattcgtgaaggggtttcttttgcgggacagaggatcagatgttgagagtttggacaaactcatgaaaaccaaaaatatacctgaagctcaccaagatgcatttaaaactggttttgcggaaggttttctgaaagctcaagcactcacacaaaaaaccaatgattccctaaggcgaacccgtctgattctcttcgttctgctgctattcggcatttatggacttctaaaaaacccatttttatctgtccgcttccggacaacaacagggcttgattctgcagtagatcctgtccagatgaaaaatgtcacctttgaacatgttaaaggg

SEQ ID NO: 88835 - protein, 425 aa, Artificial Sequence
  derived and/or modified sequence
MVSKALLRLVSAVNRRRMKLLLGIALLAYVASVWGNFVNMSFLLNRSIQENGELKIESKIEEMVEPLREKIRDLEKSFTQKYPPVKFLSEKDRKRILITGGAGFVGSHLTDKLMMDGHEVTVVDNFFTGRKRNVEHWIGHENFELINHDVVEPLYIEVDQIYHLASPASPPNYMYNPIKTLKTNTIGTLNMLGLAKRVGARLLLASTSEVYGDPEVHPQSEDYWGHVNPIGPRACYDEGKRVAETMCYAYMKQEGVEVRVARIFNTFGPRMHMNDGRVVSNFILQALQGEPLTVYGSGSQTRAFQYVSDLVNGLVALMNSNVSSPVNLGNPEEHTILEFAQLIKNLVGSGSEIQFLSEAQDDPQKRKPDIKKAKLMLGWEPVVPLEEGLNKAIHYFRKELEYQANNQYIPKPKPARIKKGRTRHS

SEQ ID NO: 88836 - protein, 252 aa, Artificial Sequence
  derived and/or modified sequence
MYNPIKTLKTNTIGTLNMLGLAKRVGARLLLASTSEVYGDPEVHPQSEDYWGHVNPIGPRACYDEGKRVAETMCYAYMKQEGVEVRVARIFNTFGPRMHMNDGRVVSNFILQALQGEPLTVYGSGSQTRAFQYVSDLVNGLVALMNSNVSSPVNLGNPEEHTILEFAQLIKNLVGSGSEIQFLSEAQDDPQKRKPDIKKAKLMLGWEPVVPLEEGLNKAIHYFRKELEYQANNQYIPKPKPARIKKGRTRHS

SEQ ID NO: 88837 - protein, 134 aa, Artificial Sequence
  derived and/or modified sequence
MYNPIKTLKTNTIGTLNMLGLAKRVGARLLLASTSEVYGDPEVHPQSEDYWGHVNPIGPRACYDEGKRVAETMCYAYMKQEGVEVRVARIFNTFGPRMHMNDGRVVSNFILQALQGEPLTVYGSGSQTRAFQYV

SEQ ID NO: 88838 - protein, 52 aa, Artificial Sequence
  derived and/or modified sequence
MYNPIKTLKTNTIGTLNMLGLAKRVGARLLLASTSEVYGDPEVHPQSEDYWG

SEQ ID NO: 88839 - protein, 121 aa, Artificial Sequence
  derived and/or modified sequence
MYNPIKTLKTNTIGTLNMLGLAKRVGARLLLASTSEVYGDPEVHPQSEDYWGHVNPIGPRACYDEGKRVAETMCYAYMKQEGVEVRVARIFNTFGPRMHMNDGRVVSNFILQALQGEPLTV

SEQ ID NO: 88840 - protein, 363 aa, Artificial Sequence
  derived and/or modified sequence
MVEPLREKIRDLEKSFTQKYPPVKFLSEKDRKRILITGGAGFVGSHLTDKLMMDGHEVTVVDNFFTGRKRNVEHWIGHENFELINHDVVEPLYIEVDQIYHLASPASPPNYMYNPIKTLKTNTIGTLNMLGLAKRVGARLLLASTSEVYGDPEVHPQSEDYWGHVNPIGPRACYDEGKRVAETMCYAYMKQEGVEVRVARIFNTFGPRMHMNDGRVVSNFILQALQGEPLTVYGSGSQTRAFQYVSDLVNGLVALMNSNVSSPVNLGNPEEHTILEFAQLIKNLVGSGSEIQFLSEAQDDPQKRKPDIKKAKLMLGWEPVVPLEEGLNKAIHYFRKELEYQANNQYIPKPKPARIKKGRTRHS

SEQ ID NO: 88841 - DNA, 1278 bp, Artificial Sequence
  derived and/or modified sequence
atggtgagcaaggccctgctgagactggtgagcgccgtgaacagaagaagaatgaagctgctgctgggcatcgccctgctggcctacgtggccagcgtgtggggcaacttcgtgaacatgagcttcctgctgaacagaagcatccaggagaacggcgagctgaagatcgagagcaagatcgaggagatggtggagcccctgagagagaagatcagagacctggagaagagcttcacccagaagtacccccccgtgaagttcctgagcgagaaggacagaaagagaatcctgatcaccggcggcgccggcttcgtgggcagccacctgaccgacaagctgatgatggacggccacgaggtgaccgtggtggacaacttcttcaccggcagaaagagaaacgtggagcactggatcggccacgagaacttcgagctgatcaaccacgacgtggtggagcccctgtacatcgaggtggaccagatctaccacctggccagccccgccagcccccccaactacatgtacaaccccatcaagaccctgaagaccaacaccatcggcaccctgaacatgctgggcctggccaagagagtgggcgccagactgctgctggccagcaccagcgaggtgtacggcgaccccgaggtgcacccccagagcgaggactactggggccacgtgaaccccatcggccccagagcctgctacgacgagggcaagagagtggccgagaccatgtgctacgcctacatgaagcaggagggcgtggaggtgagagtggccagaatcttcaacaccttcggccccagaatgcacatgaacgacggcagagtggtgagcaacttcatcctgcaggccctgcagggcgagcccctgaccgtgtacggcagcggcagccagaccagagccttccagtacgtgagcgacctggtgaacggcctggtggccctgatgaacagcaacgtgagcagccccgtgaacctgggcaaccccgaggagcacaccatcctggagttcgcccagctgatcaagaacctggtgggcagcggcagcgagatccagttcctgagcgaggcccaggacgacccccagaagagaaagcccgacatcaagaaggccaagctgatgctgggctgggagcccgtggtgcccctggaggagggcctgaacaaggccatccactacttcagaaaggagctggagtaccaggccaacaaccagtacatccccaagcccaagcccgccagaatcaagaagggcagaaccagacacagctag

SEQ ID NO: 88842 - DNA, 1278 bp, Artificial Sequence
  derived and/or modified sequence
atggtgtcaaaggctctgctccggttagtttctgcagtcaatagaaggagaatgaagctgttactgggtattgccctgctcgcctatgtagccagtgtttggggcaatttcgtcaacatgtcatttctcctgaacagatccatccaggaaaatggagaactgaaaatcgaatctaaaatcgaagagatggtggaacccctgagggaaaagattcgcgacctggagaagtcctttacccagaagtatcccccagtgaagttcctctcagagaaagatcggaaaagaattttgatcacaggcggagccggatttgtaggcagtcacctgacagacaaattgatgatggacggccacgaggtcaccgtggtcgataactttttcacagggaggaaaaggaatgtagagcactggatcggacacgagaactttgaactgattaatcatgacgtcgtggagcctctgtatatcgaggtcgatcagatttaccatctcgcgagtccagccagtcccccaaattatatgtacaacccaattaaaacactcaaaactaacacaattggaacactgaacatgctgggtctggcaaaaagagtgggcgcgagattattgttagcttccacctccgaagtatacggcgaccctgaggtccacccgcagtccgaggattattggggacacgtgaacccaatcggaccaagagcatgttatgatgaagggaagcgtgttgccgaaaccatgtgctacgcctacatgaaacaggagggcgtggaggtacgggttgctagaattttcaacacctttggcccccgaatgcacatgaatgatggcagagtcgtctcgaactttattctgcaggctcttcaaggggagcctctgaccgtgtatgggtcagggtctcagacaagagcatttcagtacgtcagcgaccttgtgaatggactcgtggcattgatgaactccaacgtgtcttctcccgtgaaccttggcaatccagaggagcacaccatcctcgaatttgcacagctcattaaaaatctcgttggctcagggagcgaaatccagtttctctccgaagctcaagacgaccctcaaaaaaggaagccagatataaagaaggccaagctcatgttgggatgggaaccagtcgtgcctctggaagaaggactgaataaggctatccactatttcaggaaggagctggaataccaggcaaataatcaatatatcccaaagccaaagcctgccagaataaagaaagggagaaccaggcatagctag

SEQ ID NO: 88843 - DNA, 1278 bp, Artificial Sequence
  derived and/or modified sequence
atggtgtccaaggccctgctgcggctggtgtctgctgtgaacagaagaaggatgaagctgctgctgggcatcgccctgctggcctacgtggcctctgtgtggggcaactttgtgaacatgtccttcctgctgaacagaagcatccaggagaatggagagctgaagattgagagcaagattgaggagatggtggagcccctgcgggagaagatccgggacctggagaagagcttcacccagaagtacccacctgtgaagttcctgtctgagaaggacaggaagaggatcctgatcactggaggagctggctttgtgggcagccacctgacagacaagctgatgatggatggccacgaggtgacagtggtggacaacttcttcaccggcaggaagagaaatgtggagcactggattggacatgaaaattttgagctgatcaaccatgatgtggtggagcccctgtacatcgaggtggaccagatctaccacctggccagccctgccagcccccccaactacatgtacaaccccatcaagaccctgaagaccaacaccatcggcaccctgaacatgctgggcctggccaagagggtgggcgcccggctgctgctggccagcaccagcgaggtgtatggagaccctgaggtgcacccccagagcgaggactactggggccacgtgaaccccatcggcccccgggcctgctatgatgagggcaagagggtggccgagaccatgtgctacgcctacatgaagcaggagggcgtggaggtgcgggtggcccgcatcttcaacaccttcggccccaggatgcacatgaatgatggccgggtggtgagcaacttcatcctgcaggccctgcagggcgagcccctgactgtgtatggcagcggcagccagacccgggccttccagtatgtgtctgacctggtgaatggcctggtggccctgatgaacagcaatgtgagcagccctgtgaacctgggcaaccctgaggagcacaccatcctggagtttgcccagctgatcaagaacctggtgggcagcggcagcgagatccagttcctgtctgaggcccaggatgacccccagaagaggaagccagacatcaagaaggccaagctgatgctgggctgggagcctgtggtgcccctggaggagggcctgaacaaggccatccactacttcaggaaggagctggagtaccaggccaacaaccagtacatccccaagcccaagccagcccgcatcaagaagggccgcaccaggcacagctag

SEQ ID NO: 88844 - DNA, 1278 bp, Artificial Sequence
  derived and/or modified sequence
atggtgagcaaggccctgctgcggctggtgagcgccgtgaaccggcgcaggatgaagcttctgcttggaatcgccctccttgcctatgtggcctcagtttgggggaatttcgtcaatatgagctttctgcttaaccgtagcattcaggaaaacggagaactcaaaattgaaagcaaaatcgaagagatggtcgagcctctaagagaaaaaatccgcgatctagagaaatcttttacccagaaatacccacccgttaagttcttgagcgagaaggatcggaaacggattttgatcacaggcggggccggcttcgtcggctcccacttgacagacaagttgatgatggacggacacgaagtgacagtcgtggacaacttttttaccgggcgcaagaggaacgtcgagcactggattggacacgaaaacttcgaactcatcaatcatgatgttgtggaacctttgtatattgaggtagaccaaatataccacctcgctagccccgccagtccacccaactacatgtacaacccaatcaagaccctcaaaactaataccatcggtactctcaatatgcttgggctcgccaagagagtgggtgcgcgcctgttgcttgcctcgacaagcgaagtgtacggggacccggaagtgcacccccagtctgaagactactgggggcacgtgaatccgatcgggccccgggcatgttacgacgaagggaaaagagtggccgaaacaatgtgttacgcctacatgaaacaggaaggcgtggaagttagagttgcgcggatttttaacaccttcgggcctcgtatgcacatgaacgacggcagggtggtgtcaaactttattttgcaggccctacagggggagccactgacagtctatggaagtggcagtcagacacgcgcttttcagtacgtcagtgatcttgtcaacggcttagtggccttgatgaacagcaacgtgtcctcacccgtcaatctcggtaacccagaagagcatactattctggaattcgcccaattgatcaagaacctggttggatcaggctccgaaattcaatttctctccgaggctcaggacgacccccagaagcgcaaaccggacatcaaaaaagccaaactgatgctaggctgggaacctgtggtgccacttgaggaaggtctcaataaggcaattcactatttcaggaaagagctagaatatcaggctaacaaccagtacatcccgaagccaaaacctgctagaatcaaaaaaggtcgcacaagacactcttag

SEQ ID NO: 88845 - DNA, 1278 bp, Artificial Sequence
  derived and/or modified sequence
atggtcagcaaggctctgctgcggctagtgagcgcagtcaataggcgacggatgaaactcctcttaggtatagcacttttggcgtatgttgcgagcgtgtggggcaacttcgtgaatatgagcttcttgttgaatcgctccatacaggagaatggtgagctgaaaatcgagagcaagatcgaagaaatggttgagcccctgagagaaaaaattagagatctggaaaagtccttcactcagaagtacccgccagtcaagttcctctcagagaaggaccgcaaacggatcttaatcacaggaggcgctggattcgtcggatctcacttaaccgacaagctgatgatggacggacatgaggttacggtcgtagataacttttttaccggcagaaaaaggaacgtggaacactggattggacacgagaattttgaactgatcaatcatgacgtcgtggaacccctatacatcgaggtcgaccagatttaccacctagcttcccctgcctcacccccaaactacatgtacaaccccatcaaaacgctcaagaccaacacaatcgggacattgaatatgctgggcctggccaaacgggtgggggcacgcctgctcctcgcgtctaccagcgaggtgtacggtgatcccgaagtccatccccagtctgaagattactggggacacgtaaacccaataggcccaagagcttgttacgatgagggcaaacgagtggcagagactatgtgctatgcctatatgaaacaggaaggggtggaggttagggtggcccgaatctttaataccttcgggccacgcatgcatatgaacgatggcagagtcgtgagcaactttattctgcaggccttgcagggagaacctctaacggtctacggttcgggatcccagaccagagcatttcagtacgtctctgatctagtgaatgggctggtggccttgatgaatagcaatgtgagcagccccgtcaatctgggaaacccagaagagcataccatcctcgaattcgcccaactcattaaaaatctggtgggctcgggctctgagattcagttcctgagtgaggcccaggacgacccacagaaacgcaagcccgatataaagaaagccaaactgatgctcggatgggagcctgtggtacccctggaagaaggactcaataaggccatccattacttccggaaggagcttgagtatcaggcgaataaccagtacattccgaagcccaaaccagccaggattaagaagggacgtaccaggcattcctag

SEQ ID NO: 88846 - DNA, 2099 bp, Artificial Sequence
  derived and/or modified sequence
ggcggggctctcggggccgctgccgccgccgccgccgcgcattgtgcagcaggcgggcccccgcgcggtagggccctggacccgcgcggctcccggggatggtgagcaaggcgctgctgcgcctcgtgtctgccgtcaaccgcaggaggatgaagctgctgctgggcatcgccttgctggcctacgtcgcctctgtttggggcaacttcgttaatatgagctttctactcaacaggtctatccaggaaaatggtgaactaaaaattgaaagcaagattgaagagatggttgaaccactaagagagaaaatcagagatttagaaaaaagctttacccagaaatacccaccagtaaagtttttatcagaaaaggatcggaaaagaattttgataacaggaggcgcagggttcgtgggctcccatctaactgacaaactcatgatggacggccacgaggtgaccgtggtggacaatttcttcacgggcaggaagagaaacgtggagcactggatcggacatgagaacttcgagttgattaaccacgacgtggtggagcccctctacatcgaggttgaccagatataccatctggcatctccagcctcccctccaaactacatgtataatcctatcaagacattaaagaccaatacgattgggacattaaacatgttggggctggcaaaacgagtcggtgcccgtctgctcctggcctccacatcggaggtgtatggagatcctgaagtccaccctcaaagtgaggattactggggccacgtgaatccaataggacctcgggcctgctacgatgaaggcaaacgtgttgcagagaccatgtgctatgcctacatgaagcaggaaggcgtggaagtgcgagtggccagaatcttcaacacctttgggccacgcatgcacatgaacgatgggcgagtagtcagcaacttcatcctgcaggcgctccagggggagccactcacggtatacggatccgggtctcagacaagggcgttccagtacgtcagcgatctagtgaatggcctcgtggctctcatgaacagcaacgtcagcagcccggtcaacctggggaacccagaagaacacacaatcctagaatttgctcagttaattaaaaaccttgttggtagcggaagtgaaattcagtttctctccgaagcccaggatgacccacagaaaagaaaaccagacatcaaaaaagcaaagctgatgctggggtgggagcccgtggtcccgctggaggaaggtttaaacaaagcaattcactacttccgtaaagaactcgagtaccaggcaaataatcagtacatccccaaaccaaagcctgccagaataaagaaaggacggactcgccacagctgaactcctcacttttaggacacaagactaccattgtacacttgatgggatgtatttttggcttttttttgttgtcgtttaaagaaagactttaacaggtgtcatgaagaacaaactggaatttcattctgaagcttgctttaatgaaatggatgtgcctaaaagctcccctcaaaaaactgcagattttgccttgcactttttgaatctctctttttatgtaaaatagcgtagatgcatctctgcgtattttcaagtttttttatcttgctgtgagagcatatgttgtgactgtcgttgacagttttatttactggtttctttgtgaagctgaaaaggaacattaagcgggacaaaaaatgccgattttatttatgaaagtgggtacttaataaatgagtcgttatactatgcataaagaaaaatcctagcagtattgtcaggtggtggtgcgccggcattgattttagggcagataaaagaattctgtgtgagagctttatgtttctcttttaattcagagtttttccaaggtctacttttgagttgcaaacttgactttgaaatattcctgttggtcatgatcaaggatatttgaaatcactactgtgttttgctgcgtatctggggcgggggcaggttggggggcacaaagttaacatattcttggttaaccatggttaaatatgctattttaataaattattgaaactcaccagtcatgga

SEQ ID NO: 88847 - DNA, 759 bp, Artificial Sequence
  derived and/or modified sequence
atgtacaaccccatcaagaccctgaagaccaacaccatcggcaccctgaacatgctgggcctggccaagagagtgggcgccagactgctgctggccagcaccagcgaggtgtacggcgaccccgaggtgcacccccagagcgaggactactggggccacgtgaaccccatcggccccagagcctgctacgacgagggcaagagagtggccgagaccatgtgctacgcctacatgaagcaggagggcgtggaggtgagagtggccagaatcttcaacaccttcggccccagaatgcacatgaacgacggcagagtggtgagcaacttcatcctgcaggccctgcagggcgagcccctgaccgtgtacggcagcggcagccagaccagagccttccagtacgtgagcgacctggtgaacggcctggtggccctgatgaacagcaacgtgagcagccccgtgaacctgggcaaccccgaggagcacaccatcctggagttcgcccagctgatcaagaacctggtgggcagcggcagcgagatccagttcctgagcgaggcccaggacgacccccagaagagaaagcccgacatcaagaaggccaagctgatgctgggctgggagcccgtggtgcccctggaggagggcctgaacaaggccatccactacttcagaaaggagctggagtaccaggccaacaaccagtacatccccaagcccaagcccgccagaatcaagaagggcagaaccagacacagctag

SEQ ID NO: 88848 - DNA, 405 bp, Artificial Sequence
  derived and/or modified sequence
atgtacaaccccatcaagaccctgaagaccaacaccatcggcaccctgaacatgctgggcctggccaagagagtgggcgccagactgctgctggccagcaccagcgaggtgtacggcgaccccgaggtgcacccccagagcgaggactactggggccacgtgaaccccatcggccccagagcctgctacgacgagggcaagagagtggccgagaccatgtgctacgcctacatgaagcaggagggcgtggaggtgagagtggccagaatcttcaacaccttcggccccagaatgcacatgaacgacggcagagtggtgagcaacttcatcctgcaggccctgcagggcgagcccctgaccgtgtacggcagcggcagccagaccagagccttccagtacgtgtag

SEQ ID NO: 88849 - DNA, 558 bp, Artificial Sequence
  derived and/or modified sequence
atggtgagcaaggccctgctgagactggtgagcgccgtgaacagaagaagaatgaagctgctgctgggcatcgccctgctggcctacgtggcctggctggccaagagagtgggcgccagactgctgctggccagcaccagcgaggtgtacggcgaccccgaggtgcacccccagagcgaggactactggggccacgtgaaccccatcggccccagagcctgctacgacgagggcaagagagtggccgagaccatgtgctacgcctacatgaagcaggagggcgtggaggtgagagtggccagaatcttcaacaccttcggccccagaatgcacatgaacgacggcagagtggtgagcaacttcatcctgcaggccctgcagggcgagcccctgaccgtgtacggcagcggcagccagaccagagccttccagtacgtgagcgacctggtgaacggcctggtggccctgatgaacagcaacgtgagcagccccgtgaacctggtgagcgcccccctgccccccctgtgcagaaccgcccagaccttcgtgcacctgtag

SEQ ID NO: 88850 - DNA, 159 bp, Artificial Sequence
  derived and/or modified sequence
atgtacaaccccatcaagaccctgaagaccaacaccatcggcaccctgaacatgctgggcctggccaagagagtgggcgccagactgctgctggccagcaccagcgaggtgtacggcgaccccgaggtgcacccccagagcgaggactactggggctag

SEQ ID NO: 88851 - DNA, 366 bp, Artificial Sequence
  derived and/or modified sequence
atgtacaaccccatcaagaccctgaagaccaacaccatcggcaccctgaacatgctgggcctggccaagagagtgggcgccagactgctgctggccagcaccagcgaggtgtacggcgaccccgaggtgcacccccagagcgaggactactggggccacgtgaaccccatcggccccagagcctgctacgacgagggcaagagagtggccgagaccatgtgctacgcctacatgaagcaggagggcgtggaggtgagagtggccagaatcttcaacaccttcggccccagaatgcacatgaacgacggcagagtggtgagcaacttcatcctgcaggccctgcagggcgagcccctgaccgtgtag

SEQ ID NO: 88852 - DNA, 759 bp, Artificial Sequence
  derived and/or modified sequence
atgtacaaccctatcaagaccctgaagaccaacaccattgggacgctgaacatgctcggcctggccaaacgcgtgggggctaggttgctgctcgcttcgaccagcgaggtgtatggcgaccctgaggttcatccacagtcggaggattattggggccacgtgaacccaatcgggccgcgagcttgctacgacgagggtaaaagagtcgccgagacgatgtgttatgcttatatgaagcaggagggcgtagaagtcagggttgccagaatcttcaatacgtttggcccccggatgcatatgaatgacggccgggttgtaagtaatttcatactacaggccctccaaggagagccactcacggtgtatggctcggggagtcagacaagggcatttcagtacgtctcagatttggtgaatggcctagtagccttgatgaatagcaatgtgagcagcccggtgaaccttggcaacccagaggagcacaccatcctggagtttgctcaactgataaagaacctggtaggcagtggatcagaaatccagttcctgtctgaggcacaggatgatccacaaaaaagaaaaccagatattaaaaaggccaagttaatgctcggctgggagccggttgtgccccttgaggaggggctgaataaggccatccactacttcaggaaggagttggagtaccaagccaacaaccagtacatcccaaaacccaagcctgcaaggataaagaagggcaggacccgacactcatag

SEQ ID NO: 88853 - DNA, 405 bp, Artificial Sequence
  derived and/or modified sequence
atgtataaccctatcaagaccctgaagaccaatacaattggtacgttgaacatgctgggacttgcaaagcgggtcggagccaggcttctcctggcgtctacctctgaagtgtatggcgaccctgaagtgcatccacaatccgaagactattggggtcacgtgaaccctattggcccaagagcttgctacgatgaagggaagcgggtggcggaaactatgtgttacgcctacatgaaacaagaaggggtcgaggttcgggtggcccgcatctttaacaccttcggacctcggatgcacatgaacgacggcagagttgtttccaattttatactccaagctcttcagggcgaacccctgaccgtgtacggatcaggatctcagacccgggctttccaatatgtctag

SEQ ID NO: 88854 - DNA, 558 bp, Artificial Sequence
  derived and/or modified sequence
atggtcagcaaggctctccttcggttggtcagcgccgttaaccgtaggcgcatgaaactgctgcttggaatagctctgcttgcatatgtcgcctggctggccaaaagggtgggcgcacgcttgctcctggctagcacctctgaagtgtatggagatcctgaggttcatccacaatctgaggactattgggggcatgtgaatcctatcggaccccgcgcgtgttacgacgagggaaaacgggtagccgagactatgtgctacgcatacatgaagcaagaaggggtcgaggtacgcgtggcacggatattcaatactttcggccctcggatgcatatgaatgatggccgcgttgtatctaactttatccttcaggcactccagggagaacctcttactgtatatggatccggatcgcagaccagagcttttcagtatgtttccgaccttgtgaatggactagtcgctctgatgaattccaatgtgagcagccctgtcaacctggtatcggccccgctgccacccttgtgtcgaactgctcaaactttcgtccacctgtag

SEQ ID NO: 88855 - DNA, 159 bp, Artificial Sequence
  derived and/or modified sequence
atgtacaacccaattaaaacactcaagaccaacactattgggactttgaatatgttagggctggccaaacgagtcggggcccggctcctgttggccagcacatctgaggtgtatggagatccagaggtacacccccagtcggaggactactggggctag

SEQ ID NO: 88856 - DNA, 366 bp, Artificial Sequence
  derived and/or modified sequence
atgtacaaccccatcaaaaccttgaaaaccaacactatcggaacactgaatatgttgggtctggccaaaagagtgggggctagattgttactcgcaagtacctctgaagtgtatggggatccagaggtccatccccagtccgaggactactgggggcatgtcaatccaataggcccccgtgcgtgctatgacgaaggcaagcgtgtagctgagacaatgtgttacgcttatatgaaacaggaaggcgtagaggtccgggttgctcgaatctttaacaccttcggtccccgcatgcacatgaacgacggtcgggtggtgtcaaacttcatccttcaagccctccaaggagagcctctgaccgtctag

SEQ ID NO: 88857 - DNA, 759 bp, Artificial Sequence
  derived and/or modified sequence
atgtacaaccccatcaagaccctgaagaccaacaccatcggcaccctgaacatgctgggcctggccaagagggtgggcgcccggctgctgctggccagcaccagcgaggtgtatggagaccctgaggtgcacccccagagcgaggactactggggccacgtgaaccccatcggcccccgggcctgctatgatgagggcaagagggtggccgagaccatgtgctacgcctacatgaagcaggagggcgtggaggtgcgggtggcccgcatcttcaacaccttcggccccaggatgcacatgaatgatggccgggtggtgagcaacttcatcctgcaggccctgcagggcgagcccctgactgtgtatggcagcggcagccagacccgggccttccagtatgtgtctgacctggtgaatggcctggtggccctgatgaacagcaatgtgagcagccctgtgaacctgggcaaccctgaggagcacaccatcctggagtttgcccagctgatcaagaacctggtgggcagcggcagcgagatccagttcctgtctgaggcccaggatgacccccagaagaggaagccagacatcaagaaggccaagctgatgctgggctgggagcctgtggtgcccctggaggagggcctgaacaaggccatccactacttcaggaaggagctggagtaccaggccaacaaccagtacatccccaagcccaagccagcccgcatcaagaagggccgcaccaggcacagctag

SEQ ID NO: 88858 - DNA, 405 bp, Artificial Sequence
  derived and/or modified sequence
atgtacaaccccatcaagaccctgaagaccaacaccatcggcaccctgaacatgctgggcctggccaagagggtgggcgcccggctgctgctggccagcaccagcgaggtgtatggagaccctgaggtgcacccccagagcgaggactactggggccacgtgaaccccatcggcccccgggcctgctatgatgagggcaagagggtggccgagaccatgtgctacgcctacatgaagcaggagggcgtggaggtgcgggtggcccgcatcttcaacaccttcggccccaggatgcacatgaatgatggccgggtggtgagcaacttcatcctgcaggccctgcagggcgagcccctgactgtgtatggcagcggcagccagacccgggccttccagtatgtgtag

SEQ ID NO: 88859 - DNA, 558 bp, Artificial Sequence
  derived and/or modified sequence
atggtgtccaaggccctgctgcggctggtgtctgctgtgaacagaagaaggatgaagctgctgctgggcatcgccctgctggcctacgtggcctggctggccaagagggtgggcgcccggctgctgctggccagcaccagcgaggtgtatggagaccctgaggtgcacccccagagcgaggactactggggccacgtgaaccccatcggcccccgggcctgctatgatgagggcaagagggtggccgagaccatgtgctacgcctacatgaagcaggagggcgtggaggtgcgggtggcccgcatcttcaacaccttcggccccaggatgcacatgaatgatggccgggtggtgagcaacttcatcctgcaggccctgcagggcgagcccctgactgtgtatggcagcggcagccagacccgggccttccagtatgtgtctgacctggtgaatggcctggtggccctgatgaacagcaatgtgagcagccctgtgaacctggtgtctgcccccctgccccccctgtgcaggacagcccagacctttgtgcacctgtag

SEQ ID NO: 88860 - DNA, 159 bp, Artificial Sequence
  derived and/or modified sequence
atgtacaaccccatcaagaccctgaagaccaacaccatcggcaccctgaacatgctgggcctggccaagagggtgggcgcccggctgctgctggccagcaccagcgaggtgtatggagaccctgaggtgcacccccagagcgaggactactggggctag

SEQ ID NO: 88861 - DNA, 366 bp, Artificial Sequence
  derived and/or modified sequence
atgtacaaccccatcaagaccctgaagaccaacaccatcggcaccctgaacatgctgggcctggccaagagggtgggcgcccggctgctgctggccagcaccagcgaggtgtatggagaccctgaggtgcacccccagagcgaggactactggggccacgtgaaccccatcggcccccgggcctgctatgatgagggcaagagggtggccgagaccatgtgctacgcctacatgaagcaggagggcgtggaggtgcgggtggcccgcatcttcaacaccttcggccccaggatgcacatgaatgatggccgggtggtgagcaacttcatcctgcaggccctgcagggcgagcccctgactgtgtag

SEQ ID NO: 88862 - DNA, 759 bp, Artificial Sequence
  derived and/or modified sequence
atgtacaaccccatcaagaccctgaagaccaacaccatcggcaccctgaacatgctgggactggctaagagagtaggtgcacgcctactgctggcatccacgtccgaagtctacggggatcctgaggtccacccacaaagtgaggactattgggggcacgtgaatcccatcggccctcgagcctgctacgacgagggtaagagagttgcagagaccatgtgctatgcatatatgaagcaggagggggtcgaagtgcgcgtcgcacggatttttaacacatttggtccccgtatgcacatgaatgatggtcgagtcgtgagtaactttatcttgcaggccctccagggcgaaccactgacagtatacgggagcggttcccagacacgggcgttccaatacgtttctgaccttgttaacggccttgttgcactgatgaatagcaacgtgtcgtcccccgttaatctcggcaatccagaggaacatactatcttggagtttgcacagctaatcaaaaaccttgtgggttccggttccgagatccagtttctgagtgaagcccaggacgatccccagaaacgtaaaccagatatcaagaaggctaagctgatgctcggctgggaaccagtggtgccgctggaggagggcctcaataaggcgatccattactttcgaaaggagctggagtatcaggcgaacaaccagtatatccccaaacccaaacctgcgaggatcaagaaagggcggacgagacatagttag

SEQ ID NO: 88863 - DNA, 405 bp, Artificial Sequence
  derived and/or modified sequence
atgtacaaccccatcaagaccctgaagaccaacaccatcggcaccctcaatatgctcggactggccaagcgggtgggtgccagactcttgctggcatcaacaagtgaagtctatggggatccagaggtacacccccagtcagaggattactggggccatgtgaatccaataggccctagagcctgctatgatgagggtaagagggtcgcggaaaccatgtgctacgcctacatgaaacaagagggagtagaagttcgcgtggccaggatattcaacactttcggtcccaggatgcacatgaacgacgggagagtcgtatcaaatttcattcttcaagccttgcaaggggaacccttgacagtgtacggtagcggatcccagacgagagccttccaatacgtgtag

SEQ ID NO: 88864 - DNA, 558 bp, Artificial Sequence
  derived and/or modified sequence
atggtgagcaaggccctgctgcggctggtgagcgccgtgaaccggcgaagaatgaaactcttgctgggcattgctctcctcgcttacgttgcatggcttgcaaagcgggtgggagcacgacttctgctggcaagcacctctgaggtgtacggggatccagaagtgcacccacagtcagaagattattggggacatgttaatccgatcggacctagggcttgttacgatgagggaaaacgggtggctgagactatgtgctacgcatacatgaaacaagagggcgtggaggtgagggttgctcggatattcaatacgtttggacctagaatgcacatgaacgatggtagggttgtatcaaattttattctgcaggccctgcaaggtgagccactgaccgtttacgggtctggcagtcagacacgcgcttttcagtatgtgtcagacctggtcaacggactggtagctctgatgaactcaaacgtctcaagccctgtgaacctggtgtccgcgccactgcctccactatgcagaacggctcagacatttgtacatctgtag

SEQ ID NO: 88865 - DNA, 159 bp, Artificial Sequence
  derived and/or modified sequence
atgtacaaccccatcaagaccctgaagaccaacaccatcggcaccctgaacatgttgggcctggccaagcgcgtgggagctcgcctgctgctagcctccacctctgaagtgtatggcgatccagaagtgcacccacagtcggaagattactggggttag

SEQ ID NO: 88866 - DNA, 366 bp, Artificial Sequence
  derived and/or modified sequence
atgtacaaccccatcaagaccctgaagaccaacaccatcggcaccctgaacatgctaggcctggcaaaacgagtaggtgccaggctgctgctggcaagcacatccgaggtgtatggagatcctgaagtgcaccctcaatccgaagactattggggtcacgtcaatccgataggacccagagcctgttatgacgaaggcaaacgggtggcggagactatgtgttacgcctatatgaagcaagaaggggtcgaagtcagggtcgctcgcatcttcaataccttcggccctagaatgcatatgaatgatggccgggttgtctctaatttcattttgcaggcccttcaaggagagcccctgacagtatag

SEQ ID NO: 88867 - DNA, 759 bp, Artificial Sequence
  derived and/or modified sequence
atgtataaccctatcaaaacactgaagacaaatactattggaacactaaatatgctcgggctggccaagcgggtgggtgctcggctgcttctcgcatccactagcgaagtgtatggagaccctgaggtacacccacagtctgaggattactggggacacgttaaccctatcgggccacgagcatgttacgacgaggggaagagagtggccgaaacaatgtgctatgcctatatgaaacaggagggtgttgaagttcgcgtggccagaatcttcaataccttcggacccaggatgcatatgaacgacggacgtgtggtgagcaatttcatactccaggctctacaaggcgaaccgttgactgtttatggatcagggagtcagacgagggctttccagtatgttagtgacctggtcaacggccttgtcgctctcatgaattcaaatgtttccagcccagtcaacctaggcaaccccgaggagcacactatcttggaatttgctcaacttatcaagaatctggtgggttcaggctcagagatacagttcctcagtgaggctcaggacgacccccagaagcggaaacccgatattaaaaaggccaagctgatgctgggttgggagcccgtcgtccctctggaggaaggtctgaataaagctattcactacttcaggaaggagctcgagtaccaggccaataatcaatatatccctaaaccaaagcctgcaagaattaagaagggaagaactaggcatagctag

SEQ ID NO: 88868 - DNA, 405 bp, Artificial Sequence
  derived and/or modified sequence
atgtacaaccctatcaagacactgaaaactaacaccattgggacgctcaacatgttgggcttggcaaagagagtgggagccagactcctgttagccagtacatccgaagtgtatggtgaccccgaagttcacccacagagcgaagattactggggacatgtcaaccctattggaccacgtgcctgttatgacgaggggaagcgcgtggccgagaccatgtgctatgcctatatgaagcaggaaggcgttgaagtccgagtcgcccgtattttcaacaccttcggccctaggatgcatatgaacgacggacgggtggttagtaactttatcctgcaggctctgcagggagagcccctgaccgtgtatggctctggtagtcagacacgagcattccaatacgtttag

SEQ ID NO: 88869 - DNA, 558 bp, Artificial Sequence
  derived and/or modified sequence
atggtgtccaaggcactgctcagactggtgtctgctgtaaatcggaggcggatgaagctgctcctcggaatcgctctgctcgcttacgtggcatggctggcaaagcgcgtcggcgcacgactgctgctcgcgagcacaagcgaagtttacggcgaccccgaggtacatccccagtctgaggactactggggccatgtaaatcccattggccctagggcctgctacgacgagggtaaaagagtcgcggaaaccatgtgctacgcctacatgaaacaggagggcgtggaggtcagggtggccagaatctttaacacatttggaccacgcatgcacatgaatgacggacgagtcgttagtaatttcatcctccaggccctacaaggagaacccttaaccgtgtatggcagcggctcccaaacacgtgccttccaatacgtgtcagatctggtcaacgggctagtggcattgatgaactctaacgtgtcgtcaccagtgaacttggtcagtgcacccctgccacctttgtgccggacggcccagaccttcgttcatctttag

SEQ ID NO: 88870 - DNA, 159 bp, Artificial Sequence
  derived and/or modified sequence
atgtacaatccaatcaagacgttgaagaccaatactataggaaccttgaacatgctgggcttggccaagagggtgggcgctcggctcctgctcgcatcaacatccgaggtgtacggagatccggaggtgcacccccagtcagaggattattggggttag

SEQ ID NO: 88871 - DNA, 366 bp, Artificial Sequence
  derived and/or modified sequence
atgtataaccctatcaagactctgaagactaacaccatcggcaccctcaatatgttgggcctcgcgaagagagtgggtgcacgacttcttctcgcatcgactagcgaggtatacggggatcctgaggtacaccctcagtcagaggattactggggccatgtcaaccccatcggaccaagggcctgttacgatgaaggtaagagagtcgccgaaacaatgtgctacgcgtatatgaaacaggagggcgtggaggtacgggttgccaggatttttaatacattcggcccacggatgcacatgaatgatgggcgagtagtaagtaattttatactccaggccttgcagggagagccactgactgtgtag

SEQ ID NO: 88872 - DNA, 966 bp, Artificial Sequence
  derived and/or modified sequence
attgtgcagcaggcgggcccccgcgcggtagggccctggacccgcgcggctcccggggatggtgagcaaggcgctgctgcgcctcgtgtctgccgtcaaccgcaggaggatgaagctgctgctgggcatcgccttgctggcctacgtcgcctggctggcaaaacgagtcggtgcccgtctgctcctggcctccacatcggaggtgtatggagatcctgaagtccaccctcaaagtgaggattactggggccacgtgaatccaataggacctcgggcctgctacgatgaaggcaaacgtgttgcagagaccatgtgctatgcctacatgaagcaggaaggcgtggaagtgcgagtggccagaatcttcaacacctttgggccacgcatgcacatgaacgatgggcgagtagtcagcaacttcatcctgcaggcgctccagggggagccactcacggtatacggatccgggtctcagacaagggcgttccagtacgtcagcgatctagtgaatggcctcgtggctctcatgaacagcaacgtcagcagcccggtcaacctggtgagtgctcctctccctccactctgcaggacagctcagactttcgttcatttgtgaaaccatgagcagcaccaggctttgcttcatttgccatcggcacacttaggacatttgtgtttgttgcttgctaaatactagaggaaaaacaaacaaacacaaagtaagagtatacaaagaagtaaaacatctgcaaggcacgggtgagtgatgtaatcagtccctccaccttctgaagggcctgggtctaagattgtgtgaagccttttggtggtagtaggtggacgtgtgtgtgcatctcgttctctatttaacaggcgggtcatcattataaggcctgattgcatttttagaagatggaggttgttcagagggaaaattttccggttgctgatgatgtctgtcattta

SEQ ID NO: 88873 - protein, 1166 aa, Artificial Sequence
  derived and/or modified sequence
MCRKRTRARTSAAEASLRASILARDCAAAAAIVFLVDRFLYGLDVSGKLLQVAKGLHKLQPATPIAPQVVIRQARISVNSGKLLKAEYILSSLISNNGATGTWLYRNESDKVLVQSVCIQIRGQILQKLGMWYEAAELIWASIVGYLALPQPDKKGLSTSLGILADIFVSMSKNDYEKFKNNPQINLSLLKEFDHHLLSAAEACKLAAAFSAYTPLFVLTAVNIRGTCLLSYSSSNDCPPELKNLHLCEAKEAFEIGLLTKRDDEPVTGKQELHSFVKAAFGLTTVHRRLHGETGTVHAASQLCKEAMGKLYNFSTSSRSQDREALSQEVMSVIAQVKEHLQVQSFSNVDDRSYVPESFECRLDKLILHGQGDFQKILDTYSQHHTSVCEVFESDCGNNKNEQKDAKTGVCITALKTEIKNIDTVSTTQEKPHCQRDTGISSSLMGKNVQRELRRGGRRNWTHSDAFRVSLDQDVETETEPSDYSNGEGAVFNKSLSGSQTSSAWSNLSGFSSSASWEEVNYHVDDRSARKEPGKEHLVDTQCSTALSEELENDREGRAMHSLHSQLHDLSLQEPNNDNLEPSQNQPQQQMPLTPFSPHNTPGIFLAPGAGLLEGAPEGIQEVRNMGPRNTSAHSRPSYRSASWSSDSGRPKNMGTHPSVQKEEAFEIIVEFPETNCDVKDRQGKEQGEEISERGAGPTFKASPSWVDPEGETAESTEDAPLDFHRVLHNSLGNISMLPCSSFTPNWPVQNPDSRKSGGPVAEQGIDPDASTVDEEGQLLDSMDVPCTNGHGSHRLCILRQPPGQRAETPNSSVSGNILFPVLSEDCTTTEEGNQPGNMLNCSQNSSSSSVWWLKSPAFSSGSSEGDSPWSYLNSSGSSWVSLPGKMRKEILEARTLQPDDFEKLLAGVRHDWLFQRLENTGVFKPSQLHRAHSALLLKYSKKSELWTAQETIVYLGDYLTVKKKGRQRNAFWVHHLHQEEILGRYVGKDYKEQKGLWHHFTDVERQMTAQHYVTEFNKRLYEQNIPTQIFYIPSTILLILEDKTIKGCISVEPYILGEFVKLSNNTKVVKTEYKATEYGLAYGHFSYEFSNHRDVVVDLQGWVTGNGKGLIYLTDPQIHSVDQKVFTTNFGKRGIFYFFNNQHVECNEICHRLSLTRPSMEKPCT

SEQ ID NO: 88874 - protein, 345 aa, Artificial Sequence
  derived and/or modified sequence
MKTLIAAYSGVLRGERQAEADRSQRSHGGPALSREGSGRWGVACSAILMYIFCTDCWLIAVLYFTWLVFDWNTPKKGGRRSQWVRNWAVWRYFRDYFPIQLVKTHNLLTTRNYIFGYHPHGIMGLGAFCNFSTEATEVSKKFPGIRPYLATLAGNFRMPVLREYLMSGGICPVSRDTIDYLLSKNGSGNAIIIVVGGAAESLSSMPGKNAVTLRNRKGFVKLALRHGADLVPIYSFGENEVYKQVIFEEGSWGRWVQKKFQKYIGFAPCIFHGRGLFSSDTWGLVPYSKPITTVVGEPITIPKLEHPTQQDIDLYHTMYMEALVKLFDKHKTKFGLPETEVLEVN

SEQ ID NO: 88875 - DNA, 1038 bp, Artificial Sequence
  derived and/or modified sequence
atgaaaaccttaatcgcggcatatagcggcgtcctgaggggtgaaagacaagcagaagcagatcgctcccagcgatcccatgggggtcccgcactttcccgggaagggagtggtagatggggtgtggcctgttcagctatcctgatgtacatcttctgtacagactgctggctgatagccgtgttatacttcacctggctcgtctttgattggaatacgcccaaaaaagggggtcgccgttctcagtgggtacgcaattgggctgtctggcggtactttcgggactattttccaatacagctggtgaaaactcataatctgctgacaacgcgcaactacatctttggctatcacccacacggtatcatgggcctgggggctttctgtaactttagcactgaggcgactgaagtcagtaagaaattccccggtattcgcccatacctggctactcttgccggcaatttcagaatgcctgtgctgcgggaatacttgatgagcggaggcatctgcccagtaagtagggataccattgactacctgctgtccaagaacggcagcggcaatgcaattataatcgtggtgggcggggccgccgaaagcttgtctagcatgcctggtaaaaacgcggtgacgctgaggaatcgcaaggggtttgtcaagctggctctccgacatggagccgatctggtgccgatctattcttttggcgagaacgaagtgtataaacaggtcatttttgaggaaggcagctggggccgttgggtccagaagaaattccaaaaatatattggatttgccccctgcatatttcacggccgggggctattctctagcgatacatgggggctcgtgccttatagcaaaccaattaccactgtggtcggagagcctataaccattccaaaactggagcaccctactcagcaggatattgatttatatcacactatgtacatggaggccctggttaaactgttcgataagcacaagaccaagttcggcctcccagagaccgaagtgttggaagtgaactag

SEQ ID NO: 88876 - DNA, 1038 bp, Artificial Sequence
  derived and/or modified sequence
atgaagaccctgattgctgcctacagcggcgtgctgcggggggagcggcaggccgaggccgacaggagccagaggagccatggaggccctgccctgagccgggagggcagcggccgctggggcgtggcctgcagcgccatcctgatgtacatcttctgcacagactgctggctgattgctgtgctgtacttcacctggctggtgtttgactggaacacccccaagaagggcggcagaagaagccagtgggtgaggaactgggccgtgtggagatacttccgggactacttccccatccagctggtgaagacccacaacctgctgaccaccaggaactacatcttcggctaccacccccacggcatcatgggcctgggcgccttctgcaacttcagcacagaggccacagaggtgtccaagaagtttcctggcatccggccctacctggccaccctggccggcaacttcaggatgcctgtgctgcgggagtacctgatgtctgggggcatctgccctgtgtcccgggacaccatcgactacctgctgagcaagaatggaagtggaaatgccatcatcatcgtggtgggcggcgctgctgagagcctgagctccatgcctgggaagaatgctgtgaccctgaggaacagaaaaggatttgtgaagctggccctgcggcacggggctgacctggtgcccatctacagctttggagaaaatgaggtgtacaagcaggtgatctttgaggagggctcctggggccgctgggtgcagaagaagttccagaagtacatcggctttgccccctgcatcttccacggccggggcctcttcagcagtgacacctggggcctggtgccctacagcaagcccatcaccaccgtggtgggggagcccatcaccatccccaagctggagcaccccacccagcaggacatcgacctgtaccacaccatgtacatggaggccctggtgaagctgtttgacaagcacaagaccaagtttggcctgcctgagacagaggtgctggaggtgaactag

SEQ ID NO: 88877 - DNA, 1038 bp, Artificial Sequence
  derived and/or modified sequence
atgaagaccctgatcgccgcctacagcggcgtgctgcggggcgagcgacaggccgaggccgatcgctctcaaaggtcccatggaggtcccgcactaagccgggagggatccggccgttggggcgtggcatgctccgctatccttatgtatatcttttgcactgattgctggctcattgccgtgctgtatttcacctggctcgtgttcgattggaatacgcccaaaaaaggtggaagaagatcccaatgggtgcgcaactgggccgtatggcgctactttagagactattttccgatacagctcgttaagactcataacctcctaacgacacggaattatatctttggttaccatccacacggaattatgggactgggtgcattttgcaatttcagcacagaagcaacagaagtgagtaagaaattccccggcattagaccctatctagctacgctcgctgggaactttaggatgccggtgttacgggagtatctgatgagcggcggcatttgtccagtgagccgcgacaccattgattatcttctttcgaagaacggatctggaaatgcaattattattgtagttggcggtgccgctgagagtctctcatcaatgccaggcaagaacgccgtgactctgcgaaatagaaaagggttcgtcaaactcgcgctgagacacggtgcagacttggtccccatctattcttttggcgaaaatgaggtgtacaaacaggtgatctttgaggagggttcctgggggaggtgggtgcaaaagaagttccagaaatacatcggtttcgcgccatgcatatttcacggaagaggattgttctcatctgacacgtggggtcttgtgccttattctaaacccattacaacagtagtaggtgaacccattaccatccctaagcttgagcaccctactcaacaggacattgacttgtatcacactatgtatatggaggcactggtcaaactatttgacaaacacaagacaaaattcggtctgcccgaaactgaggtacttgaagtaaactag

SEQ ID NO: 88878 - DNA, 1038 bp, Artificial Sequence
  derived and/or modified sequence
atgaagaccctgatcgctgcctacagcggcgtcctccgtggtgagcgtcaggcagaggcagacaggtcacagaggtcacacgggggacccgctttgagtagagaagggtcgggcagatggggagtggcctgtagcgctatattgatgtatatcttttgcacagactgctggctgatcgcagttctgtatttcacatggctggtgtttgactggaatacccccaagaagggcggacgcagaagccagtgggtgaggaactgggctgtgtggagatacttcagagattacttccctatccagctggtcaagacccataatcttttaacgactcggaactacatcttcggctaccatccacatggtatcatgggcttgggagcattctgcaatttctctacagaggcgaccgaagtttccaaaaagttcccagggatcaggccttacctggccaccctcgctggtaacttcagaatgcctgtgctacgggagtatctcatgtccggcggaatctgcccagtctcaagggataccatcgactacctgctgtccaagaacggatccggcaatgctatcattattgtggtgggtggcgctgctgaatccctgtccagcatgcctgggaagaacgccgtgactctccgtaaccgcaaggggttcgtaaaattagcgctcaggcatggtgcagacctggtgccaatctattctttcggtgagaacgaagtgtataaacaggtgatattcgaggagggatcatggggcaggtgggtacagaagaaattccagaaatatatcggcttcgctccttgcatcttccatgggagagggcttttttcttccgacacttgggggctggtaccttactccaagcccattactaccgtcgtaggtgagcccattacaatacctaaattggagcatccaactcagcaggatatcgatctctaccacacaatgtacatggaagctttagtgaagctgttcgataagcacaaaacaaaattcggcctgcccgagactgaggtgctcgaggttaactag

SEQ ID NO: 88879 - DNA, 1038 bp, Artificial Sequence
  derived and/or modified sequence
atgaagaccctgatcgccgcctacagcggcgtgctgagaggcgagagacaggccgaggccgacagaagccagagaagccacggcggccccgccctgagcagagagggcagcggcagatggggcgtggcctgcagcgccatcctgatgtacatcttctgcaccgactgctggctgatcgccgtgctgtacttcacctggctggtgttcgactggaacacccccaagaagggcggcagaagaagccagtgggtgagaaactgggccgtgtggagatacttcagagactacttccccatccagctggtgaagacccacaacctgctgaccaccagaaactacatcttcggctaccacccccacggcatcatgggcctgggcgccttctgcaacttcagcaccgaggccaccgaggtgagcaagaagttccccggcatcagaccctacctggccaccctggccggcaacttcagaatgcccgtgctgagagagtacctgatgagcggcggcatctgccccgtgagcagagacaccatcgactacctgctgagcaagaacggcagcggcaacgccatcatcatcgtggtgggcggcgccgccgagagcctgagcagcatgcccggcaagaacgccgtgaccctgagaaacagaaagggcttcgtgaagctggccctgagacacggcgccgacctggtgcccatctacagcttcggcgagaacgaggtgtacaagcaggtgatcttcgaggagggcagctggggcagatgggtgcagaagaagttccagaagtacatcggcttcgccccctgcatcttccacggcagaggcctgttcagcagcgacacctggggcctggtgccctacagcaagcccatcaccaccgtggtgggcgagcccatcaccatccccaagctggagcaccccacccagcaggacatcgacctgtaccacaccatgtacatggaggccctggtgaagctgttcgacaagcacaagaccaagttcggcctgcccgagaccgaggtgctggaggtgaactag

SEQ ID NO: 88880 - DNA, 2202 bp, Artificial Sequence
  derived and/or modified sequence
gtcctagccgcccagcctcgacgccgtcccgggacccctgtgctctgcgcgaagccctggccccgggggccggggcatgggccaggggcgcggggtgaagcggcttcccgcggggccgtgactgggcgggcttcagccatgaagaccctcatagccgcctactccggggtcctgcgcggcgagcgtcaggccgaggctgaccggagccagcgctctcacggaggacctgcgctgtcgcgcgaggggtctgggagatggggagtggcctgcagtgccatcctcatgtacatattctgcactgattgctggctcatcgctgtgctctacttcacttggctggtgtttgactggaacacacccaagaaaggtggcaggaggtcacagtgggtccgaaactgggctgtgtggcgctactttcgagactactttcccatccagctggtgaagacacacaacctgctgaccaccaggaactatatctttggataccacccccatggtatcatgggcctgggtgccttctgcaacttcagcacagaggccacagaagtgagcaagaagttcccaggcatacggccttacctggctacactggcaggcaacttccgaatgcctgtgttgagggagtacctgatgtctggaggtatctgccctgtcagccgggacaccatagactatttgctttcaaagaatgggagtggcaatgctatcatcatcgtggtcgggggtgcggctgagtctctgagctccatgcctggcaagaatgcagtcaccctgcggaaccgcaagggctttgtgaaactggccctgcgtcatggagctgacctggttcccatctactcctttggagagaatgaagtgtacaagcaggtgatcttcgaggagggctcctggggccgatgggtccagaagaagttccagaaatacattggtttcgccccatgcatcttccatggtcgaggcctcttctcctccgacacctgggggctggtgccctactccaagcccatcaccactgttgtgggagagcccatcaccatccccaagctggagcacccaacccagcaagacatcgacctgtaccacaccatgtacatggaggccctggtgaagctcttcgacaagcacaagaccaagttcggcctcccggagactgaggtcctggaggtgaactgagccagccttcggggccaattccctggaggaaccagctgcaaatcacttttttgctctgtaaatttggaagtgtcatgggtgtctgtgggttatttaaaagaaattataacaattttgctaaaccattacaatgttaggtcttttttaagaaggaaaaagtcagtatttcaagttctttcacttccagcttgccctgttctaggtggtggctaaatctgggcctaatctgggtggctcagctaacctctcttcttcccttcctgaagtgacaaaggaaactcagtcttcttggggaagaaggattgccattagtgacttggaccagttagatgattcactttttgcccctagggatgagaggcgaaagccacttctcatacaagcccctttattgccactaccccacgctcgtctagtcctgaaactgcaggaccagtttctctgccaaggggaggagttggagagcacagttgccccgttgtgtgagggcagtagtaggcatctggaatgctccagtttgatctcccttctgccacccctacctcacccctagtcactcatatcggagcctggactggcctccaggatgaggatgggggtggcaatgacaccctgcaggggaaaggactgccccccatgcaccattgcagggaggatgccgccaccatgagctaggtggagtaactggtttttcttgggtggctgatgacatggatgcagcacagactcagccttggcctggagcacatgcttactggtggcctcagtttaccttccccagatcctagattctggatgtgaggaagagatccctcttcagaaggggcctggccttctgagcagcagattagttccaaagcaggtggcccccgaacccaagcctcacttttctgtgccttcctgagggggttgggccggggaggaaacccaaccctctcctgtgtgttctgttatctcttgatgagatcattgcaccatgtcagacttttgtatatgccttgaaaataaatgaaagtgagaatcctc

SEQ ID NO: 88881 - protein, 207 aa, Artificial Sequence
  derived and/or modified sequence
MREWWVQVGLLAVPLLAAYLHIPPPQLSPALHSWKSSGKFFTYKGLRIFYQDSVGVVGSPEIVVLLHGFPTSSYDWYKIWEGLTLRFHRVIALDFLGFGFSDKPRPHHYSIFEQASIVEALLRHLGLQNRRINLLSHDYGDIVAQELLYRYKQNRSGRLTIKSLCLSNGGIFPETHRPLLLQKLLKDGGVLSPILTRLMNFFVFSRG

SEQ ID NO: 88882 - DNA, 879 bp, Artificial Sequence
  derived and/or modified sequence
atgagagagtggtgggtgcaggtgggcctgctggccgtgcccctgctggccgcctacctgcacatcccccccccccagctgagccccgccctgcacagctggaagagcagcggcaagttcttcacctacaagggcctgagaatcttctaccaggacagcgtgggcgtggtgggcagccccgagatcgtggtgctgctgcacggcttccccaccagcagctacgactggtacaagatctgggagggcctgaccctgagattccacagagtgatcgccctggacttcctgggcttcggcttcagcgacaagcccagaccccaccactacagcatcttcgagcaggccagcatcgtggaggccctgctgagacacctgggcctgcagaacagaagaatcaacctgctgagccacgactacggcgacatcgtggcccaggagctgctgtacagatacaagcagaacagaagcggcagactgaccatcaagagcctgtgcctgagcaacggcggcatcttccccgagacccacagacccctgctgctgcagaagctgctgaaggacggcggcgtgctgagccccatcctgaccagactgatgaacttcttcgtgttcagcagaggcctgctgcagtacatcaaccagagaaagaagttcagaagaagatgggtgggcgccctggccagcgtgaccatccccatccacttcatctacggccccctggaccccgtgaacccctaccccgagttcctggagctgtacagaaagaccctgcccagaagcaccgtgagcatcctggacgaccacatcagccactacccccagctggaggaccccatgggcttcctgaacgcctacatgggcttcatcaacagcttctag

SEQ ID NO: 88883 - DNA, 879 bp, Artificial Sequence
  derived and/or modified sequence
atgcgggaatggtgggttcaagttggtctgctggctgtccctttgttggcggcatatcttcacattcccccgccgcagttgtctccagccctccatagctggaagtcctcaggcaaattcttcacctataaaggcctgaggattttttatcaagactccgtgggtgtggtgggaagcccagagattgttgtcttactccacggcttcccgaccagctcctacgactggtataaaatctgggagggattgaccttgcgctttcacagagtgatcgccctggattttctcgggttcggcttcagcgataaacctcggcctcatcattacagcatttttgagcaagcctcaatagtagaagctctgctcagacatctcgggctgcagaatcgacgcattaatcttctctcacacgactatggggatatcgtggctcaggaactcctttacagatataagcaaaacaggtcgggtagactgactattaagtccttgtgcttaagcaacggggggatcttccctgagactcataggcctcttctgcttcagaaactgctgaaggacgggggcgtgttaagtcctattcttacaaggctgatgaatttctttgtgttttcacgcggactgctgcagtacataaaccagcgcaagaaatttcgtaggcgttgggtcggcgccctggcatccgtgacgatccccatccacttcatctacggtccacttgaccctgtcaacccctatcccgaattcctcgaactgtataggaaaacgctgcctcggtccacggtatcgatcctggacgaccacataagccactatccccagctcgaggatcctatgggattcctgaacgcgtacatgggcttcatcaacagcttctag

SEQ ID NO: 88884 - DNA, 879 bp, Artificial Sequence
  derived and/or modified sequence
atgagggagtggtgggtccaggtgggactgctagctgtgccactgctggctgcatacctacatattcctcctccacagctctctcccgcactgcatagctggaaaagcagcggtaaattctttacctacaagggcttgcgtatcttctatcaggacagtgtgggcgtggtgggaagcccagagatcgtggttctgctacatgggtttccaactagctcatatgactggtataagatctgggaaggcctcacgctccgcttccacagagttatcgcccttgatttccttggcttcggtttctctgataagccacgtccacatcattatagcatttttgagcaggccagcatagtcgaagctttactgcggcacctgggtctgcagaacaggagaataaatcttctgagccatgattatggcgatatcgtagcccaggagctgctgtatcgctacaagcaaaataggagcggccgtctcacaatcaagtctctatgcctgagcaacggcgggatctttcccgagacccaccggcccctgctgctacaaaagcttctcaaagatggaggagtcctgtccccaatcctcactcgactcatgaacttctttgtcttctcaagaggattgcttcaatatatcaatcagagaaaaaagtttcgtagacgctgggtcggagccttggcttccgtcacaattcccatccactttatctacggacccctggatcctgtgaacccataccccgagttcctggagctttaccgcaagactttgccaaggagtaccgtcagcattcttgatgatcatataagtcattatcctcagctcgaagacccgatgggattcttgaacgcctacatgggatttattaattctttctag

SEQ ID NO: 88885 - DNA, 879 bp, Artificial Sequence
  derived and/or modified sequence
atgagggagtggtgggtgcaggtgggcctgctggccgtgcccctgctggccgcctacctgcacatccccccaccccagctgagccctgccctgcacagctggaagagcagcggcaagttcttcacctacaagggcctgcgcatcttctaccaggacagcgtgggcgtggtgggcagccctgagatcgtggtgctgctgcacggcttccccaccagcagctatgactggtacaagatctgggagggcctgaccctgcgcttccaccgggtgattgccctggacttcctgggcttcggcttcagtgacaagccccggccccaccactacagcatctttgagcaggccagcatcgtggaggccctgctgcggcacctgggcctgcagaacagacgcatcaacctgctgagccatgactatggagacatcgtggcccaggagctgctgtaccgctacaagcagaacagaagtggccgcctgaccatcaagagcctgtgcctgagcaatggaggcatcttccctgagacccaccggcccctgctgctgcagaagctgctgaaggatggaggagtgctgagccccatcctgacccggctgatgaacttctttgtgttcagccggggcctgctgcagtacatcaaccagaggaagaagttcagaagacgctgggtgggcgccctggcctctgtgaccatccccatccacttcatctacggccccctggaccctgtgaacccctacccagagttcctggagctgtacaggaagaccctgcccaggagcacagtgtccatcctggatgaccacatcagccactacccccagctggaggaccccatgggcttcctgaatgcctacatgggcttcatcaacagcttctag

SEQ ID NO: 88886 - DNA, 879 bp, Artificial Sequence
  derived and/or modified sequence
atgcgggagtggtgggtgcaggtgggcctgctggccgtgcccctgctcgctgcctatcttcatattcctcctccgcagttgagcccggctctccactcttggaaatccagcgggaagtttttcacttacaagggcctcagaatcttctaccaggatagcgtgggtgttgtcggctcccccgagatcgtggtgctgctccacggattccccacaagcagttacgactggtataagatctgggagggcctaacccttcgcttccatcgagtcatagctttggatttcctgggcttcggcttttctgacaaacctcggccccatcactacagcatttttgagcaggctagtattgtagaggctctgttaaggcatctcggcctgcagaacaggcgcatcaacctgctgtctcatgattatggggatatcgtcgcccaagagctgttataccgctataagcagaacagatccgggagacttaccatcaaaagtctctgtctgtccaatggcgggattttccctgagacacacagacctcttctgctgcagaaacttttgaaagatgggggagtgctgtcacctatactgacacgcctgatgaatttttttgtgttctccagaggattactgcagtatattaatcaaagaaagaaatttagaagaagatgggtgggagcactagcttccgtgacgattcccattcatttcatatatggccccctcgatcccgttaacccttatcctgagtttctcgagctctaccgcaagactctgcctcgtagcactgtgtctattctggatgatcacatatcccattaccctcagttggaagatccaatgggctttctcaatgcttacatgggtttcattaacagcttctag

SEQ ID NO: 88887 - DNA, 879 bp, Artificial Sequence
  derived and/or modified sequence
atgcgggagtggtgggtgcaggtgggcctgctggccgtgcccctgctggctgcatacctgcacatcccacccccacaactgagccctgccctgcactcatggaagtcttccggcaagtttttcacatacaaagggttacgcatcttctaccaagacagtgtgggtgtggttggcagccctgaaattgtggtgctgcttcacggctttcctactagtagctacgattggtataagatttgggagggtcttacccttagattccacagagtaatagccctggatttccttggtttcggattcagcgacaagccaagacctcaccattattctatctttgaacaggcatctattgtggaggcactactgcggcatctgggactccagaatagacggatcaacttgctgtcgcatgattatggcgacattgtggcccaagagctgctctaccggtataaacagaaccggagtggaaggctgacaattaagagcctgtgcctttctaatggagggattttccctgaaacacatcggccccttttgctccagaaactgttgaaagacggtggggtgcttagccccatcttgactagactgatgaatttttttgtattctcacgtgggctcctgcaatacataaaccagcgtaaaaaattccgaaggaggtgggtaggtgccctcgcctctgtgacaatacctatacatttcatctacggcccgctcgatccagtaaacccatacccagaatttcttgaattataccggaagaccctgccgcgaagtaccgtctccatcctggacgatcacatttctcattaccctcaactggaagatcctatgggctttttaaatgcttatatgggatttattaactctttctag

SEQ ID NO: 88888 - DNA, 879 bp, Artificial Sequence
  derived and/or modified sequence
atgagggagtggtgggttcaggtcgggttattggcggtgcccttgctggccgcatatctccacatccccccaccccagcttagccctgccctccactcctggaaatcctcaggaaagttcttcacctataaagggctgagaattttttatcaggatagcgtgggcgtagtcgggtctcccgagatagtggtgctgcttcatggatttcctaccagttcctacgattggtacaaaatttgggaagggttgacactgcgattccaccgggtcattgcactagacttccttgggttcggattctctgataaaccaagaccacatcattactctatcttcgaacaggcttcgatagtcgaggccctgttacgccacctaggcttgcagaatagaaggatcaatttgctctctcacgactatggcgacatcgtggcccaggaactgctgtacaggtataagcagaaccgcagtggcaggctgaccataaagtctctttgtctttcaaacggaggaattttcccggagactcatagaccactgctgctccagaagctcctcaaagacggaggagtgctgtctccaatactgactaggctgatgaattttttcgtgttcagtagggggctcctacagtatatcaatcagagaaagaagtttaggagacggtgggtaggtgcccttgcctccgtcactattccaatccacttcatctacgggccactggatccagtaaatccctacccagaattccttgaactgtatcgtaagacactgcccaggtccactgtcagcattctcgacgaccatatttcacattaccctcagctggaggacccaatgggctttctgaatgcctatatgggctttattaatagcttttag

SEQ ID NO: 88889 - DNA, 879 bp, Artificial Sequence
  derived and/or modified sequence
atgagagaatggtgggtacaagtggggcttttagccgtccctcttttggcagcttatctgcacatcccgccaccacagctaagccctgccctccactcttggaaatcctcgggcaaattcttcacctataagggactacgcatattttaccaggattcagtgggagttgttggaagccctgagatcgtggtgttgctacatggcttccccacatcttcgtacgactggtacaagatatgggagggactaacacttagatttcatcgagttatcgccttggactttctggggttcggcttttcggacaaacccagaccacatcattacagcatattcgaacaagcttctatcgtggaagctttgttgcgacatctcggcctccagaacaggagaatcaatttattgagccatgactacggtgacattgtggcccaggagctcctctaccgatacaagcagaataggtccggaagactgaccattaagtccctctgtctgagcaacgggggtattttccctgagacccaccgtcccctgctgctccaaaaactactgaaagacgggggagttcttagcccaattttaacccgactaatgaattttttcgtctttagtcgcggactgttgcagtatataaaccagaggaagaagttccgaagaagatgggtgggagccctggcaagcgtgactattccaatccacttcatctatgggcctttagatcccgtgaatccgtacccagaattcctcgagttgtatagaaagaccctgccccgtagtacagtgtcaattttggacgaccacatttcacattacccgcagttagaagatcccatgggttttctgaatgcatacatgggctttatcaacagtttttag

SEQ ID NO: 88890 - DNA, 357 bp, Artificial Sequence
  derived and/or modified sequence
atgcgcgaatggtgggtgcaggttgggctcctggctgtccctcttctcgccgcatacctgcacatccccccaccccaactctcaccagcactccactcctggaagagcagtgggaaattttttacgtacaaaggacttcgcatattctatcaggattcggttggggtggtgggcagtcccgagatcgtggttttgctgcacgggtttccaactagtagctacgattggtacaagatatgggagggactgacccttaggttccaccgcgtgatcgccctggatttcctgggcttcggcttttccgacaagcctagaccacatcactattccatcttcgaacaggcaagcattgtgtag

SEQ ID NO: 88891 - DNA, 624 bp, Artificial Sequence
  derived and/or modified sequence
atgcgggagtggtgggtccaagtggggctactggccgtgcctctactcgctgcctacctgcatatccctcctccacagctctctcccgcactgcactcttggaagtcctcaggcaagtttttcacatataagggactgcgtattttctaccaggattccgttggtgttgtcggctcccctgagattgtggtgttgcttcacgggttccctacctccagctacgactggtacaagatctgggaggggcttaccttgaggttccaccgagtgattgccctggatttcctgggcttcgggttcagtgacaaaccgagaccccaccactatagcatcttcgagcaagcatcgatcgtggaggcgttgcttaggcatttagggctacagaatcggagaatcaatctgctctcccacgactacggggatattgtggcccaggagctgctgtaccgttataaacagaacagaagcggacggctcaccatcaagtctctctgccttagtaatggaggaatttttcccgaaactcatagaccattgcttctccagaagctactcaaagacggcggggttctttcgcctatcttgacccgcttgatgaacttttttgtgttcagtagaggctag

SEQ ID NO: 88892 - DNA, 483 bp, Artificial Sequence
  derived and/or modified sequence
atgcgcgaatggtgggttcaggttggcctgctggccgtgcccctgttggccgcataccttcacatccccccaccccagttgtcccccgcgcttcattcgtggaagagttccggcaagttcttcacttacaaagggctcagaatcttctatcaggattccgtgggagtggtggggagtccagagattgttgtattgctccatggcttcccaacaagttcctacgattggtacaagatctgggagggtctgacacttagattccaccgagtgattgccctggactttttaggattcggctttagcgataagcctcgcccacatcactactccatctttgagcaggcctccatagtggaagccctgttgagacatctgggactgcagaacagaagaataaatctgctctctcacgattatggtgatatcgttgcccaagaactgttataccggtataaacagaatagaagtggtagactcacctag

SEQ ID NO: 88893 - DNA, 384 bp, Artificial Sequence
  derived and/or modified sequence
atgcgcgagtggtgggtccaggtggggctgctggcagttccccttctggccgcctatctgcatataccgccgcctcaactgagtccggctcttcacagctggaaatcttctggaaaattctttacttacaagggtctgcgcatcttttatcaggactctgtgggagtggtgggcagccccgaaatcgtagtcctattgcacggctttccgacatcctcatacgactggtacaaaatctgggaaggtttgacccttagatttcacagggtcatcgctctggattttctgggattcgggttctccgataaaccccggccccaccattactctatattcgagcaagcatcaatcgtcgaagcgctgctgcgacacttggggctatag

SEQ ID NO: 88894 - DNA, 522 bp, Artificial Sequence
  derived and/or modified sequence
atgagagagtggtgggtccaagtgggcctgctggccgtacctctcctggccgcttaccttcatatccccccgcctcagctaagccccgccctacattcttggaagagcagcggcaaattcttcacttataaaggcttaagaattttctatcaagattctgttggcgtggttggatctcccgagatagtcgtgcttctgcatggatttccgacatccagctatgattggtataaaatctgggaaggtctgaccctgaggttccaccgggtgatagctctggatttcctcgggttcggctttagcgacaagccccgaccgcatcactatagcattttcgagcaggccagtatcgtcgaagctttgctgaggcacctcggactgcagaaccggcggataaatctgctcagccacgactacggcgatattgtggcacaggagctcctctaccgctacaagcagaataggagcgggaggcttaccatcaaaagcctgtgcctctccaatggcggcaattgcctctag

SEQ ID NO: 88895 - DNA, 879 bp, Artificial Sequence
  derived and/or modified sequence
atgagggaatggtgggtgcaggttggactactggctgtgcctctgctggccgcttacttgcacatccctcccccccagttgtctcccgctttgcatagttggaagtcctcgggcaagtttttcacatataaagggctgaggatattctatcaggactcagtgggtgtggttggcagccccgaaatcgtcgtcctacttcacggcttccccactagcagctatgactggtacaagatttgggaaggactgaccctcaggttccaccgggttattgcacttgattttctgggatttggtttttccgataaaccccggccccaccactatagtatctttgaacaggcatccatcgtcgaggccctcctcagacacttagggctccaaaacagacggataaaccttctcagccatgactatggcgatattgtggcacaggagctcctgtatagatacaaacagaatagaagcggtaggcttaccattaagtctctttgtctttccaacggcggaatctttccggaaactcacagaccccttctactgcagaagctgctcaaagatggaggcgtcttgtcccctatactgacgagacttatgaattttttcgtattttcgcgaggcctgcttcagtacatcaaccagcggaagaagtttcgccggagatgggtcggagctcttgcttcagtgacgattccgatccatttcatatacggccctctggaccccgtgaatccatatcccgaattcttggagttatatcggaaaactcttcctcgcagcaccgtctccatcctcgacgaccacatctctcattacccacagctggaagatcctatgggtttcctgaacgcctatatgggcttcataaacagtttctag

SEQ ID NO: 88896 - DNA, 879 bp, Artificial Sequence
  derived and/or modified sequence
atgagagagtggtgggtccaggttggtctcttggcagtccctctgctcgctgcatacctccatatccctccacctcagctgagcccagcactccatagttggaagtcttccggaaagtttttcacctataaaggcctcagaatcttctaccaggactcagtgggcgtggtaggttcccccgaaatcgttgtcttacttcacgggttcccaaccagctcttatgactggtacaaaatttgggaaggtttgactctccggttccaccgcgttatagcattggatttcctgggctttggctttagtgataagccgcgcccccatcactattctattttcgagcaggcgtctatcgtcgaggccctgctgcggcacctggggttgcagaatcgacgcataaatctgcttagtcatgattatggtgatatcgtcgcgcaggaactgctctataggtataaacagaaccggtccggtaggcttactattaaatcactgtgtctgtctaatggcggaatctttccagagacccacagaccactgcttctacagaagttgcttaaagacggcggtgtgctatcccccattttgactaggcttatgaatttttttgtgttttcacggggcctcctccagtatataaatcagcgaaagaagttccggaggcggtgggtgggcgcactggcatccgtcacaatccctattcatttcatttacggtcccctggatccggtgaatccctaccctgagttcttggagctttatcgaaaaaccctgccacgctccacagtgagcattctggatgatcacatctcccattacccccagctggaagaccctatgggcttccttaatgcatacatgggttttataaattccttttag

SEQ ID NO: 88897 - DNA, 357 bp, Artificial Sequence
  derived and/or modified sequence
atgagggagtggtgggtgcaggtgggcctgctggccgtgcccctgctggccgcctacctgcacatccccccaccccagctgagccctgccctgcacagctggaagagcagcggcaagttcttcacctacaagggcctgcgcatcttctaccaggacagcgtgggcgtggtgggcagccctgagatcgtggtgctgctgcacggcttccccaccagcagctatgactggtacaagatctgggagggcctgaccctgcgcttccaccgggtgattgccctggacttcctgggcttcggcttcagtgacaagccccggccccaccactacagcatctttgagcaggccagcatcgtgtag

SEQ ID NO: 88898 - DNA, 624 bp, Artificial Sequence
  derived and/or modified sequence
atgagggagtggtgggtgcaggtgggcctgctggccgtgcccctgctggccgcctacctgcacatccccccaccccagctgagccctgccctgcacagctggaagagcagcggcaagttcttcacctacaagggcctgcgcatcttctaccaggacagcgtgggcgtggtgggcagccctgagatcgtggtgctgctgcacggcttccccaccagcagctatgactggtacaagatctgggagggcctgaccctgcgcttccaccgggtgattgccctggacttcctgggcttcggcttcagtgacaagccccggccccaccactacagcatctttgagcaggccagcatcgtggaggccctgctgcggcacctgggcctgcagaacagacgcatcaacctgctgagccatgactatggagacatcgtggcccaggagctgctgtaccgctacaagcagaacagaagtggccgcctgaccatcaagagcctgtgcctgagcaatggaggcatcttccctgagacccaccggcccctgctgctgcagaagctgctgaaggatggaggagtgctgagccccatcctgacccggctgatgaacttctttgtgttcagccggggctag

SEQ ID NO: 88899 - DNA, 483 bp, Artificial Sequence
  derived and/or modified sequence
atgagggagtggtgggtgcaggtgggcctgctggccgtgcccctgctggccgcctacctgcacatccccccaccccagctgagccctgccctgcacagctggaagagcagcggcaagttcttcacctacaagggcctgcgcatcttctaccaggacagcgtgggcgtggtgggcagccctgagatcgtggtgctgctgcacggcttccccaccagcagctatgactggtacaagatctgggagggcctgaccctgcgcttccaccgggtgattgccctggacttcctgggcttcggcttcagtgacaagccccggccccaccactacagcatctttgagcaggccagcatcgtggaggccctgctgcggcacctgggcctgcagaacagacgcatcaacctgctgagccatgactatggagacatcgtggcccaggagctgctgtaccgctacaagcagaacagaagtggccgcctgacctag

SEQ ID NO: 88900 - DNA, 384 bp, Artificial Sequence
  derived and/or modified sequence
atgagggagtggtgggtgcaggtgggcctgctggccgtgcccctgctggccgcctacctgcacatccccccaccccagctgagccctgccctgcacagctggaagagcagcggcaagttcttcacctacaagggcctgcgcatcttctaccaggacagcgtgggcgtggtgggcagccctgagatcgtggtgctgctgcacggcttccccaccagcagctatgactggtacaagatctgggagggcctgaccctgcgcttccaccgggtgattgccctggacttcctgggcttcggcttcagtgacaagccccggccccaccactacagcatctttgagcaggccagcatcgtggaggccctgctgcggcacctgggcctgtag

SEQ ID NO: 88901 - DNA, 522 bp, Artificial Sequence
  derived and/or modified sequence
atgagggagtggtgggtgcaggtgggcctgctggccgtgcccctgctggccgcctacctgcacatccccccaccccagctgagccctgccctgcacagctggaagagcagcggcaagttcttcacctacaagggcctgcgcatcttctaccaggacagcgtgggcgtggtgggcagccctgagatcgtggtgctgctgcacggcttccccaccagcagctatgactggtacaagatctgggagggcctgaccctgcgcttccaccgggtgattgccctggacttcctgggcttcggcttcagtgacaagccccggccccaccactacagcatctttgagcaggccagcatcgtggaggccctgctgcggcacctgggcctgcagaacagacgcatcaacctgctgagccatgactatggagacatcgtggcccaggagctgctgtaccgctacaagcagaacagaagtggccgcctgaccatcaagagcctgtgcctgagcaatggaggcaactgcctgtag

SEQ ID NO: 88902 - DNA, 776 bp, Artificial Sequence
  derived and/or modified sequence
gctgctgtggccaggcgtctggcatgctgaccacgtcgcgctgctgtaaaggaaacctgccccgcgcagcggcggtggctggagcgggagaaaccggactttgtgcaactttggccatagtggccatcccatgaatctgtttactagcttggtggatgagggagtggtgggtccaggtggggctgctggccgtgcccctgcttgctgcgtacctgcacatcccaccccctcagctctcccctgcccttcactcatggaagtcttcaggcaagtttttcacttacaagggactgcgtatcttctaccaagactctgtgggtgtggttggaagtccagagatagttgtgcttttacacggttttccaacatccagctacgactggtacaagatttgggaaggtctgaccttgaggtttcatcgggtgattgcccttgatttcttaggctttggcttcagtgacaaaccgagaccacatcactattccatatttgagcaggccagcatcgtggaagcgcttttgcggcatctggggctccagaaccgcaggatcaaccttctttctcatgactatggagatattgttgctcaggagcttctctacaggtacaagcagaatcgatctggtcggcttaccataaagagtctctgtctgtcaaatggaggtatctttcctgagactcaccgtccactccttctccaaaagctactcaaagatggaggtgtgctgtcacccatcctcacacgactgatgaacttctttgtattctctcgaggg

SEQ ID NO: 88903 - DNA, 582 bp, Artificial Sequence
  derived and/or modified sequence
gactgtgcctgtgctgaagccctttcctcctcctagctcccaggcagctagaaaattgcctgtctgaaagaaagtagctgttttccttaggggactgtggatgagggagtggtgggtccaggtggggctgctggccgtgcccctgcttgctgcgtacctgcacatcccaccccctcagctctcccctgcccttcactcatggaagtcttcaggcaagtttttcacttacaagggactgcgtatcttctaccaagactctgtgggtgtggttggaagtccagagatagttgtgcttttacacggttttccaacatccagctacgactggtacaagatttgggaaggtctgaccttgaggtttcatcgggtgattgcccttgatttcttaggctttggcttcagtgacaaaccgagaccacatcactattccatatttgagcaggccagcatcgtggaagcgcttttgcggcatctggggctccagaaccgcaggatcaaccttctttctcatgactatggagatattgttgctcaggagcttctctacaggtacaagcagaatcgatctggtcggcttaccat

SEQ ID NO: 88904 - DNA, 541 bp, Artificial Sequence
  derived and/or modified sequence
aaaatcaattctcacacgctgggatgagggagtggtgggtccaggtggggctgctggccgtgcccctgcttgctgcgtacctgcacatcccaccccctcagctctcccctgcccttcactcatggaagtcttcaggcaagtttttcacttacaagggactgcgtatcttctaccaagactctgtgggtgtggttggaagtccagagatagttgtgcttttacacggttttccaacatccagctacgactggtacaagatttgggaaggtctgaccttgaggtttcatcgggtgattgcccttgatttcttaggctttggcttcagtgacaaaccgagaccacatcactattccatatttgagcaggccagcatcgtggaagcgcttttgcggcatctggggctccagaaccgcaggatcaaccttctttctcatgactatggagatattgttgctcaggagcttctctacaggtacaagcagaatcgatctggtcggcttaccataaagagtctctgtctgtcaaatggaggtaattgcct

SEQ ID NO: 88905 - DNA, 357 bp, Artificial Sequence
  derived and/or modified sequence
atgcgggagtggtgggtgcaggtgggcctgctggccgtgcccctgctagccgcatatctccatatccctccaccccaactctccccggccttacacagttggaagtcttcaggaaagttcttcacctacaagggattaaggatcttctatcaagacagcgttggagtagttgggtctcccgagatcgtggtcctgctccacggatttcccacatctagctatgactggtacaagatttgggagggcctcacactgcgttttcaccgcgtcatcgctcttgattttctgggatttggcttcagcgacaaaccacgtccacatcactactcaatattcgagcaggcatccattgtatag

SEQ ID NO: 88906 - DNA, 624 bp, Artificial Sequence
  derived and/or modified sequence
atgcgggagtggtgggtgcaggtgggcctgctggccgtgcccctgctggccgcttatctacatattccccccccacagctatctccagcactccactcctggaaatcatccggaaaattttttacatacaaagggctccgcattttttaccaggactctgtgggggtggtgggaagccctgaaatagttgtgctgctccatggatttcctacatcctcttacgactggtataaaatctgggagggcttgaccctgaggtttcaccgggttatcgctctcgacttcctgggatttggattttcggacaagccaagaccacatcattactcaatcttcgagcaggcatccattgtggaggccctgctccgccacttgggactacagaaccggagaattaatctgttatcacacgactacggagatatagttgctcaggaactgctttatcgatataagcagaataggtccggtagactcactatcaagagtttgtgtctcagcaatggtggcatattcccggaaacgcatcggcctctgttgctgcagaaactgctcaaggatgggggcgtgttgagcccaatcctgaccaggttgatgaacttttttgtgtttagccgtggctag

SEQ ID NO: 88907 - DNA, 483 bp, Artificial Sequence
  derived and/or modified sequence
atgcgggagtggtgggtgcaggtgggcctgctggccgtgcccctgctggctgcgtacctccacatccccccaccccaactaagcccagcgttacactcttggaaatcatctggcaaattcttcacatacaaggggttacgtatcttctatcaagatagcgttggagtggtggggagcccagagatagttgtgttgctccatgggtttcccacttccagttacgattggtacaaaatctgggaaggccttactctgcggtttcaccgagtcatcgcactggacttcctgggcttcggattctcagacaaaccaagaccccaccactacagtatcttcgaacaggctagtattgttgaggctctactgcgccatctgggactgcagaatagaagaattaatttattgtcccacgattatggggacattgtggcccaggaactgttgtaccgatacaaacagaaccgcagcggcagactgacctag

SEQ ID NO: 88908 - DNA, 384 bp, Artificial Sequence
  derived and/or modified sequence
atgcgggagtggtgggtgcaggtgggcctgctggccgtgcccctgctggcggcctacctgcatatcccaccgccacaactttcccctgccctgcatagctggaaatctagcggaaagtttttcacctacaaaggcctccgcattttttatcaggattctgttggcgtagtgggctccccagaaattgtggtactcctgcacggatttcccaccagctcttacgattggtataagatttgggagggcctgacactaagatttcatagagttatcgctctggatttcttaggcttcggattcagcgacaagccacgaccacaccactatagcatattcgagcaagcctccattgtggaggcattgctgcgccatctgggcctgtag

SEQ ID NO: 88909 - DNA, 522 bp, Artificial Sequence
  derived and/or modified sequence
atgcgggagtggtgggtgcaggtgggcctgctggccgtgcccctgctggccgcctacctacacatcccacccccacagctgagcccggcactccacagttggaaaagctcaggcaagttcttcacgtataagggcctcaggattttctaccaggactcagtgggagtggtaggaagccctgagatcgttgttcttctccatggctttccaacttcttcctatgattggtacaaaatttgggaaggtctcacactgcgatttcaccgcgtgatcgcccttgacttcctcggcttcgggttttcagataagcctaggcctcatcactactcaatcttcgaacaggccagtatcgtggaagcgctgcttcgccatctggggttgcagaatagacggattaacctgcttagtcatgactatggcgacatcgttgcccaggagttgttgtaccgatacaagcagaacaggagcgggcgtctcaccatcaaaagcctctgcctcagcaacggcggtaattgcctttag

SEQ ID NO: 88910 - DNA, 879 bp, Artificial Sequence
  derived and/or modified sequence
atgcgggagtggtgggtgcaggtgggcctgctggccgtgcccctgctggcggcatacctacacatccctccaccccagttgagtccagcgttgcattcttggaagtcttctgggaagtttttcacctacaaaggcctgagaatcttttatcaggactctgtcggtgtggttgggagtccagaaattgttgtgctgctccatgggttccctaccagctcttacgattggtacaaaatctgggagggcttgacattgcgattccatagggtgatcgcactagacttcctgggcttcggtttcagcgacaagccccggccgcatcattactccatcttcgagcaggcgtccatagtcgaggcacttctgaggcatcttggcctccagaacaggcgaatcaacctgttgagtcacgattacggtgacatcgtggctcaagagctgctgtacagatacaagcagaatagaagtggcaggctaacaattaagtcgctatgcctgtctaacggtggtatttttcccgagacccatcgcccattgctcttacaaaagctcctcaaagatggaggcgttttgtctccaatcctgaccaggctgatgaacttctttgtgtttagcaggggactgttgcaatatattaatcaacggaaaaagtttagacgtcgttgggtcggagctttagccagcgttaccattccaattcactttatatacggccccttggacccggttaacccttatccggaattcctcgagctctacaggaagactttaccgcgctctacagtctctatcctggatgatcacattagtcactacccccagctggaagacccaatggggttcctgaacgcgtatatggggttcataaattctttttag

SEQ ID NO: 88911 - DNA, 879 bp, Artificial Sequence
  derived and/or modified sequence
atgcgggagtggtgggtgcaggtgggcctgctggccgtgcccctgttagctgcttatttgcatatcccaccaccgcagctctctccagctcttcactcctggaagagtagtggtaagttttttacttacaaggggcttaggatattttaccaagacagtgtgggagtcgtcggtagcccggaaatagtcgttttgcttcacggctttcctacgtctagttacgactggtataagatctgggaggggctgactctgaggtttcatcgggtcatcgctctggattttctggggttcggattctccgataagccccgcccacaccactacagcattttcgagcaagccagtattgtagaggcactgctgcggcatctgggcctgcagaataggagaattaatctgctctctcacgactatggagacatcgtggcccaagagttgctgtatcggtataaacagaacaggagtggtcggttgacaatcaaatccctgtgtctcagcaacggtggaatctttccagagactcatcggccactcctcctccagaaactactgaaggacggaggtgttctttctcctatcctcacccgcctgatgaatttctttgtattttcgcggggcttgctgcagtatattaatcaaagaaaaaagttccggaggcggtgggtgggagctctcgcaagcgtgacaatcccaatccattttatctatggcccgctagaccctgtgaatccataccccgaatttctggagctgtaccggaagaccctgcccagaagcaccgtctctatcctggacgaccatatctcccattatcctcaactggaggacccaatgggattcctgaacgcctatatggggtttatcaacagtttctag

SEQ ID NO: 88912 - DNA, 357 bp, Artificial Sequence
  derived and/or modified sequence
atgagggagtggtgggtgcaggtgggactgttagctgtgccgctgttggctgcctacttacacattccccctcctcagctgtcaccggcacttcactcatggaaaagctccggcaaattttttacatacaaggggttacgcatcttttaccaagattctgtcggggtggttggctcacctgagatagtcgtgctcctgcatgggttccccacttcctcatatgactggtacaaaatctgggagggcctgaccttgcgatttcaccgggtgatagctctcgattttctcggttttgggtttagtgataaaccacgaccacaccactattcgatcttcgagcaagcatccatcgtgtag

SEQ ID NO: 88913 - DNA, 624 bp, Artificial Sequence
  derived and/or modified sequence
atgcgggaatggtgggtgcaggtgggcctcttggctgttcccctgcttgccgcttatctccacatcccaccccctcagttatccccagctctccatagctggaaatcttcaggcaaatttttcacctacaaggggctccgcattttctatcaagatagtgtgggcgtcgttggatctcctgaaattgttgtgctgctacatggctttcctacttcctcctatgactggtacaagatatgggagggtctgacgctgagattccacagggtgatagcactggacttcctggggttcggcttcagtgataagcctaggcctcaccactacagcatcttcgaacaagcttctattgttgaggccttgctacgacacctgggtctccaaaacaggcgcataaaccttctttcccacgattacggtgatatcgtagcccaagagttgctctataggtataaacagaacagaagcggcagactgacgattaaaagtttatgtctcagtaacgggggtatattcccagagactcacaggcctcttctcctccagaagcttcttaaagatgggggtgtactttcacccattttgaccaggctaatgaatttcttcgtgttctcccggggatag

SEQ ID NO: 88914 - DNA, 483 bp, Artificial Sequence
  derived and/or modified sequence
atgcgggaatggtgggtgcaagtagggttactggccgtccctctgttggccgcttatctccacatccctcccccacagctgtctcctgctctccactcctggaaatcctcggggaagttctttacatacaaaggactgcggatcttctatcaggattccgtcggggtagtgggatcccctgagatcgtggtgctattgcacggttttccgacctcctcgtacgattggtacaagatctgggaggggcttacgctgagatttcatcgtgtgattgctctggactttctgggcttcggattcagcgacaagccacgtccccaccactatagcattttcgaacaggcaagcatagtagaggcgctgctgcgacacctgggactccagaatagaagaattaacctcctgagccacgattatggcgacatcgtcgctcaagaactgttgtacaggtacaagcagaatcgctccggacgattgacctag

SEQ ID NO: 88915 - DNA, 384 bp, Artificial Sequence
  derived and/or modified sequence
atgcgagagtggtgggtccaggtaggccttctggctgtgcccttactggccgcatatctgcatattcctcccccacaactgtcgcctgcgctacactcctggaagagctctggaaagttcttcacatacaagggcctccggattttttaccaggattctgtgggggttgtcggctcccccgagatcgtggtactgctccacgggttccccacaagttcatacgattggtacaagatttgggagggactgacgctgagattccatcgggtcattgccctggattttctgggctttggcttcagcgataagcctcgaccacatcactacagcatcttcgaacaggcaagtattgtagaggcccttcttcggcatctgggcctctag

SEQ ID NO: 88916 - DNA, 522 bp, Artificial Sequence
  derived and/or modified sequence
atgcgggaatggtgggtacaggtaggcctgctggcagttcccctgcttgccgcttacctccacattccaccccctcaacttagcccggcacttcactcatggaaaagcagcgggaagttctttacttacaagggccttcgcattttctaccaagatagcgtcggggtcgtcggatctccagagatcgtggtcctcctgcacggatttcccacctcttcatacgactggtacaaaatctgggagggactgaccctcagattccacagagtcatagccctggacttcctcggctttggcttcagtgacaaacccaggccacatcattattccatttttgagcaggcctcaatagtggaggctctcctgcgacatctaggactccagaaccgcaggatcaatttactgtctcacgattatggagacattgtggcccaggaattgctgtaccgctacaagcagaataggtcaggaaggctcacaatcaagagcctctgcttaagcaacggtggaaattgcctatag

SEQ ID NO: 88917 - DNA, 879 bp, Artificial Sequence
  derived and/or modified sequence
atgcgcgagtggtgggtccaggtgggcctattagctgtgcccctgttagcagcctacttgcacattccacccccacagctttctccggctttgcacagttggaaaagtagtgggaaattctttacatataaagggctccggatcttctatcaggacagtgtgggagtggttgggagccccgagatagttgtacttctgcacggatttcctacttcctcctatgactggtacaagatctgggaagggctcaccttacggttccatagggtcattgctcttgatttcctcggctttggcttttctgataaacctcggccacatcattactctatctttgagcaggcatccattgtcgaagctcttcttaggcatttgggtttacagaatagacgtataaaccttctgagtcacgactatggagacatcgttgcccaagagttattatataggtataagcagaatcggagcggcaggctgacgatcaagtcactgtgtctgagtaacggcggaatcttccctgaaactcatcggccactgctgctccagaaactcctgaaggacggcggagttctgtccccgattctgacccgcctgatgaactttttcgttttctctcgcggtctgctgcagtacattaaccagaggaagaagttcagacggaggtgggtcggcgcactggccagtgtcaccatacctatccacttcatttatggcccattggaccccgtcaatccttacccggaatttctagaactgtaccggaaaaccttacccagatcgactgtgtctattctcgacgatcatatctcccattatccacagttagaggatcctatgggttttcttaacgcatatatgggattcatcaactctttctag

SEQ ID NO: 88918 - DNA, 879 bp, Artificial Sequence
  derived and/or modified sequence
atgagagagtggtgggtgcaggtcgggttactagctgttcctctgcttgccgcttatctacacattccaccccctcagctaagccccgcattgcattcatggaagagtagcgggaaattcttcacgtataaagggctgcggatcttctaccaggatagcgtgggagtggtaggctccccggagattgtcgtattgcttcatggcttcccaacgtcctcttacgattggtataagatttgggaaggcctgactcttaggtttcacagagtaatcgctctggactttctgggcttcgggttttctgataaacctagaccacatcactacagtattttcgaacaagcttcgattgtagaggctctcctcagacacctgggcctgcagaaccgcagaattaatctcctatcacacgattacggggacatcgtggcccaggagcttctgtatcggtataaacagaacaggagcgggaggctgacgattaagagcctctgccttagcaacggaggcatcttcccagaaacccatcgcccactgctcctacagaaactgctgaaggatggcggagttctgtcgcctattctgacacgactcatgaactttttcgtcttcagccgaggacttctgcagtacataaatcagagaaagaagtttcgcaggagatgggtgggcgctctggcctccgtgaccatccccattcactttatctatggaccactcgacccggtcaatccataccctgagtttctggagctgtaccgtaagaccctccccaggagcacagtctctattctggacgaccacatatctcactatccccaactcgaggaccctatgggtttcctgaatgcttacatgggcttcatcaactctttttag

SEQ ID NO: 88919 - DNA, 357 bp, Artificial Sequence
  derived and/or modified sequence
atgagagagtggtgggtgcaggtgggcctgctggccgtgcccctgctggccgcctacctgcacatcccccccccccagctgagccccgccctgcacagctggaagagcagcggcaagttcttcacctacaagggcctgagaatcttctaccaggacagcgtgggcgtggtgggcagccccgagatcgtggtgctgctgcacggcttccccaccagcagctacgactggtacaagatctgggagggcctgaccctgagattccacagagtgatcgccctggacttcctgggcttcggcttcagcgacaagcccagaccccaccactacagcatcttcgagcaggccagcatcgtgtag

SEQ ID NO: 88920 - DNA, 624 bp, Artificial Sequence
  derived and/or modified sequence
atgagagagtggtgggtgcaggtgggcctgctggccgtgcccctgctggccgcctacctgcacatcccccccccccagctgagccccgccctgcacagctggaagagcagcggcaagttcttcacctacaagggcctgagaatcttctaccaggacagcgtgggcgtggtgggcagccccgagatcgtggtgctgctgcacggcttccccaccagcagctacgactggtacaagatctgggagggcctgaccctgagattccacagagtgatcgccctggacttcctgggcttcggcttcagcgacaagcccagaccccaccactacagcatcttcgagcaggccagcatcgtggaggccctgctgagacacctgggcctgcagaacagaagaatcaacctgctgagccacgactacggcgacatcgtggcccaggagctgctgtacagatacaagcagaacagaagcggcagactgaccatcaagagcctgtgcctgagcaacggcggcatcttccccgagacccacagacccctgctgctgcagaagctgctgaaggacggcggcgtgctgagccccatcctgaccagactgatgaacttcttcgtgttcagcagaggctag

SEQ ID NO: 88921 - DNA, 483 bp, Artificial Sequence
  derived and/or modified sequence
atgagagagtggtgggtgcaggtgggcctgctggccgtgcccctgctggccgcctacctgcacatcccccccccccagctgagccccgccctgcacagctggaagagcagcggcaagttcttcacctacaagggcctgagaatcttctaccaggacagcgtgggcgtggtgggcagccccgagatcgtggtgctgctgcacggcttccccaccagcagctacgactggtacaagatctgggagggcctgaccctgagattccacagagtgatcgccctggacttcctgggcttcggcttcagcgacaagcccagaccccaccactacagcatcttcgagcaggccagcatcgtggaggccctgctgagacacctgggcctgcagaacagaagaatcaacctgctgagccacgactacggcgacatcgtggcccaggagctgctgtacagatacaagcagaacagaagcggcagactgacctag

SEQ ID NO: 88922 - DNA, 384 bp, Artificial Sequence
  derived and/or modified sequence
atgagagagtggtgggtgcaggtgggcctgctggccgtgcccctgctggccgcctacctgcacatcccccccccccagctgagccccgccctgcacagctggaagagcagcggcaagttcttcacctacaagggcctgagaatcttctaccaggacagcgtgggcgtggtgggcagccccgagatcgtggtgctgctgcacggcttccccaccagcagctacgactggtacaagatctgggagggcctgaccctgagattccacagagtgatcgccctggacttcctgggcttcggcttcagcgacaagcccagaccccaccactacagcatcttcgagcaggccagcatcgtggaggccctgctgagacacctgggcctgtag

SEQ ID NO: 88923 - DNA, 522 bp, Artificial Sequence
  derived and/or modified sequence
atgagagagtggtgggtgcaggtgggcctgctggccgtgcccctgctggccgcctacctgcacatcccccccccccagctgagccccgccctgcacagctggaagagcagcggcaagttcttcacctacaagggcctgagaatcttctaccaggacagcgtgggcgtggtgggcagccccgagatcgtggtgctgctgcacggcttccccaccagcagctacgactggtacaagatctgggagggcctgaccctgagattccacagagtgatcgccctggacttcctgggcttcggcttcagcgacaagcccagaccccaccactacagcatcttcgagcaggccagcatcgtggaggccctgctgagacacctgggcctgcagaacagaagaatcaacctgctgagccacgactacggcgacatcgtggcccaggagctgctgtacagatacaagcagaacagaagcggcagactgaccatcaagagcctgtgcctgagcaacggcggcaactgcctgtag

SEQ ID NO: 88924 - protein, 204 aa, Artificial Sequence
  derived and/or modified sequence
MSLKPGEELSPTDENGKVIFDIVDLCTTWEAMEKCKDAGLAKSIGVSNFNRRQLEMILNKPGLKYKPVCNQVECHPYFNRSKLLDFCKSKDIVLVAYSALGSQRDKRWVDPNSPVLLEDPVLCALAKKHKRTPALIALRYQLQRGVVVLAKSYNEQRIRQNVQVFEFQLTAEDMKAIDGLDRNLHYFNSDSFASHPNYPYSDEY

SEQ ID NO: 88925 - DNA, 615 bp, Artificial Sequence
  derived and/or modified sequence
atgtccttaaaacctggcgaagagctgagtcctacagatgagaatggcaaagtaatcttcgacattgtggacctctgcacaacctgggaagcaatggaaaagtgcaaagatgcgggtctcgccaagagcatcggggtgagtaacttcaaccgccggcagcttgagatgattttaaataagcctgggctcaagtacaagcccgtgtgcaaccaggtggaatgccacccatacttcaatcgcagcaaattgctggacttctgcaagtctaaggacatcgtgcttgtcgcttattcagcgctcggctcccagcgggacaagcgttgggtggatcctaatagccccgtgctcctcgaggatcccgtactgtgcgcccttgctaagaaacataagagaacccccgctctgatagctctgcggtaccagctacaaagaggtgtggttgtcttggccaaaagttacaatgagcagaggatcaggcagaatgttcaggtgtttgaattccagctgactgcggaagatatgaaggcaatcgacgggctggaccgtaatctccactattttaactctgacagctttgcatcgcaccctaactatccttacagcgacgagtactag

SEQ ID NO: 88926 - DNA, 615 bp, Artificial Sequence
  derived and/or modified sequence
atgagcctgaagccaggagaggagctgagccccacagatgaaaatggcaaggtgatctttgacatcgtggacctgtgcaccacctgggaggccatggagaagtgcaaggatgctggcctggccaagagcattggagtgagcaacttcaacagacggcagctggagatgatcctgaacaagccaggcctgaagtacaagcctgtgtgcaaccaggtggagtgccacccctacttcaacagaagcaagctgctggacttctgcaagagcaaggacatcgtgctggtggcctacagcgccctgggcagccagagggacaagcgctgggtggaccccaacagccctgtgctgctggaggaccctgtgctgtgtgccctggccaagaagcacaagaggaccccagccctgattgccctgcgctaccagctgcagaggggcgtggtggtgctggccaagagctacaatgagcagaggatccggcagaatgtgcaggtgtttgagttccagctgacagctgaggacatgaaggccattgatggcctggacaggaacctgcactacttcaacagcgacagctttgccagccaccccaactacccctacagtgatgagtactag

SEQ ID NO: 88927 - DNA, 1262 bp, Artificial Sequence
  derived and/or modified sequence
aacatgttccttgaggttgaagcaaatctgaccgattttcaatgtaaaaataacatataaaaactgttctcggagttatttctaaacagaactaagatcagaattctttgaatcatcagaatcatctcttttgaaaaatcgattcatcaaatgaatcttcagccaacaactgttcaagaaggatgcaaatatcacaggttccgagaagtaaagctttggaggtcacaaaattagcaatagaagctgggttccgccatatagattctgctcatttatacaataatgaggagcaggttggactggccatccgaagcaagattgcagatggcagtgtgaagagagaagacatattctacacttcaaagctttggtccacttttcatcgaccagagttggtccgaccagccttggaaaactcactgaagaaagctcaattggactatgttgacctctatcttattcattctccaatgtctctaaagccaggtgaggaactttcaccaacagatgaaaatggaaaagtaatatttgacatagtggatctctgtaccacctgggaggccatggagaagtgtaaggatgcaggattggccaagtccattggggtgtcaaacttcaaccgcaggcagctggagatgatcctcaacaagccaggactcaagtacaagcctgtctgcaaccaggtagaatgtcatccgtatttcaaccggagtaaattgctagatttctgcaagtcgaaagatattgttctggttgcctatagtgctctgggatctcaacgagacaaacgatgggtggacccgaactccccggtgctcttggaggacccagtcctttgtgccttggcaaaaaagcacaagcgaaccccagccctgattgccctgcgctaccagctgcagcgtggggttgtggtcctggccaagagctacaatgagcagcgcatcagacagaacgtgcaggtttttgagttccagttgactgcagaggacatgaaagccatagatggcctagacagaaatctccactattttaacagtgatagttttgctagccaccctaattatccatattcagatgaatattaacatggagggctttgcctgatgtctaccagaagccctgtgtgtggatggtgacgcagaggacgtctctatgccggtgactggacatatcacctctacttaaatccgtcctgtttagcgacttcagtcaactacagctgagtccataggccagaaagacaataaatttttatcattttg

SEQ ID NO: 88928 - DNA, 615 bp, Artificial Sequence
  derived and/or modified sequence
atgagcctgaagcccggcgaggagctgagccccaccgacgagaacgggaaggtcatttttgatatcgtggacttgtgtaccacatgggaggccatggagaaatgtaaagatgctggcctggctaaatccattggggtgtccaattttaacagaagacagctggagatgattctcaacaagcccggcctgaagtataaacccgtctgtaatcaggtggagtgccatccttactttaacaggagtaagctcttggatttttgcaagagcaaggatatcgtactcgtggcatatagtgctctcggcagccagcgcgacaagcgctgggtcgaccccaactcacccgtcctattggaggatcccgtactttgtgctctggccaagaagcacaagcgaacaccagcactgatcgcacttcgctaccagctccagcgaggcgttgtggtactagccaagtcctacaatgaacaacgaattcgccaaaatgtccaggtgtttgagtttcagctcacagctgaagacatgaaggctatcgacggcctcgatagaaacctccactacttcaattctgactcattcgcctcccaccccaattatccttacagcgatgagtactag

SEQ ID NO: 88929 - DNA, 615 bp, Artificial Sequence
  derived and/or modified sequence
atgtcactgaagccaggagaggaactctcccctacagacgagaatgggaaagtgatttttgatatcgtggacttatgtacaacctgggaagcaatggagaagtgtaaggacgctggcctggcgaaatcaataggcgtgagtaacttcaatcggagacagctggagatgatcctcaacaagccaggtctgaagtacaagcccgtctgcaaccaagtggagtgtcacccttattttaaccgatccaagttgctcgatttctgtaaaagtaaagacatcgtcctggtggcatattcagcattgggcagccagcgagacaaacgttgggtggaccctaacagcccggtgctgctggaggaccctgttctgtgcgcattggctaagaagcacaaacgcacccctgcactgattgcactgcgatatcagcttcaacgcggagtagtggtactagccaaaagctacaacgaacagcggatccggcagaatgtgcaggtgtttgagtttcagctgaccgctgaggacatgaaggccatcgatggtcttgaccgtaatctccactacttcaactccgattccttcgcctcccaccccaactatccttattcagatgagtactag

SEQ ID NO: 88930 - DNA, 615 bp, Artificial Sequence
  derived and/or modified sequence
atgagcctgaagcccggcgaggagctgagccccaccgacgagaacggcaaggtgatcttcgacatcgtggacctgtgcaccacctgggaggccatggagaagtgcaaggacgccggcctggccaagagcatcggcgtgagcaacttcaacagaagacagctggagatgatcctgaacaagcccggcctgaagtacaagcccgtgtgcaaccaggtggagtgccacccctacttcaacagaagcaagctgctggacttctgcaagagcaaggacatcgtgctggtggcctacagcgccctgggcagccagagagacaagagatgggtggaccccaacagccccgtgctgctggaggaccccgtgctgtgcgccctggccaagaagcacaagagaacccccgccctgatcgccctgagataccagctgcagagaggcgtggtggtgctggccaagagctacaacgagcagagaatcagacagaacgtgcaggtgttcgagttccagctgaccgccgaggacatgaaggccatcgacggcctggacagaaacctgcactacttcaacagcgacagcttcgccagccaccccaactacccctacagcgacgagtactag

SEQ ID NO: 88931 - DNA, 390 bp, Artificial Sequence
  derived and/or modified sequence
atgatgaccgacctgaagcagagccacagcgtgagactgaacgacggccccttcatgcccgtgctgggcttcggcacctacgcccccgaccacacccccaagagccaggccgccgaggccaccaaggtggccatcgacgtgggcttcagacacatcgacagcgcctacctgtaccagaacgaggaggaggtgggccaggccatctgggagaagatcgccgacggcaccgtgaagagagaggagatcttctacaccatcaagctgtgggccaccttcttcagagccgagctggtgcaccccgccctggagagaagcctgaagaagctgggccccgactacgtggacctgttcatcatccacgtgcccttcgccatgaagggcagcagctag

SEQ ID NO: 88932 - DNA, 492 bp, Artificial Sequence
  derived and/or modified sequence
gcaaataaagaacgcaggagccttgtctcctactgggctgtcagtgaggaaaaggaggaaagacaggttagctggggatgatgacggatctgaagcaaagccattcagtgaggctgaatgatggacccttcatgccagtgctgggatttggcacttatgctcctgatcatactcccaaaagccaggctgccgaggccaccaaagtggctattgacgtaggcttccgccatattgattcagcatacttataccaaaatgaggaggaggttggacaggccatttgggagaagatcgctgatggtaccgtcaagagagaggaaatattctacaccatcaagctttgggctactttctttcgggcagaattggttcacccggccctagaaaggtcactgaagaaacttggaccggactatgtagatctcttcattattcatgtaccatttgctatgaagggttcttcctgagagaggcagatttgagtgaggtgca

SEQ ID NO: 88933 - DNA, 390 bp, Artificial Sequence
  derived and/or modified sequence
atgatgactgatctgaagcagtcccattccgtgcgtctgaacgatggaccattcatgcccgtattgggttttggtacatacgcacccgaccatactcctaagtctcaggccgccgaggccactaaggttgcgatcgatgtgggattccgccacatagactctgcgtacctttatcagaatgaagaagaagtcggtcaggctatttgggagaaaattgccgacggcaccgtcaagcgggaggaaattttctacacaataaaactctgggcaaccttttttagagctgagcttgtacatccagcactagaacgaagcctgaaaaaattgggaccagactatgtcgatctgttcatcatccacgtaccctttgcaatgaaaggaagctcctag

SEQ ID NO: 88934 - DNA, 390 bp, Artificial Sequence
  derived and/or modified sequence
atgatgacagacctgaagcagagccacagcgtgcggctgaatgatggccccttcatgcctgtgctgggcttcggcacctacgccccagaccacacccccaagagccaggccgctgaggccaccaaggtggccattgatgtgggcttccgccacatcgacagcgcctacctgtaccagaatgaggaggaggtgggccaggccatctgggagaagattgctgatggcaccgtgaagcgggaggagatcttctacaccatcaagctgtgggccaccttcttccgggcagagctggtgcacccagccctggagaggagcctgaagaagctgggccctgactatgtggacctcttcatcatccacgtgccctttgccatgaagggcagcagctag

SEQ ID NO: 88935 - DNA, 390 bp, Artificial Sequence
  derived and/or modified sequence
atgatgaccgacctgaagcagagccacagcgtgcggctgaacgacggaccttttatgcccgttctgggcttcggaacatacgcccctgatcacaccccaaaatcgcaggcagctgaggctaccaaggtggctatcgacgttggctttcggcacattgacagtgcttacctttaccagaacgaagaagaggtcggacaggcaatttgggaaaagatcgccgatggcaccgtaaaaagggaggaaatcttctacaccatcaaattgtgggctactttcttccgagctgagctcgtccaccctgcactagagagaagcctgaagaagttagggcctgattacgtcgatctctttatcatacatgtgcccttcgcgatgaaaggcagtagttag

SEQ ID NO: 88936 - DNA, 390 bp, Artificial Sequence
  derived and/or modified sequence
atgatgacagatttgaagcagtctcacagtgtgcggctcaacgatgggccatttatgcccgtcttgggctttggcacttacgccccagaccacacccctaagagtcaagccgctgaagccaccaaagttgccatcgatgtggggtttagacacattgatagcgcttatctgtaccaaaatgaagaagaagtcggtcaggccatttgggaaaaaatcgcggacgggactgtgaagcgcgaagagattttttacaccatcaaattatgggcgacattcttccgagctgagctcgtgcatccggctctcgaaagatctctcaaaaagctgggcccagactatgtagacctgttcatcatacacgtgccattcgccatgaagggtagcagctag

SEQ ID NO: 88937 - protein, 1159 aa, Artificial Sequence
  derived and/or modified sequence
MEPITFTARKHLLSNEVSVDFGLQLVGSLPVHSLTTMPMLPWVVAEVRRLSRQSTRKEPVTKQVRLCVSPSGLRCEPEPGRSQQWDPLIYSSIFECKPQRVHKLIHNSHDPSYFACLIKEDAVHRQSICYVFKADDQTKVPEIISSIRQAGKIARQEELHCPSEFDDTFSKKFEVLFCGRVTVAHKKAPPALIDECIEKFNHVSGSRGSESPRPNPPHAAPTGSQEPVRRPMRKSFSQPGLRSLAFRKELQDGGLRSSGFFSSFEESDIENHLISGHNIVQPTDIEENRTMLFTIGQSEVYLISPDTKKIALEKNFKEISFCSQGIRHVDHFGFICRESSGGGGFHFVCYVFQCTNEALVDEIMMTLKQAFTVAAVQQTAKAPAQLCEGCPLQSLHKLCERIEGMNSSKTKLELQKHLTTLTNQEQATIFEEVQKLRPRNEQRENELIISFLRCLYEEKQKEHIHIGEMKQTSQMAAENIGSELPPSATRFRLDMLKNKAKRSLTESLESILSRGNKARGLQEHSISVDLDSSLSSTLSNTSKEPSVCEKEALPISESSFKLLGSSEDLSSDSESHLPEEPAPLSPQQAFRRRANTLSHFPIECQEPPQPARGSPGVSQRKLMRYHSVSTETPHERNVDPSPVGESKHRPGQSSAPAPPPRLNPSASSPNFFKYLKHNSSGEQSGNAVPKSISYRNALRKKLHSSSSVPNFLKFLAPVDENNTSDFMNTKRDFESKANHLGDSGGTPVKTRRHSWRQQIFLRVATPQKACDSSSRYEDYSELGELPPRSPLEPVCEDGPFGPPPEEKKRTSRELRELWQKAILQQILLLRMEKENQKLQASENDLLNKRLKLDYEEITPCLKEVTTVWEKMLSTPGRSKIKFDMEKMHSAVGQGVPRHHRGEIWKFLAEQFHLKHQFPSKQQPKDVPYKELLKQLTSQQHAILIDLGRTFPTHPYFSAQLGAGQLSLYNILKAYSLLDQEVGYCQGLSFVAGILLLHMSEEEAFKMLKFLMFDMGLRKQYRPDMIILQMEKTINQVFEMDIAKQLQAYEVEYHVLQEELIDSSPLSDNQRMDKLEKTNSSLRKQNLDLLEQLQVANGRIQSLEATIEKLLSSESKLKQAMLTLELERSALLQTVEELRRRSAEPSDREPECTQPEPTGD

SEQ ID NO: 88938 - DNA, 3480 bp, Artificial Sequence
  derived and/or modified sequence
atggagcccatcaccttcaccgccagaaagcacctgctgagcaacgaggtgagcgtggacttcggcctgcagctggtgggcagcctgcccgtgcacagcctgaccaccatgcccatgctgccctgggtggtggccgaggtgagaagactgagcagacagagcaccagaaaggagcccgtgaccaagcaggtgagactgtgcgtgagccccagcggcctgagatgcgagcccgagcccggcagaagccagcagtgggaccccctgatctacagcagcatcttcgagtgcaagccccagagagtgcacaagctgatccacaacagccacgaccccagctacttcgcctgcctgatcaaggaggacgccgtgcacagacagagcatctgctacgtgttcaaggccgacgaccagaccaaggtgcccgagatcatcagcagcatcagacaggccggcaagatcgccagacaggaggagctgcactgccccagcgagttcgacgacaccttcagcaagaagttcgaggtgctgttctgcggcagagtgaccgtggcccacaagaaggccccccccgccctgatcgacgagtgcatcgagaagttcaaccacgtgagcggcagcagaggcagcgagagccccagacccaaccccccccacgccgcccccaccggcagccaggagcccgtgagaagacccatgagaaagagcttcagccagcccggcctgagaagcctggccttcagaaaggagctgcaggacggcggcctgagaagcagcggcttcttcagcagcttcgaggagagcgacatcgagaaccacctgatcagcggccacaacatcgtgcagcccaccgacatcgaggagaacagaaccatgctgttcaccatcggccagagcgaggtgtacctgatcagccccgacaccaagaagatcgccctggagaagaacttcaaggagatcagcttctgcagccagggcatcagacacgtggaccacttcggcttcatctgcagagagagcagcggcggcggcggcttccacttcgtgtgctacgtgttccagtgcaccaacgaggccctggtggacgagatcatgatgaccctgaagcaggccttcaccgtggccgccgtgcagcagaccgccaaggcccccgcccagctgtgcgagggctgccccctgcagagcctgcacaagctgtgcgagagaatcgagggcatgaacagcagcaagaccaagctggagctgcagaagcacctgaccaccctgaccaaccaggagcaggccaccatcttcgaggaggtgcagaagctgagacccagaaacgagcagagagagaacgagctgatcatcagcttcctgagatgcctgtacgaggagaagcagaaggagcacatccacatcggcgagatgaagcagaccagccagatggccgccgagaacatcggcagcgagctgccccccagcgccaccagattcagactggacatgctgaagaacaaggccaagagaagcctgaccgagagcctggagagcatcctgagcagaggcaacaaggccagaggcctgcaggagcacagcatcagcgtggacctggacagcagcctgagcagcaccctgagcaacaccagcaaggagcccagcgtgtgcgagaaggaggccctgcccatcagcgagagcagcttcaagctgctgggcagcagcgaggacctgagcagcgacagcgagagccacctgcccgaggagcccgcccccctgagcccccagcaggccttcagaagaagagccaacaccctgagccacttccccatcgagtgccaggagcccccccagcccgccagaggcagccccggcgtgagccagagaaagctgatgagataccacagcgtgagcaccgagaccccccacgagagaaacgtggaccccagccccgtgggcgagagcaagcacagacccggccagagcagcgcccccgcccccccccccagactgaaccccagcgccagcagccccaacttcttcaagtacctgaagcacaacagcagcggcgagcagagcggcaacgccgtgcccaagagcatcagctacagaaacgccctgagaaagaagctgcacagcagcagcagcgtgcccaacttcctgaagttcctggcccccgtggacgagaacaacaccagcgacttcatgaacaccaagagagacttcgagagcaaggccaaccacctgggcgacagcggcggcacccccgtgaagaccagaagacacagctggagacagcagatcttcctgagagtggccaccccccagaaggcctgcgacagcagcagcagatacgaggactacagcgagctgggcgagctgccccccagaagccccctggagcccgtgtgcgaggacggccccttcggccccccccccgaggagaagaagagaaccagcagagagctgagagagctgtggcagaaggccatcctgcagcagatcctgctgctgagaatggagaaggagaaccagaagctgcaggccagcgagaacgacctgctgaacaagagactgaagctggactacgaggagatcaccccctgcctgaaggaggtgaccaccgtgtgggagaagatgctgagcacccccggcagaagcaagatcaagttcgacatggagaagatgcacagcgccgtgggccagggcgtgcccagacaccacagaggcgagatctggaagttcctggccgagcagttccacctgaagcaccagttccccagcaagcagcagcccaaggacgtgccctacaaggagctgctgaagcagctgaccagccagcagcacgccatcctgatcgacctgggcagaaccttccccacccacccctacttcagcgcccagctgggcgccggccagctgagcctgtacaacatcctgaaggcctacagcctgctggaccaggaggtgggctactgccagggcctgagcttcgtggccggcatcctgctgctgcacatgagcgaggaggaggccttcaagatgctgaagttcctgatgttcgacatgggcctgagaaagcagtacagacccgacatgatcatcctgcagatggagaagaccatcaaccaggtgttcgagatggacatcgccaagcagctgcaggcctacgaggtggagtaccacgtgctgcaggaggagctgatcgacagcagccccctgagcgacaaccagagaatggacaagctggagaagaccaacagcagcctgagaaagcagaacctggacctgctggagcagctgcaggtggccaacggcagaatccagagcctggaggccaccatcgagaagctgctgagcagcgagagcaagctgaagcaggccatgctgaccctggagctggagagaagcgccctgctgcagaccgtggaggagctgagaagaagaagcgccgagcccagcgacagagagcccgagtgcacccagcccgagcccaccggcgactag

SEQ ID NO: 88939 - DNA, 3480 bp, Artificial Sequence
  derived and/or modified sequence
atggagccaatcacattcacagcccggaagcatctgttgtccaacgaagttagcgtagactttggcctgcagctggtgggttccctccccgtccactctctgacaacaatgcctatgctgccctgggttgttgccgaggttagaagattgtcaaggcaatccacaagaaaggagccagtgactaagcaagtgaggctctgtgtgtccccgtcagggctccgttgcgaacccgagcctggtaggtcacaacagtgggacccactgatttattccagcatctttgaatgcaagcctcagcgggtgcataagctcattcataactctcacgatcctagctacttcgcctgtctcattaaggaggatgccgttcaccggcaaagcatttgttacgtcttcaaagcagatgatcagaccaaggtcccagagattatcagcagcatcagacaggccgggaaaattgcccgacaggaagaactgcactgcccatcagaattcgacgacacttttagtaaaaaattcgaagtgctgttttgtggaagggtcaccgtcgcccataagaaagccccgcccgctctcattgatgaatgtatcgagaagttcaatcacgtgtccggatcacgaggatctgagagtcctcggccaaatcccccccatgctgcccccactgggagccaggagcccgtgcgccgcccaatgaggaagagtttctctcagccgggactgcgatcactggctttcaggaaagagctgcaggacggggggctgcgctcatccggcttcttctcctcttttgaggaatccgacatagagaaccatctgatctcaggtcataatattgttcagcccaccgatattgaggagaaccgaacaatgctctttactattggacaatcagaggtgtatttgatctctccagatactaaaaagatcgcattggaaaaaaatttcaaagagatctctttttgtagccaggggatccggcatgtggaccatttcggttttatctgccgcgaaagctcaggaggaggggggttccatttcgtctgttatgtctttcagtgtacaaacgaggctctggtggatgagataatgatgactctgaagcaggccttcactgtagccgccgttcagcagacggcaaaggcaccagctcagctgtgtgaggggtgtcccctgcagtctttacacaagctctgtgagcgtatcgagggcatgaactcctcaaagaccaaacttgaactgcagaaacacctgacaaccttaacaaaccaagaacaggccaccatctttgaagaagtccagaaactacggcccagaaatgaacagcgagaaaacgaactgatcatttcctttctgcgctgcctgtacgaggagaagcagaaggagcacatccatattggagagatgaagcaaacatctcaaatggcagctgagaatatcgggtccgagctgcctccaagcgccactagattccggctcgacatgcttaaaaacaaagcaaagaggagtctgacagaatctctggagagcatactgagcagggggaacaaagcccgcggcctgcaggaacatagcatcagcgtggacctcgattcctcattgtccagcactctgagcaatacctccaaggaaccatctgtgtgtgaaaaagaggccttgccaatctcagaatctagctttaagttgctcggaagtagtgaagacctctccagtgacagtgagagccatctgcctgaagagcctgcccccctctcccctcaacaagcatttcggagacgggcaaataccctcagtcactttccaatcgagtgccaggagccgccacagccagcgagaggatcgccaggcgtatcacagcgaaaactgatgcgataccacagcgttagcacggagacgccacatgaacgaaacgtcgaccctagccctgtcggggagagcaagcacaggcccggtcagtctagcgctccggctcctccgcccaggctgaaccccagtgcttctagccctaatttctttaaatatctgaaacacaactcctccggcgaacagtccggtaacgccgtaccaaaatcaatttcttatcggaacgctctgcgcaaaaagctgcattcaagcagctccgtgcccaatttcctgaagtttctggctcctgtggacgaaaacaacacatccgatttcatgaacacaaagcgagactttgagagcaaggccaaccaccttggcgattcagggggcacgccagtgaagactcgccgacatagctggaggcagcaaatctttctgcgagtggccactccccagaaggcctgcgactcaagctctcggtacgaagactactccgaactgggtgagttgccacctcgcagccctctggaacccgtgtgcgaagatggaccattcggcccaccaccagaggaaaagaagaggacttctcgggagctcagggagttgtggcaaaaggctattctgcagcagattctgctactccgcatggagaaagaaaaccagaaattgcaggcctctgagaatgaccttcttaataagcggctcaagctggattatgaagaaatcacaccatgtctcaaggaggttactactgtgtgggagaagatgctgagtacaccgggtcgatcaaaaatcaagtttgatatggaaaaaatgcacagcgccgtgggccagggagtgcccagacaccaccggggagagatatggaaattcctggctgagcaatttcatctcaaacatcagttcccaagtaagcagcagcctaaggatgtcccctataaggaattattgaagcaattgacaagccagcagcacgccattctcattgatctggggcgcacttttccaacacatccatactttagtgctcagctaggcgcaggccaactgagcctctataacatcctgaaagcttatagcctgctggaccaggaagtgggctattgtcagggactctcttttgtggcagggatcctcctgctccatatgtctgaagaagaagctttcaaaatgctgaaattcctcatgttcgacatgggattgcggaagcaatataggcctgatatgatcattctccagatggagaagaccatcaatcaggtgttcgagatggatatcgcaaaacagctgcaggcctatgaggtcgaatatcacgtcctgcaggaggaactaatagactcatcccccctgtccgataatcagagaatggataagctggaaaaaacgaattcctccctgcgaaagcagaacttagacttgctggaacagctgcaggttgctaatggaagaattcaaagcctcgaggctactattgaaaagctcctgtcaagtgagagcaaattgaagcaggccatgttgactctcgaactggaacgctcagcgctacttcagaccgtagaggagctcaggaggcgcagtgctgaaccctcagatagagaaccggaatgtacccaaccggagcccaccggggactag

SEQ ID NO: 88940 - DNA, 3480 bp, Artificial Sequence
  derived and/or modified sequence
atggagcccatcaccttcaccgccaggaagcacctgctgagcaatgaggtgtctgtggactttggcctgcagctggtgggcagcctgcctgtgcacagcctgaccaccatgcccatgctgccctgggtggtggccgaggtgcggcggctgagccggcagagcaccaggaaggagcctgtgaccaagcaggtgcggctgtgtgtgagccccagcggcctgcgctgtgagcctgagcccggccgcagccagcagtgggaccccctcatctacagcagcatctttgagtgcaagccccagagggtgcacaagctgatccacaacagccatgaccccagctactttgcctgcctgatcaaggaggatgctgtgcaccggcagagcatctgctacgtgttcaaggcagatgaccagaccaaggtgcctgagatcatcagcagcatccggcaggccggcaagatcgcccggcaggaggagctgcactgccccagcgagtttgatgacaccttcagcaagaagtttgaggtgctcttctgtggccgggtgacagtggcccacaagaaggcccccccagccctgattgatgaatgtattgagaagttcaaccacgtgtctggcagccggggcagcgagagcccccggcccaacccccctcatgctgcccccaccggcagccaggagcctgtgagaagacccatgaggaagagcttcagccagcccggcctgcggagcctggccttcaggaaggagctgcaggacggcggcctgcggagcagcggcttcttcagcagctttgaggagagtgacatcgagaaccacctgatcagcggccacaacatcgtgcagcccacagacattgaagaaaatagaaccatgctgttcaccatcggccagagcgaggtgtacctgatcagcccagacaccaagaagatcgccctggagaagaacttcaaggagatctccttctgcagccagggcatccgccacgtggaccacttcggcttcatctgccgggagagcagcggcggcggcggcttccactttgtgtgctacgtgttccagtgcaccaatgaggccctggtggatgagatcatgatgaccctgaagcaggccttcaccgtggccgctgtgcagcagacagccaaggccccagcccagctgtgtgagggctgccccctgcagagcctgcacaagctgtgtgagcgcatcgagggcatgaacagcagcaagaccaagctggagctgcagaagcacctgaccaccctgaccaaccaggagcaggccaccatctttgaggaggtgcagaagctgcggcccagaaatgagcagcgggagaatgaactcatcatctccttcctgcgctgcctgtatgaggagaagcagaaggagcacatccacatcggggagatgaagcagaccagccagatggctgctgagaacatcggcagcgagctgcccccatctgccacccgcttccggctggacatgctgaagaacaaggccaagaggagcctgacagagagcctggagagcatcctgagccggggcaacaaggcccggggcctgcaggagcacagcatctctgtggacctggacagcagcctgagcagcaccctgagcaacaccagcaaggagcccagcgtgtgtgagaaggaggccctgcccatcagcgagagcagcttcaagctgctgggcagcagcgaggacctgagcagtgacagcgagagccacctgcctgaggagcccgcccccctgagcccccagcaggccttcagaagaagagccaacaccctgagccacttccccatcgagtgccaggagcccccccagcctgcccggggcagccctggggtgtcccagaggaagctgatgagataccacagcgtgtccacagagacccctcatgaaagaaatgtggaccccagccctgtgggggagagcaagcaccggcccggccagagcagcgccccagcccccccaccccggctgaaccccagcgccagcagccccaacttcttcaagtacctgaagcacaacagcagcggggagcagagcggaaatgctgtgcccaagagcatctcctacagaaatgccctgaggaagaagctgcacagcagcagctctgtgcccaacttcctgaagttcctggcccctgtggatgagaacaacaccagtgacttcatgaacaccaagagggactttgagagcaaggccaaccacctgggggacagcggcggcacccctgtgaagaccaggaggcacagctggaggcagcagatcttcctgcgggtggccaccccccagaaggcctgtgacagcagcagccgctatgaggactacagcgagctgggggagctgccccccaggagccccctggagcctgtgtgtgaagatggccccttcggccccccacctgaggagaagaagaggaccagccgggagctgcgggagctgtggcagaaggccatcctgcagcagatcctgctgctgaggatggagaaggagaaccagaagctgcaggcctctgaaaatgacctgctgaacaagaggctgaagctggactatgaggagatcaccccctgcctgaaggaggtgaccaccgtgtgggagaagatgctgagcaccccaggccgcagcaagatcaagtttgacatggagaagatgcacagcgctgtgggccagggcgtgcccaggcaccacagaggagagatctggaagttcctggccgagcagttccacctgaagcaccagttccccagcaagcagcagcccaaggatgtgccctacaaggagctgctgaagcagctgaccagccagcagcacgccatcctgattgacctgggccgcaccttccccacccacccctacttcagcgcccagctgggcgccggccagctgagcctgtacaacatcctgaaggcctacagcctgctggaccaggaggtgggctactgccagggcctgagctttgtggccggcatcctgctgctgcacatgtctgaggaggaggccttcaagatgctgaagttcctgatgtttgacatgggcctgaggaagcagtacagaccagacatgatcatcctgcagatggagaagaccatcaaccaggtgtttgagatggacatcgccaagcagctgcaggcctatgaggtggagtaccacgtgctgcaggaggagctgattgacagcagccccctgagtgacaaccagaggatggacaagctggagaagaccaacagcagcctgaggaagcagaacctggacctgctggagcagctgcaggtggccaacggccgcatccagagcctggaggccaccatcgagaagctgctgagcagcgagagcaagctgaagcaggccatgctgaccctggagctggagaggtctgccctgctgcagacagtggaggagctgcggaggagatctgctgagcccagcgaccgggagcctgagtgcacccagcctgagcccactggagactag

SEQ ID NO: 88941 - DNA, 3480 bp, Artificial Sequence
  derived and/or modified sequence
atggagcccatcaccttcaccgcccggaagcacctgctgagcaacgaagtgagtgttgacttcggactgcaactggtggggtcattgccggttcactcacttactaccatgccgatgctcccttgggttgtggccgaggtgcggaggctgagtagacaatcaacccgtaaggaaccagttacaaaacaagtgcggttgtgtgtcagccccagtgggttaagatgtgagccagagccgggtcgtagccaacagtgggacccactgatttactcttccatttttgaatgcaaacctcaacgggtgcacaagctaatacataattcccatgatccctcctatttcgcttgcctcattaaagaggacgccgtgcatcgacagtctatttgctatgtgtttaaggcagacgaccagacaaaagttcccgagattataagcagtattcggcaggcaggtaagatagcccggcaggaggagcttcattgcccaagcgagttcgacgatacattttcgaagaagtttgaggtgttgttttgcgggcgcgtgactgttgctcacaagaaagcaccacctgcacttattgatgaatgtattgaaaaattcaatcacgttagcggatctcgcggctccgagagcccccggcctaatccgccacacgccgccccaaccgggtctcaggagcccgtgagacgaccgatgagaaaatcgttctcccagccaggacttcggagcctggcgttccgtaaggagctgcaagacggcggcttgcggagcagtggctttttctccagttttgaggagagcgacatcgagaaccatctgattagcgggcacaatatagttcagcccacagacatagaggagaacagaaccatgctatttaccattgggcagagtgaagtttatctgatctccccagacaccaagaaaattgctctcgagaagaactttaaggagatatcattttgtagccagggcatccgacacgtagaccacttcggctttatctgtagagagagcagcggcggcgggggattccattttgtgtgctacgtgttccagtgcaccaatgaggcactcgtggacgaaataatgatgactttgaaacaggcttttactgttgccgccgtgcagcagacagccaaggcacccgctcagctgtgtgaaggatgtccccttcagagcctgcataagctgtgtgaaagaattgagggtatgaattccagcaagaccaagctggagctccaaaagcatcttacaacacttaccaatcaagaacaggctactatctttgaggaagtgcagaagctgagaccccgaaatgaacagcgggaaaatgagctgatcatctcattcctcaggtgcttgtacgaggagaagcagaaggagcacattcatatcggtgaaatgaaacagacatcacaaatggccgccgaaaacattggaagcgagctccctcccagcgcaacacgcttcagattggacatgttgaaaaataaagccaaaagaagcctaaccgagagtttagagtccatcctgagtcgtggaaacaaagctagggggctacaggaacacagcatatcagttgacttggacagctccctgtcttctacgttaagtaatacgtcaaaagagcccagtgtatgcgaaaaagaagctctgccaatctcagaaagctcctttaagctgctgggcagctctgaggacctgtcatctgactccgaaagtcacttgcctgaggagccagccccacttagcccacagcaagcctttcggcggagggctaatacgctgtcccattttcccatcgaatgccaagaaccccctcagcctgcaaggggaagcccaggtgtaagtcagcggaaacttatgaggtatcatagcgtctcaaccgagactccccacgagcggaacgtggacccttcgccggtgggcgaaagcaaacacagacccgggcagtcctcagctcccgctcccccccccaggctaaaccctagcgcaagctctcccaacttttttaaatatctgaagcataattcttctggtgaacagtccgggaatgctgttccaaagagtatttcatatcgaaatgcactgcgtaagaaattgcactcatcttcgagtgtgccgaattttctcaagtttctcgccccagtggacgaaaataacacatctgatttcatgaacaccaagagagactttgagtccaaagcaaaccacttgggagactctggcgggactcctgtaaagacccgcaggcactcttggaggcaacagatattcctgcgggtcgccacacctcaaaaggcttgcgacagttcttctcgctatgaagattattcggagctgggagaactgccccccaggagtccattggaacccgtttgcgaagatggccccttcggtccgccacctgaagagaaaaagcgaacatctcgcgaactacgcgagttatggcagaaggcgatcctccaacagatcttgcttttgaggatggaaaaagaaaatcagaagctacaggcctctgagaacgacctgctgaataagcgactgaagctggattatgaggagattacaccatgcttgaaggaggtcacgaccgtctgggagaagatgttatcgacacctggaagatctaagatcaagttcgacatggagaagatgcactcagccgtggggcagggagtgcctcgtcatcatcgcggggaaatttggaagtttctggcagagcagtttcacttaaagcatcagtttcctagtaaacagcagcctaaggatgtaccttacaaagagctgctcaagcagttgacgagtcagcagcacgcaattctgattgacctgggcaggacctttcccacccacccctacttttccgctcagctcggcgccgggcagctatcactgtacaatattcttaaggcttactcactgttggaccaggaggtggggtactgtcaggggctgtccttcgtggccggcattctcctgctgcatatgagtgaagaggaggctttcaaaatgctgaagtttttgatgttcgacatgggcctgcggaaacagtatcgtccagacatgataattctacagatggagaagacaatcaaccaggttttcgagatggatattgctaagcagctccaggcctacgaagtagagtaccatgtgctgcaggaggagctcatcgactcttcacccctgtcagataaccaacggatggataagctcgagaagacgaattcctccttacgcaagcagaatcttgatctcctcgagcagttgcaggtagcaaatggtaggatccaatcactcgaggccactatcgaaaaactgctgtcctccgaatccaagctcaagcaggcaatgctgacgctggaattggagcggtccgctctgctgcaaacggttgaggagttgcgcaggcggagtgccgagcctagcgaccgcgaaccagaatgcacacagccagagccgactggggattag

SEQ ID NO: 88942 - DNA, 3480 bp, Artificial Sequence
  derived and/or modified sequence
atggagcccatcacttttacagctcggaaacacctcctgtcaaatgaagtgagtgtggatttcggcctgcaactggttgggagcttgcctgtccattctttgactaccatgcccatgctcccctgggtagtcgccgaggtgcgtcgactgtctcgacaatccacacggaaggaaccggtgacgaagcaggtccgcttgtgcgtgagtccgagtggacttagatgcgaacccgagcccggacgcagtcagcagtgggacccgctaatctactcttccatttttgaatgtaaaccccaaagggtacacaaactcatccacaactcacatgatccatcatactttgcctgcttaattaaggaggatgctgtgcataggcaatctatatgttatgtgtttaaggccgatgaccagacgaaagtgccagaaattatatcgagcatacggcaggccggaaagattgcccgacaggaggagctgcattgcccatccgagttcgacgataccttcagcaagaaattcgaggtcctgttttgtgggagggttaccgtggctcacaagaaggcgccaccggcacttatcgatgaatgcatagagaagttcaatcacgtgagcgggtctcgtggttcagaaagcccccgacctaacccacctcatgcagctcctacaggctctcaagagccggtgcgtcgacccatgcggaaatcattctcgcaaccagggttgcgctcgttagcctttagaaaggaactccaggacggtggcttgcgctcctccggattctttagcagcttcgaagaatcggatatcgaaaaccatctgataagcggacacaacatagtgcagccgaccgacatagaagagaataggacgatgctgttcaccatagggcagagtgaggtgtacttgataagcccagatacaaaaaagatcgccttagaaaagaactttaaggaaatttccttctgttctcagggtatacgccacgtggaccactttggattcatctgcagagagtcttcaggtggtggtggcttccatttcgtgtgctatgtttttcagtgcaccaatgaagcactggtggacgagatcatgatgacgttaaagcaggcatttactgtcgcagcggtccagcagaccgcaaaggctccggcacagctctgcgaaggatgtcctctgcagtctctgcacaagctgtgcgagagaattgagggaatgaactcttccaagaccaagctggagctccagaaacacctaacaacccttactaaccaggagcaggcaacgattttcgaggaggttcagaagctgcggccaagaaacgagcaacgcgagaacgagcttattattagcttcttgagatgtctgtacgaggaaaagcaaaaagagcatatccatataggcgagatgaagcagactagtcagatggctgcagaaaacatcggctctgaactgcccccttcggccaccagatttcggctggacatgctgaaaaataaggctaagagaagtttgaccgagtccctggagtcaatattgagtcgaggtaacaaggctaggggcctgcaagagcactctatttcagtggaccttgacagtagcctaagttccactcttagcaatacctcaaaggagcccagcgtgtgcgaaaaagaggcactccctatatcagagtcctctttcaagcttctggggtcctccgaggacctctcttccgactccgaatcccatctgccggaggaaccagccccattgagccctcagcaggcctttcgccgtagggctaacacattgtcacactttcctattgaatgtcaggaacctccccagcccgctagaggttcaccaggggtttctcagcgtaaactgatgagataccactctgtgtctacagagacaccccatgaaaggaatgtggacccttcccctgtgggggaatccaagcataggcccggtcagtcaagcgccccagctccgcctcccagactgaacccctcggcctcatctccaaatttcttcaagtacttgaagcataacagttccggggagcagagcggcaacgccgttcctaagagcatctcttatcggaatgccctacggaaaaaacttcacagttcttcttctgtccctaactttctgaagttcctggcaccggtcgacgaaaataacacttcggactttatgaacaccaagcgagacttcgagtcgaaagccaatcatctgggcgatagcggtggcaccccagtgaagaccaggcgacactcctggcgccagcaaatcttcctgcgagtcgccacacctcagaaagcatgcgactcatctagccggtatgaggattacagcgagttaggagagctacctcctcgaagcccgctggaaccagtgtgtgaagacgggcctttcggccctccgccagaagagaagaaacggaccagcagggagttgcgcgagttgtggcagaaagccatcctccaacagatcttacttttacgcatggaaaaggagaaccagaaactgcaagcttccgaaaatgacttgctgaacaaaagacttaagctcgattacgaagaaattactccgtgcctgaaggaagttactactgtatgggaaaaaatgctaagcacgcccggtagatctaagatcaagttcgacatggaaaagatgcattccgcggtcggccaaggggtgcccagacatcatcgtggagagatttggaagtttctcgctgagcagtttcacctaaagcaccagtttccttctaagcagcaacccaaggacgtgccttacaaggaactacttaagcagctcacttcccagcagcacgctattctgatagatcttggccgaacctttccaacacacccttacttttcagcgcagctaggcgcaggacagctttccctctataacattcttaaggcttactcattgctggatcaggaagttgggtattgccaggggttgtccttcgtagccggtatattactcctccacatgagtgaggaagaggcgtttaaaatgcttaagtttctcatgttcgacatgggactaagaaaacagtatagacctgacatgatcatcctccaaatggaaaagacaattaaccaggtttttgaaatggatattgccaagcagttacaagcctacgaggtggaatatcacgtcttgcaggaggagttgattgatagtagtcctttgtcggacaatcaaaggatggataaattggaaaaaaccaacagtagtcttcgcaaacagaacttagatctgctggaacaactgcaggttgccaatgggcgtatccaaagcttggaggcaactattgagaagcttctttcgagtgagtcaaagttaaagcaggctatgttgacactggaactcgaacggagcgctctgctccagacagtggaggaactgaggaggcgatcagccgagccatccgatcgtgagccagagtgcactcagccagagcccacaggggactag

SEQ ID NO: 88943 - DNA, 4119 bp, Artificial Sequence
  derived and/or modified sequence
ctcttcggctgctgctcctggtgccgccaccgtccgccggtgcctgttgctgccgccgccgcgggacctgctgtgtcctcagctgggtggagaagaggcgggcgccgagccgaggggagccccctccccgtccccccgcggcgggaagagcgcagccagccgggtgcgatggactccccgcccgcccaggccgtccccaggatgcccccaagcacctgcgcgtcccggcccggccccgggctctgagcgcgccgcggcacaggtttctgcatatgaagtgtgtaaaatagattgcttgatccaaaacagaaaaacagtgataactgttttgctgagttcccagacccttcccaagatggaaccaataacattcacagcaaggaaacatctgctttctaacgaggtctcggtggattttggcctgcagctggtgggctccctgcctgtgcattccctgaccaccatgcccatgctgccctgggttgtggctgaggtgcgaagactcagcaggcagtccaccagaaaggaacctgtaaccaagcaagtccggctttgcgtttcaccctctggactgagatgtgaacctgagccagggagaagtcaacagtgggatcccctgatctattccagcatctttgagtgcaagcctcagcgtgttcacaaactgattcacaacagtcatgacccaagttactttgcttgtctgattaaggaagacgctgtccaccggcagagtatctgctatgtgttcaaagccgatgatcaaacaaaagtgcctgagatcatcagctccatccgtcaggcggggaagatcgcccggcaggaggagctgcactgcccgtccgagttcgacgacacgttttccaagaagttcgaggtgctcttctgcggccgcgtgacggtggcgcacaagaaggctccgccggccctgatcgacgagtgcatcgagaagttcaatcacgtcagcggcagccgggggtccgagagcccccgccccaacccgccccatgccgcgcccacagggagccaggagcctgtgcgcaggcccatgcgcaagtccttctcccagcccggcctgcgctcgctggcctttaggaaggagctgcaggatgggggcctccgaagcagcggcttcttcagctccttcgaggagagcgacattgagaaccacctcattagcggacacaatattgtgcagcccacagatatcgaggaaaatcgaactatgctcttcacgattggccagtctgaagtttacctcatcagtcctgacaccaaaaaaatagcattggagaaaaattttaaggagatatccttttgctctcagggcatcagacacgtggaccactttgggtttatctgtcgggagtcttccggaggtggcggctttcattttgtctgttacgtgtttcagtgcacaaatgaggctctggttgatgaaattatgatgaccctgaaacaggccttcacggtggccgcagtgcagcagacagctaaggcgccagcccagctgtgtgagggctgccccctgcaaagcctgcacaagctctgtgagaggatagagggaatgaattcttccaaaacaaaactagaactgcaaaagcacctgacgacattaaccaatcaggagcaggcgactatttttgaagaggttcagaaattgagaccgagaaatgagcagcgagagaatgaattgattatttcttttctgagatgtttatatgaagagaaacagaaagaacacatccatattggggagatgaagcagacatcgcagatggcagcagagaatattggaagtgaattaccacccagtgccactcgatttaggctagatatgctgaaaaacaaagcaaagagatctttaacagagtctttagaaagtattttgtcccggggtaataaagccagaggcctgcaggaacactccatcagtgtggatctggatagctccctgtctagtacattaagtaacaccagcaaagagccatctgtgtgtgaaaaggaggccttgcccatctctgagagctcctttaagctcctcggctcctcggaggacctgtccagtgactcggagagtcatctcccagaagagccagctccgctgtcgccccagcaggccttcaggaggcgagcaaacaccctgagtcacttccccatcgaatgccaggaacctccacaacctgcccgggggtccccgggggtttcgcaaaggaaacttatgaggtatcactcagtgagcacagagacgcctcatgaacgaaatgtggatccttcacctgtgggtgagtctaagcaccgcccaggtcagtcttcagctcctgctcctccacctcgtcttaacccctccgcctcctcgccaaacttttttaagtacctaaaacataattccagtggagaacaaagtgggaatgctgtgccaaagagcatctcctaccgtaatgccctgcggaaaaaacttcattcttcttcctctgtgccaaattttctaaaatttctggctcctgtagatgaaaataacacctctgattttatgaacacaaaaagggactttgaatccaaagcaaaccatcttggtgattctggtgggactcctgtgaagacccggaggcattcctggaggcagcagatattcctccgagtagccaccccgcagaaggcgtgcgattcttccagcagatatgaagattattcagagctgggagagcttcccccacgatctcctttagaaccagtttgtgaagatgggccctttggccccccaccagaggaaaagaaaaggacatctcgtgagctccgagagctgtggcaaaaggctattcttcaacagatactgctgcttagaatggagaaggaaaatcagaagctccaagcctctgaaaatgatttgctgaacaagcgcctgaagctcgattatgaagaaattactccctgtcttaaagaagtaactacagtgtgggaaaagatgcttagcactccaggaagatcaaaaattaagtttgacatggaaaaaatgcactcggctgttgggcaaggtgtgccacgtcatcaccgaggtgaaatctggaaatttctagctgagcaattccaccttaaacaccagtttcccagcaaacagcagccaaaggatgtgccatacaaagaactcttaaagcagctgacttcccagcagcatgcgattcttattgaccttgggcgaacctttcctacacacccatacttctctgcccagcttggagcaggacagctatcgctttacaacattttgaaggcctactcacttctagaccaggaagtgggatattgccaaggtctcagctttgtagcaggcattttgcttcttcatatgagtgaggaagaggcgtttaaaatgctcaagtttctgatgtttgacatggggctgcggaaacagtatcggccagacatgattattttacagatggaaaagaccatcaatcaggtatttgaaatggacatcgctaaacagttacaagcttatgaagttgagtaccacgtccttcaagaagaacttatcgattcctctcctctcagtgacaaccaaagaatggataaattagagaaaaccaacagcagcttacgcaaacagaaccttgacctccttgaacagttgcaggtggcaaatggtaggatccaaagccttgaggccaccattgagaagctcctgagcagtgagagcaagctgaagcaggccatgcttaccttagaactggagcggtcggccctgctgcagacggtggaggagctgcggcggcggagcgcagagcccagcgaccgggagcctgagtgcacgcagcccgagcccacgggcgactgacagctctgcaggagagattgcaacaccatcccacactgtccaggccttaactgagagggacagaagacgctggaaggagagaaggaagcgggaagtgtgcttctcagggaggaaaccggcttgccagcaagtagattcttacgaactccaacttgcaattcagggggcatgtcccagtgttttttttgttgtttttagatactaaatcgtcccttctccagtcctgattactgtacacagtagctttagatggcgtggacgtgaataaatgcaacttatgtttt

SEQ ID NO: 88944 - protein, 665 aa, Artificial Sequence
  derived and/or modified sequence
MQTADHPEVVPFLYNRQQRAHSLFLASAEFCNILSRVLSRARSRPAKLYVYINELCTVLKAHSAKKKLNLAPAATTSNEPSGNNPPTHLSLDPTNAENTASQSPRTRGSRRQIQRLEQLLALYVAEIRRLQEKELDLSELDDPDSAYLQEARLKRKLIRLFGRLCELKDCSSLTGRVIEQRIPYRGTRYPEVNRRIERLINKPGPDTFPDYGDVLRAVEKAAARHSLGLPRQQLQLMAQDAFRDVGIRLQERRHLDLIYNFGCHLTDDYRPGVDPALSDPVLARRLRENRSLAMSRLDEVISKYAMLQDKSEEGERKKRRARLQGTSSHSADTPEASLDSGEGPSGMASQGCPSASRAETDDEDDEESDEEEEEEEEEEEEEATDSEEEEDLEQMQEGQEDDEEEDEEEEAAAGKDGDKSPMSSLQISNEKNLEPGKQISRSSGEQQNKGRIVSPSLLSEEPLAPSSIDAESNGEQPEELTLEEESPVSQLFELEIEALPLDTPSSVETDISSSRKQSEEPFTTVLENGAGMVSSTSFNGGVSPHNWGDSGPPCKKSRKEKKQTGSGPLGNSYVERQRSVHEKNGKKICTLPSPPSPLASLAPVADSSTRVDSPSHGLVTSSLCIPSPARLSQTPHSQPPRPGTCKTSVATQCDPEEIIVLSDSD

SEQ ID NO: 88945 - protein, 1173 aa, Artificial Sequence
  derived and/or modified sequence
MPEPTKKEENEVPAPAPPPEEPSKEKEAGTTPAKDWTLVETPPGEEQAKQNANSQLSILFIEKPQGGTVKVGEDITFIAKVKAEDLLRKPTIKWFKGKWMDLASKAGKHLQLKETFERHSRVYTFEMQIIKAKDNFAGNYRCEVTYKDKFDSCSFDLEVHESTGTTPNIDIRSAFKRSGEGQEDAGELDFSGLLKRREVKQQEEEPQVDVWELLKNAKPSEYEKIAFQYGITDLRGMLKRLKRMRREEKKSAAFAKILDPAYQVDKGGRVRFVVELADPKLEVKWYKNGQEIRPSTKYIFEHKGCQRILFINNCQMTDDSEYYVTAGDEKCSTELFVREPPIMVTKQLEDTTAYCGERVELECEVSEDDANVKWFKNGEEIIPGPKSRYRIRVEGKKHILIIEGATKADAAEYSVMTTGGQSSAKLSVDLKPLKILTPLTDQTVNLGKEICLKCEISENIPGKWTKNGLPVQESDRLKVVHKGRIHKLVIANALTEDEGDYVFAPDAYNVTLPAKVHVIDPPKIILDGLDADNTVTVIAGNKLRLEIPISGEPPPKAMWSRGDKAIMEGSGRIRTESYPDSSTLVIDIAERDDSGVYHINLKNEAGEAHASIKVKVVDFPDPPVAPTVTEVGDDWCIMNWEPPAYDGGSPILGYFIERKKKQSSRWMRLNFDLCKETTFEPKKMIEGVAYEVRIFAVNAIGISKPSMPSRPFVPLAVTSPPTLLTVDSVTDTTVTMRWRPPDHIGAAGLDGYVLEYCFEGSTSAKQSDENGEAAYDLPAEDWIVANKDLIDKTKFTITGLPTDAKIFVRVKAVNAAGASEPKYYSQPILVKEIIEPPKIRIPRHLKQTYIRRVGEAVNLVIPFQGKPRPELTWKKDGAEIDKNQINIRNSETDTIIFIRKAERSHSGKYDLQVKVDKFVETASIDIQIIDRPGPPQIVKIEDVWGENVALTWTPPKDDGNAAITGYTIQKADKKSMEWFTVIEHYHRTSATITELVIGNEYYFRVFSENMCGLSEDATMTKESAVIARDGKIYKNPVYEDFDFSEAPMFTQPLVNTYAIAGYNATLNCSVRGNPKPKITWMKNKVAIVDDPRYRMFSNQGVCTLEIRKPSPYDGGTYCCKAVNDLGTVEIECKLEVKVIYQGVNTPGQPVFLEGQQQVGSPSADSSCKAYLQT

SEQ ID NO: 88946 - DNA, 3522 bp, Artificial Sequence
  derived and/or modified sequence
atgccggaacctaccaaaaaggaagagaatgaagtacccgctcccgccccaccgccggaggaacccagtaaggaaaaagaggcaggcacgacaccggctaaagactggacgctcgtggaaacacctccaggcgaggagcaggcaaagcaaaacgctaacagccaactaagtattctgttcatcgagaagccccagggtggtaccgtgaaggtgggcgaagatattaccttcatcgccaaggtaaaagcggaggacctactgaggaagcctacaattaaatggtttaaagggaagtggatggaccttgccagcaaggccggaaagcacctgcaactcaaagagaccttcgagcggcattcgagagtttataccttcgagatgcaaatcatcaaggccaaggataatttcgcaggcaactaccgctgtgaggtgacttataaagataagttcgatagctgcagttttgacctcgaagtacacgaatcaactggcactacgccaaacattgatatacggagtgctttcaaacgcagcggcgaaggccaggaggatgccggcgaactggacttctctggtctgctgaaacgaagagaagtaaagcaacaggaggaggagccacaggtcgatgtgtgggagctgctgaagaacgcgaagccatccgagtatgagaaaatcgcgttccagtatggcatcaccgacctccgagggatgttaaagcgcttaaaacgaatgcgacgtgaggagaagaagtcggccgccttcgcaaagatattggatcctgcttaccaggtcgacaagggcgggcgggttcgcttcgtcgttgagctggctgaccccaagctcgaggtgaaatggtataagaatgggcaggagatcagaccctccactaaatatatcttcgaacataagggctgccagcgcattctgttcattaataactgccaaatgactgatgattccgaatattatgtcaccgcgggagatgagaaatgttccaccgagctgtttgtcagagagcctcccatcatggtcacaaaacagcttgaagatacaacggcctactgtggtgagcgagtggagctggagtgcgaagtgagtgaagacgacgctaatgtgaagtggtttaagaacggagaagaaattattcctgggccgaagtccaggtacaggatcagggtcgaagggaaaaagcatattctcattattgagggcgcaacaaaagccgatgccgcagagtactccgtaatgactacagggggccaatctagtgccaaactcagtgtggaccttaaaccccttaaaattctgacacccctcactgatcaaacagtcaacctcggcaaagaaatctgcctaaaatgtgagattagcgagaatatccccggcaaatggacaaaaaatgggctgccagtgcaggagagtgaccggctcaaagtggtgcataaaggaaggatccataagttggtgatagccaacgccctgactgaagatgaaggcgattacgtgttcgcccctgatgcctacaacgtcacccttcctgctaaagtgcacgtgatcgaccctcccaagattattttagatggcctagacgctgataatactgtaacagtcatagccggcaacaaactcaggttggaaattcccatttccggcgagccacctcccaaagcgatgtggtcccgtggtgataaggccataatggaaggatcaggccggatcaggacagagtcatacccagactcctctaccctagtgatcgacattgctgaacgggacgacagtggggtctaccacattaatctgaagaacgaggcaggcgaggcgcatgcatccataaaagtgaaggtcgtcgatttccctgatccccccgttgctcccaccgtgaccgaagtgggcgacgattggtgtataatgaattgggaaccacccgcctacgacggggggtcccctattctcgggtatttcatagagcggaagaagaagcagagctcacgctggatgcgtctcaacttcgatttgtgcaaggaaacaaccttcgagcctaaaaaaatgatcgagggcgttgcatacgaagtgcgaattttcgccgtgaacgctattggaatcagcaagccttccatgccaagtcgaccctttgtccctctggcagttacaagccctcccaccctgctgacagtggattcagtgaccgacacaaccgtaactatgaggtggcgaccccccgatcatattggagccgccggcctggacggttacgttctggaatactgctttgaaggcagcacatctgccaagcaaagtgacgagaatggagaggcggcttacgaccttcccgccgaagactggatcgtggcgaataaagatctcatcgataaaaccaaattcacaatcactggtttgccaactgatgccaagatttttgttcgagtcaaggccgttaacgcagccggcgcaagcgaacccaagtattactcacagccaatcctggtcaaagagatcatcgagccgcctaagatccggatccctcggcacctcaagcagacctacattagaagagtgggagaagctgtaaatctggtgattcctttccaggggaaacctcggcccgaattaacatggaaaaaggatggagcagaaattgacaagaaccagatcaatatcagaaatagcgagactgataccataatcttcatccgcaaagccgaacggtcgcactcagggaaatacgaccttcaggtgaaggtggataaattcgtggagactgcctccatcgacatccaaataatcgacaggcccggcccacctcaaattgtcaagattgaagacgtctggggggagaatgtagctctgacatggacacctcccaaggatgatgggaatgccgccatcacgggatataccattcagaaagctgacaagaaaagtatggagtggttcactgtaattgaacattaccacaggaccagcgcaacgatcacagaacttgtgattggcaacgaatactacttcagggtctttagtgagaatatgtgcggcctgagcgaggacgccactatgaccaaggaatctgccgttatagcaagggatggtaaaatttacaagaaccccgtctatgaagattttgatttttccgaggcacctatgttcacccaacccttagtaaacacatacgcgattgccgggtataacgcaaccctaaattgttccgtcagaggcaatcctaagcctaagataacctggatgaagaataaggttgccattgttgacgatccacggtatagaatgttttctaatcagggagtgtgtacgctagagatcaggaaaccaagcccatacgatggcggtacttactgttgcaaagccgtgaacgatctgggtacagtggaaatagagtgtaagctggaggtgaaagtgatttatcagggcgtaaacactcctggtcaaccagtctttctggagggccaacagcaagtaggctcaccttcagcagattcatcttgcaaggcctacctacagacttag

SEQ ID NO: 88947 - DNA, 3522 bp, Artificial Sequence
  derived and/or modified sequence
atgcctgagcccaccaagaaggaggagaatgaggtgcctgccccagcccctcctcctgaggagcccagcaaggagaaggaggccggcaccaccccagccaaggactggaccctggtggagaccccacctggagaggagcaggccaagcagaatgccaacagccagctgagcatcctcttcatcgagaagccccagggcggcaccgtgaaggtgggggaggacatcaccttcatcgccaaggtgaaggccgaggacctgctgaggaagcccaccatcaagtggttcaagggcaagtggatggacctggccagcaaggccggcaagcacctgcagctgaaggagacctttgagcggcacagccgggtgtacacctttgagatgcagatcatcaaggccaaggacaactttgctggcaactaccgctgtgaggtgacctacaaggacaagtttgacagctgcagctttgacctggaggtgcatgagagcacaggcaccacccccaacatcgacatccgcagcgccttcaagaggtctggagagggccaggaggatgctggggagctggacttcagcggcctgctgaagaggcgggaggtgaagcagcaggaggaggagccccaggtggatgtgtgggagctgctgaagaatgccaagcccagtgaatatgagaagatcgccttccagtatggcatcacagacctgcggggcatgctgaagaggctgaagaggatgagaagagaggagaagaagtctgctgcctttgccaagatcctggaccctgcctaccaggtggacaagggcggccgggtgcgctttgtggtggagctggccgaccccaagctggaggtgaagtggtacaagaatggccaggagatccggcccagcaccaagtacatctttgagcacaagggctgccagaggatcctcttcatcaacaactgccagatgacagatgacagcgagtactacgtgacagctggagatgagaagtgcagcacagagctgtttgtgcgggagccccccatcatggtgaccaagcagctggaggacaccacagcctactgtggggagcgggtggagctggagtgtgaggtgtctgaagatgatgccaacgtgaagtggttcaagaatggagaggagatcatccctggccccaagagccgctaccgcatccgggtggagggcaagaagcacatcctgatcatcgagggcgccaccaaggcagatgctgctgagtacagcgtgatgaccaccggcggccagagcagcgccaagctgtctgtggacctgaagcccctgaagatcctgacccccctgacagaccagacagtgaacctgggcaaggagatctgcctgaagtgtgagatcagcgagaacatccctgggaagtggaccaagaatggcctgcctgtgcaggagagtgaccggctgaaggtggtgcacaagggccgcatccacaagctggtgattgccaatgccctgacagaagatgaaggagactatgtgtttgccccagatgcctacaacgtgaccctgcctgccaaggtgcacgtgattgatcctcccaagatcatcctggatggcctggatgctgacaacacagtgacagtgattgctggcaacaagctgcggctggagatccccatcagcggggagcccccacccaaggccatgtggagcagaggagacaaggccatcatggagggcagcggccgcatcagaacagagagctacccagacagcagcaccctggtgattgatattgctgagagagatgacagcggcgtgtaccacatcaacctgaagaatgaagctggggaggcccacgccagcatcaaggtgaaggtggtggacttcccagacccccctgtggcccccaccgtgacagaggtgggagatgactggtgcatcatgaactgggagcccccagcctatgatggcggcagccccatcctgggctacttcatcgagaggaagaagaagcagagcagccgctggatgaggctgaactttgacctgtgcaaggagaccacctttgagcccaagaagatgattgaaggagtggcctatgaggtgcgcatctttgctgtgaatgccatcggcatcagcaagcccagcatgcccagccggccctttgtgcccctggccgtgaccagcccccccaccctgctgactgtggacagcgtgacagacaccaccgtgaccatgcgctggaggcccccagaccacatcggggctgctggcctggatggctacgtgctggagtactgctttgagggcagcaccagcgccaagcagagtgatgaaaatggagaggccgcctatgacctgcctgctgaggactggatcgtggccaacaaggacctgattgacaagaccaagttcaccatcaccggcctgcccacagatgccaagatctttgtgcgggtgaaggctgtgaatgctgctggggccagcgagcccaagtactacagccagcccatcctggtgaaggagatcatcgagccccccaagatccgcatccccaggcacctgaagcagacctacatcagaagagtgggggaggccgtgaacctggtgatccccttccagggcaagcccaggcctgagctgacctggaagaaggatggagctgagattgacaagaaccagatcaacatccggaacagcgagacagacaccatcatcttcatcaggaaggccgagaggagccacagcggcaagtatgacctgcaggtgaaggtggacaagtttgtggagacagccagcattgacatccagatcatcgaccggcccggccccccccagatcgtgaagattgaagatgtgtggggagaaaatgtggccctgacctggaccccacccaaggatgatggaaatgctgccatcaccggctacaccatccagaaggctgacaagaagtccatggagtggttcaccgtcatcgagcactaccacaggaccagcgccaccatcacagagctggtgattggaaatgagtactacttccgggtcttcagcgagaacatgtgtggcctgtctgaagatgccaccatgaccaaggagagcgctgtgattgccagagatggcaagatctacaagaaccctgtgtatgaagattttgacttcagcgaggcccccatgttcacccagcccctggtgaacacctacgccatcgccggctacaatgccaccctgaactgcagcgtgcggggcaaccccaagcccaagatcacctggatgaagaacaaggtggccatcgtggatgacccccgctacaggatgttcagcaaccagggcgtgtgcaccctggagatcaggaagcccagcccctatgatggcggcacctactgctgcaaggctgtgaatgacctgggcaccgtggagattgagtgcaagctggaggtgaaggtgatctaccagggcgtgaacaccccaggccagcctgtgttcctggagggccagcagcaggtgggcagccccagcgctgacagcagctgcaaggcctacctgcagacctag

SEQ ID NO: 88948 - DNA, 3861 bp, Artificial Sequence
  derived and/or modified sequence
ttgtcacaccgacctgcaccatctctcgcctgcctgtggggtttctgtcaactagtcgtggagggaaggagactctttaaagaataacatcttattgtggccatgccagaacccactaagaaagaggaaaatgaagtgccagccccagccccacccccggaagaaccaagtaaagagaaggaggccggaactacaccagcaaaagactggacccttgtcgaaactcctcctggggaggaacaagccaagcagaatgccaactcccagctgtccatcttgttcattgaaaaacctcaaggaggaacagtgaaagttggtgaagatatcaccttcatagccaaagtcaaggctgaagatcttctgagaaaacccactatcaaatggttcaaaggaaaatggatggacctggccagcaaagccgggaagcaccttcagctgaaggaaacctttgagaggcacagtcgggtgtacacatttgagatgcagatcatcaaggccaaagataactttgcaggaaattacagatgcgaggtcacctataaggataagtttgacagctgttcatttgatcttgaagtgcacgaatctactgggactactccaaacattgacatcagatctgctttcaagagaagtggagaaggtcaagaggatgcaggagaacttgactttagtggtctcctgaaacgtagggaggtgaagcagcaggaggaagaaccccaggtggacgtatgggagttgctgaagaacgcgaaacccagtgagtacgagaagatcgccttccagtatggaatcaccgacctgcgcggcatgctcaagcgactcaagcgcatgcgcagagaggagaagaagagcgcagcttttgcaaaaattcttgatcctgcatatcaggttgacaaaggaggcagagtgaggtttgttgtggagctggcagatccaaagttggaggtgaaatggtataaaaatggtcaagaaattcgacccagtaccaaatacatctttgaacacaaaggatgccagagaatcctgtttatcaataactgtcagatgacagatgattcagagtattatgtgacagccggtgatgagaaatgttccactgagctcttcgtaagagagcctccaattatggtgaccaaacagctggaagatacaactgcttattgtggggagagagtggaattagaatgtgaggtgtctgaagatgatgccaatgtaaaatggtttaagaatggtgaagagattatccctggtccaaaatcaagataccgaattagagttgagggtaaaaaacacatcttgatcatagagggagcaacaaaggctgatgctgcagaatattcagtaatgacaacaggaggacaatcatctgctaaacttagtgttgacttgaaacctctgaagattttgacacctctgactgatcagactgtaaatcttggaaaagaaatctgcctgaagtgtgaaatctctgaaaacataccaggaaaatggactaaaaatggcctacctgttcaggagagtgaccgtctaaaggtggttcacaagggaaggatccacaagttagtgatagccaatgccctcactgaagatgaaggtgattatgtatttgcacctgatgcctacaatgttactctgcctgccaaagttcatgttattgatcctcctaagatcatcctggatggtcttgatgctgacaacacagtgacagtgattgcaggaaacaagcttcgtcttgagatccccatcagcggagaaccacctcctaaagccatgtggagccggggagataaggctattatggaaggcagtggccggataagaacagaatcttaccctgatagcagcactctggtcattgatatagctgaaagagatgactctggtgtttaccacatcaatctgaaaaacgaagctggagaggcacatgcaagcatcaaggttaaagttgtggacttccctgatcctccagtggcaccgactgtgacagaggtgggagatgactggtgtatcatgaactgggagcctcctgcctacgacggaggctctccaatcctaggatattttattgagaggaagaagaaacaaagctccaggtggatgaggctgaattttgatctctgcaaagaaacaacttttgagcccaagaagatgattgaaggtgtggcctatgaggtccgcatctttgcagtcaatgccattggcatctccaagcccagtatgccctccaggccttttgttcctttggctgtaacaagccctcctactcttctgactgtggactctgtcactgacacgactgtcacgatgaggtggcgccccccagaccacattggtgcagcaggtttagatggctatgtgctagagtattgctttgaaggaagtacatcagcaaaacagtctgatgaaaatggggaggctgcctatgatctgccagctgaggactggatagttgcaaacaaagatctgattgacaagacgaagttcaccatcacaggtctgccaacagatgcaaagatctttgtgcgtgtgaaggctgttaatgcagctggtgccagcgagcccaagtactattctcagcccattctcgtgaaggaaatcatagaacctccaaagattcgcattccaagacacctgaagcaaacctatatccgcagagttggagaagctgtcaatctggttatacctttccagggaaaaccaagaccagaattaacttggaagaaggatggtgcagaaattgataagaatcaaataaacattcgcaactctgagactgatacaatcatatttattagaaaagcagagaggagccactctgggaaatatgatctgcaagtcaaagtggacaaattcgtggagaccgcatcaattgacatccagatcattgaccgtccaggtccaccccaaattgtgaagattgaggatgtctggggagaaaatgtcgctctcacatggactccaccaaaggatgatggaaatgctgctatcacaggctataccattcagaaggctgacaagaagagcatggaatggtttactgtcattgagcattatcatcgaaccagtgccaccattactgaattggtcatagggaatgaatattacttccgggtcttttctgaaaacatgtgtggcctcagtgaggatgccaccatgactaaagagagtgcagtgatcgccagggatggtaaaatctacaaaaatccagtgtatgaagactttgatttctcagaggcacccatgtttactcagcctttggttaacacctatgccatagctggttacaatgccaccctaaactgcagtgtgagaggaaatcctaagcctaaaataacctggatgaaaaacaaagttgctattgtggatgatccaagatacaggatgttcagcaaccagggagtctgtaccctggaaattcgcaagcccagcccctatgatggaggcacttactgctgcaaagcagtcaatgaccttgggacagtggagattgaatgcaaactggaggtgaaagtgatatatcaaggagtaaatacccctggacaaccagtcttcctggaggggcagcaacaggtgggctctccttctgcagactcctcttgcaaggcgtacctccaaacataattgattcgtatctgcgagacttacactcaagcaatcctgaggaatactgagggagggcctggctactgtctctctgcactctgctgctttgaaatctggttgaaatgagaaaaagcattttctgttttcccaccaggcccccaagtgtggtctttttctttcctcctaatgttgaagagaaaaaaaaaaaaaaaagtttgcccagattgcttaattaaaaattgcaaacaaaatctc

SEQ ID NO: 88949 - DNA, 3522 bp, Artificial Sequence
  derived and/or modified sequence
atgcccgagcccaccaagaaggaggagaacgaggtgcccgcccccgcccccccacccgaggagccaagcaaggagaaggaggctggaaccacccccgccaaagactggacacttgtggagactcctccaggcgaggaacaggccaagcaaaatgctaatagccagctgtccatcctttttattgagaagccccagggcggtaccgtcaaggtcggggaagatattacctttattgctaaagtgaaggccgaggacttgctgcgcaaacctaccatcaaatggttcaagggcaagtggatggacctggcctcaaaggccggcaagcacctgcagttgaaggaaacctttgaacgtcatagcagagtctacacgtttgagatgcagatcatcaaagctaaagataacttcgccggaaactaccggtgtgaagtgacctacaaggataagttcgacagctgcagttttgatctggaggtccatgagtccacagggaccactcccaatattgacattaggagcgcctttaagcgttcaggtgaaggccaggaagatgccggcgagctggatttctccggcctcctcaagcgcagggaggtgaaacagcaggaagaggaacctcaagtggacgtgtgggagctgctgaagaacgccaagcccagcgaatatgagaagatcgccttccagtatggtattaccgacctcagggggatgctgaaacggctcaagcgcatgcgccgtgaggagaaaaaatctgccgcatttgctaaaattctcgatcctgcgtaccaggtcgataaggggggcagagttagattcgttgtggaactagccgatcctaagctggaagtcaagtggtacaagaacggtcaagaaatcagaccatcaacgaaatacattttcgagcacaagggttgccaaaggatcctgtttatcaataattgccagatgaccgatgatagcgagtattacgtcacagccggagatgaaaaatgctccactgagctgttcgtgagggagccaccaataatggtaaccaaacaactggaggacacaactgcatactgcggcgagagagttgagttggagtgcgaggtaagtgaagacgatgctaatgttaagtggttcaagaatggcgaggagatcatcccaggacccaagagcagatacagaattagagtggagggtaaaaaacatatcctgatcatcgaaggagcgacaaaagccgatgccgccgagtacagcgttatgactaccggagggcagtcgtcagcaaagctgagcgtggaccttaagcccctgaaaattcttacccctctgacagaccagaccgtaaatctggggaaagagatttgtcttaagtgcgaaatcagcgagaacattcctggcaaatggacgaagaacggcctgcctgtgcaggagtctgaccgattgaaggttgttcataaggggcggattcataagcttgtgatagcaaacgccttaaccgaagacgagggcgactacgtatttgcacctgatgcctacaatgtcacattgccggcaaaagtgcacgtaattgatccccccaagattatacttgatggcctggatgctgacaacaccgttacggtaatcgccgggaacaagctacgcttggagattcccatttccggagaaccgcctccaaaggccatgtggagcaggggagataaggctatcatggagggatccggccgtatcaggaccgagtcgtatccagattcctctactctggtgatagacattgccgaacgagacgactcgggggtctatcacattaatctaaagaacgaggctggggaagcccatgcctccattaaagttaaagtcgtagacttcccggacccaccggtggcccctaccgtaactgaagtaggtgacgactggtgtataatgaactgggaacctcccgcctacgatgggggatccccgattctgggctactttatcgagcgaaagaaaaaacaatcctctcggtggatgagacttaactttgacctgtgtaaagaaacaacctttgagcccaaaaagatgattgaaggagttgcttacgaagtccgcatcttcgcggtgaatgctatcgggatcagcaagccatcaatgccaagcaggcccttcgttcctctggccgtgaccagcccccccaccctgctaaccgtagatagcgtcacagatacgactgtgacaatgcgatggcgccctcccgatcacattggagccgctggtctcgacggctacgttctagaatattgttttgaaggcagtactagcgcgaaacagtcagacgaaaacggcgaggctgcctacgatctccctgcagaagattggatcgtagctaacaaagacctgatcgataaaactaagtttacgatcactggactgcccacagatgctaagatcttcgtgcgtgtcaaagcagttaacgccgcaggcgccagcgaacctaaatactactcgcagcctatcctcgtcaaggagattatagagccaccaaaaattagaatccctcgtcatctcaaacagacttacataagacgggtgggggaggctgtgaacctggtgatcccctttcagggtaaacctcgaccagagttaacgtggaaaaaagacggtgcagaaatcgataagaatcagatcaatatcaggaattccgagacagatactattatctttattagaaaagcagaacgatctcactcaggaaagtacgacttgcaagttaaggtggacaaatttgtcgagaccgcttcaattgacatccagatcattgacagacctggtcccccccagatcgtcaagatagaagatgtctggggtgagaacgtagctctgacatggactcctcccaaagacgatggcaatgctgctattacaggatataccatccagaaggctgacaagaagtctatggagtggtttacagtgatagaacactaccaccggacatcggcaaccattaccgagctggtcatcgggaatgagtattatttccgcgtctttagcgaaaacatgtgcggactgtccgaggacgctacaatgacaaaagagtccgccgtgatcgcccgagacgggaaaatatacaagaatccggtgtatgaagacttcgactttagtgaagcacctatgtttactcagccgctagtaaatacatacgccatagcaggctacaacgccacactaaattgtagcgtgcgcgggaacccaaagcctaagattacctggatgaaaaataaagtggctatcgtcgacgaccctagatatcgaatgtttagcaatcagggtgtgtgtacgctggaaattcgaaaaccatcaccttatgacgggggcacttactgttgtaaggcagttaatgacctcgggacagtggagatagagtgcaagctggaagtaaaggtgatctatcagggggtgaatacaccaggacaaccagtatttctggagggtcaacagcaggttgggagccccagcgccgactcctcttgcaaggcctacctccagacctag

SEQ ID NO: 88950 - DNA, 3522 bp, Artificial Sequence
  derived and/or modified sequence
atgccggagcctacaaagaaagaagagaacgaggtacctgctcccgctcccccacccgaggaaccttccaaggagaaggaagccggtaccacacccgcaaaagactggaccctcgtggagaccccacctggagaggagcaggcgaagcagaatgccaacagccagctgagcattctgtttattgaaaagccacagggagggacggtaaaagtgggggaagacattaccttcatcgcaaaagtgaaggctgaagacctgctgaggaagcctacaattaagtggttcaaaggaaagtggatggatctggcctccaaggctggcaagcatttacagctaaaagaaactttcgagcggcactcacgggtgtacacattcgagatgcagatcatcaaggccaaggataattttgcgggaaattataggtgcgaagtgacctacaaagataagttcgactcttgtagcttcgatttggaggtgcatgaatcaacgggcacaactcccaatatcgatatacggtcagcgttcaaaaggtcgggggagggccaggaggatgccggagaactggattttagtgggctgctaaaacgaagagaagtcaagcaacaggaagaggaaccccaggttgatgtatgggagttattgaagaatgctaagccgtccgagtatgagaaaatcgcgttccagtacgggataaccgatctaaggggcatgctgaaacgactgaagcggatgcgccgagaagagaagaaatctgcagcttttgctaagatcctagatcctgcctaccaggtggataaggggggaagagttcggttcgtggtcgagctggccgaccctaaactggaggtcaaatggtataaaaacgggcaggaaatcagaccaagtactaaatatatttttgaacataaaggttgccaacggatcctgtttattaataactgccaaatgacagatgactcagagtattacgttacagctggcgatgagaagtgtagcacagagctgttcgtacgcgagccacccataatggtcacaaaacaactagaggacacaaccgcatactgcggcgagagggtcgaacttgagtgtgaagtttcagaggatgatgcgaatgtaaagtggtttaagaacggtgaagagatcattcctggcccaaaatcccgctaccgaatccgggtggaaggcaaaaaacatatactgattatcgagggcgcaacaaaggctgacgccgcagaatactcagtgatgacaaccggcggacagagctctgccaaactcagcgttgacttaaagccacttaaaatcttaactcccctcacagaccagaccgtaaacctagggaaggagatctgtttgaaatgtgaaatttctgagaatattcctggaaaatggacaaagaacggacttcctgtccaggaaagcgatcgtctcaaagtagtccacaaaggcagaattcataagctcgtaatagcaaatgcattaaccgaagatgagggggattatgtgtttgccccagacgcatacaatgtgacactgcctgctaaggtgcacgtcatcgatccacccaagattattcttgatgggttggatgcagacaataccgtgactgtgatcgcaggcaataagctcagactcgagatccccatctccggcgaacccccaccaaaagccatgtggtccagaggcgataaggcgattatggagggttctgggagaatccggacagaatcgtaccctgattcctcaacactcgtgattgacatagctgagagagatgattctggcgtctatcatattaatctgaaaaatgaagcgggagaggctcacgcctccataaaagtgaaagttgtagatttccctgaccctccagtcgctcccactgtgactgaggttggcgacgattggtgtattatgaactgggagcctcctgcctacgatggcggtagccccatcctgggatacttcatcgaacgtaagaagaagcagagctcaagatggatgcgcctgaactttgacctgtgcaaagagactacgtttgagcccaagaaaatgatcgaaggcgttgcttacgaagttcggatatttgccgttaacgcgattggcatcagcaaaccgagtatgccttcccggcctttcgtgcctctcgccgtcacgtccccacccacccttctcaccgtggactctgtgactgatacaactgtgacaatgagatggagaccacctgaccacataggtgctgctggtctcgacgggtatgtgctggagtactgttttgaggggtccacttctgctaaacagtctgacgaaaacggcgaagctgcatacgacctgcccgctgaggactggatcgtagccaataaagatctcatcgataagaccaagttcaccatcacgggcttgcccactgatgccaaaatattcgtcagggttaaagcagttaatgccgcaggcgcaagcgagccgaagtactactcccagccgatcctggttaaagagatcattgaaccgccaaaaatccgcatccccaggcatctgaagcagacttacatcaggcgtgtgggcgaagcggtgaatctggtcatccccttccagggaaaacctaggcccgagttgacatggaagaaggacggagcggagatagataagaaccagatcaacattcggaacagcgagactgataccattatctttattagaaaagcagagcggagccactctggtaaatatgatcttcaggtaaaagttgataagtttgttgaaaccgcctccatcgatatccagataatagacaggccaggaccccctcagattgtcaagatcgaggatgtctggggggaaaacgtggcactgacatggacaccgccaaaagatgacggtaatgccgctatcactggatacaccatacagaaggccgacaaaaaatctatggaatggtttactgtcatcgagcattatcaccggaccagcgctaccatcacagaactggtgataggtaacgagtactatttccgagtgtttagcgaaaacatgtgcgggctgagtgaggacgccactatgacaaaggagtcagccgtgattgctcgcgacggcaaaatctacaaaaatcctgtttacgaagactttgacttttccgaagccccaatgtttacacagccactggtaaatacctatgccatcgcgggatacaacgccactcttaattgctctgtgagaggcaatccaaagcccaagatcacgtggatgaaaaacaaagtcgcaattgtggacgatccacgctaccgtatgttctctaaccagggtgtttgcaccttagaaatccgtaaaccctcaccatacgatgggggaacctattgctgtaaagccgtcaacgacctggggaccgtggagatcgaatgtaagctggaggtaaaagttatctatcaaggagtgaacacgcccggtcagcccgtttttctcgagggccagcagcaagtggggtcaccatccgctgactcaagttgcaaagcctacctccaaacgtag

SEQ ID NO: 88951 - DNA, 3522 bp, Artificial Sequence
  derived and/or modified sequence
atgcccgagcccaccaagaaggaggagaacgaggtgcccgcccccgcccccccccccgaggagcccagcaaggagaaggaggccggcaccacccccgccaaggactggaccctggtggagaccccccccggcgaggagcaggccaagcagaacgccaacagccagctgagcatcctgttcatcgagaagccccagggcggcaccgtgaaggtgggcgaggacatcaccttcatcgccaaggtgaaggccgaggacctgctgagaaagcccaccatcaagtggttcaagggcaagtggatggacctggccagcaaggccggcaagcacctgcagctgaaggagaccttcgagagacacagcagagtgtacaccttcgagatgcagatcatcaaggccaaggacaacttcgccggcaactacagatgcgaggtgacctacaaggacaagttcgacagctgcagcttcgacctggaggtgcacgagagcaccggcaccacccccaacatcgacatcagaagcgccttcaagagaagcggcgagggccaggaggacgccggcgagctggacttcagcggcctgctgaagagaagagaggtgaagcagcaggaggaggagccccaggtggacgtgtgggagctgctgaagaacgccaagcccagcgagtacgagaagatcgccttccagtacggcatcaccgacctgagaggcatgctgaagagactgaagagaatgagaagagaggagaagaagagcgccgccttcgccaagatcctggaccccgcctaccaggtggacaagggcggcagagtgagattcgtggtggagctggccgaccccaagctggaggtgaagtggtacaagaacggccaggagatcagacccagcaccaagtacatcttcgagcacaagggctgccagagaatcctgttcatcaacaactgccagatgaccgacgacagcgagtactacgtgaccgccggcgacgagaagtgcagcaccgagctgttcgtgagagagccccccatcatggtgaccaagcagctggaggacaccaccgcctactgcggcgagagagtggagctggagtgcgaggtgagcgaggacgacgccaacgtgaagtggttcaagaacggcgaggagatcatccccggccccaagagcagatacagaatcagagtggagggcaagaagcacatcctgatcatcgagggcgccaccaaggccgacgccgccgagtacagcgtgatgaccaccggcggccagagcagcgccaagctgagcgtggacctgaagcccctgaagatcctgacccccctgaccgaccagaccgtgaacctgggcaaggagatctgcctgaagtgcgagatcagcgagaacatccccggcaagtggaccaagaacggcctgcccgtgcaggagagcgacagactgaaggtggtgcacaagggcagaatccacaagctggtgatcgccaacgccctgaccgaggacgagggcgactacgtgttcgcccccgacgcctacaacgtgaccctgcccgccaaggtgcacgtgatcgacccccccaagatcatcctggacggcctggacgccgacaacaccgtgaccgtgatcgccggcaacaagctgagactggagatccccatcagcggcgagcccccccccaaggccatgtggagcagaggcgacaaggccatcatggagggcagcggcagaatcagaaccgagagctaccccgacagcagcaccctggtgatcgacatcgccgagagagacgacagcggcgtgtaccacatcaacctgaagaacgaggccggcgaggcccacgccagcatcaaggtgaaggtggtggacttccccgacccccccgtggcccccaccgtgaccgaggtgggcgacgactggtgcatcatgaactgggagccccccgcctacgacggcggcagccccatcctgggctacttcatcgagagaaagaagaagcagagcagcagatggatgagactgaacttcgacctgtgcaaggagaccaccttcgagcccaagaagatgatcgagggcgtggcctacgaggtgagaatcttcgccgtgaacgccatcggcatcagcaagcccagcatgcccagcagacccttcgtgcccctggccgtgaccagcccccccaccctgctgaccgtggacagcgtgaccgacaccaccgtgaccatgagatggagaccccccgaccacatcggcgccgccggcctggacggctacgtgctggagtactgcttcgagggcagcaccagcgccaagcagagcgacgagaacggcgaggccgcctacgacctgcccgccgaggactggatcgtggccaacaaggacctgatcgacaagaccaagttcaccatcaccggcctgcccaccgacgccaagatcttcgtgagagtgaaggccgtgaacgccgccggcgccagcgagcccaagtactacagccagcccatcctggtgaaggagatcatcgagccccccaagatcagaatccccagacacctgaagcagacctacatcagaagagtgggcgaggccgtgaacctggtgatccccttccagggcaagcccagacccgagctgacctggaagaaggacggcgccgagatcgacaagaaccagatcaacatcagaaacagcgagaccgacaccatcatcttcatcagaaaggccgagagaagccacagcggcaagtacgacctgcaggtgaaggtggacaagttcgtggagaccgccagcatcgacatccagatcatcgacagacccggccccccccagatcgtgaagatcgaggacgtgtggggcgagaacgtggccctgacctggaccccccccaaggacgacggcaacgccgccatcaccggctacaccatccagaaggccgacaagaagagcatggagtggttcaccgtgatcgagcactaccacagaaccagcgccaccatcaccgagctggtgatcggcaacgagtactacttcagagtgttcagcgagaacatgtgcggcctgagcgaggacgccaccatgaccaaggagagcgccgtgatcgccagagacggcaagatctacaagaaccccgtgtacgaggacttcgacttcagcgaggcccccatgttcacccagcccctggtgaacacctacgccatcgccggctacaacgccaccctgaactgcagcgtgagaggcaaccccaagcccaagatcacctggatgaagaacaaggtggccatcgtggacgaccccagatacagaatgttcagcaaccagggcgtgtgcaccctggagatcagaaagcccagcccctacgacggcggcacctactgctgcaaggccgtgaacgacctgggcaccgtggagatcgagtgcaagctggaggtgaaggtgatctaccagggcgtgaacacccccggccagcccgtgttcctggagggccagcagcaggtgggcagccccagcgccgacagcagctgcaaggcctacctgcagacctag

SEQ ID NO: 88952 - protein, 1132 aa, Artificial Sequence
  derived and/or modified sequence
MPEPTKKEENEVPAPAPPPEDWTLVETPPGEEQAKQNANSQLSILFIEKPQGGTVKVGEDITFIAKVKAEDLLRKPTIKWFKGKWMDLASKAGKHLQLKETFERHSRVYTFEMQIIKAKDNFAGNYRCEVTYKDKFDSCSFDLEVHESTGTTPNIDIRSAFKRSGEGQEDAGELDFSGLLKRREVKQQEEEPQVDVWELLKNAKPSEYEKIAFQYGITDLRGMLKRLKRMRREEKKSAAFAKILDPAYQVDKGGRVRFVVELADPKLEVKWYKNGQEIRPSTKYIFEHKGCQRILFINNCQMTDDSEYYVTAGDEKCSTELFVREPPIMVTKQLEDTTAYCGERVELECEVSEDDANVKWFKNGEEIIPGPKSRYRIRVEGKKHILIIEGATKADAAEYSVMTTGGQSSAKLSVDLKPLKILTPLTDQTVNLGKEICLKCEISENIPGKWTKNGLPVQESDRLKVVHKGRIHKLVIANALTEDEGDYVFAPDAYNVTLPAKVHVIDPPKIILDGLDADNTVTVIAGNKLRLEIPISGEPPPKAMWSRGDKAIMEGSGRIRTESYPDSSTLVIDIAERDDSGVYHINLKNEAGEAHASIKVKVVDFPDPPVAPTVTEVGDDWCIMNWEPPAYDGGSPILGYFIERKKKQSSRWMRLNFDLCKETTFEPKKMIEGVAYEVRIFAVNAIGISKPSMPSRPFVPLAVTSPPTLLTVDSVTDTTVTMRWRPPDHIGAAGLDGYVLEYCFEGTEDWIVANKDLIDKTKFTITGLPTDAKIFVRVKAVNAAGASEPKYYSQPILVKEIIEPPKIRIPRHLKQTYIRRVGEAVNLVIPFQGKPRPELTWKKDGAEIDKNQINIRNSETDTIIFIRKAERSHSGKYDLQVKVDKFVETASIDIQIIDRPGPPQIVKIEDVWGENVALTWTPPKDDGNAAITGYTIQKADKKSMEWFTVIEHYHRTSATITELVIGNEYYFRVFSENMCGLSEDATMTKESAVIARDGKIYKNPVYEDFDFSEAPMFTQPLVNTYAIAGYNATLNCSVRGNPKPKITWMKNKVAIVDDPRYRMFSNQGVCTLEIRKPSPYDGGTYCCKAVNDLGTVEIECKLEVKVIYQGVNTPGQPVFLEGQQQSLHNKDF

SEQ ID NO: 88953 - DNA, 3399 bp, Artificial Sequence
  derived and/or modified sequence
atgccagaacccaccaaaaaggaggagaacgaagtccctgcgcctgcccctccacctgaagattggactctggtggagacaccccctggagaggagcaggccaaacaaaacgctaactcccagctctcaatcctctttattgagaagccccagggcggaacggtcaaagttggtgaggacataaccttcatcgctaaggtgaaggccgaggatttactcaggaagccaacaattaagtggtttaagggcaagtggatggatctggctagtaaggctggcaagcatctacagttaaaggagacctttgagcgccattcccgagtgtatacctttgagatgcagatcatcaaagctaaagacaattttgccggaaattatcgctgtgaggtgacgtacaaggataagttcgacagctgttccttcgaccttgaggtgcacgagagtacagggacaacgcccaatatcgatattaggagtgcgttcaagagaagcggcgaaggacaggaggacgctggagagctcgattttagtgggctgctgaaaaggagggaagtgaagcagcaggaggaggaacctcaggttgacgtctgggagcttctcaaaaatgccaagccctcagagtacgaaaagatcgcattccaatatggcataaccgatcttcgggggatgctgaaacgccttaaaaggatgaggcgggaggaaaagaaatcagctgcatttgcgaaaatcctggaccctgcctaccaggttgataaagggggcagggtgaggtttgtcgtggagctggcagacccaaagctggaggtcaaatggtacaaaaatgggcaggaaatacgcccgtctacgaagtatatatttgagcataaaggatgtcagcggatactttttattaataattgccaaatgacagacgactctgaatattacgtgaccgccggggatgagaaatgttctaccgagctctttgtccgtgaacctccgatcatggtgaccaaacagctagaggacacaacagcctactgtggagaacgtgtggaactcgaatgcgaggtctctgaggacgatgctaacgtcaagtggtttaagaacggcgaagagatcatacctggccccaaatcaaggtaccggattagggtagagggcaaaaagcacattttaattattgaaggggcgacgaaggcagatgcagcggaatactcagtgatgactactggcggccagagctccgccaagttgtctgtggacctaaagcctttgaagatccttacccctttgaccgaccaaaccgtgaacctgggcaaagagatctgtttgaagtgtgagatttcggaaaacattcctggcaagtggaccaagaatggtctgccggtgcaggagagtgaccgactcaaggtggtccataaaggaagaatccataagcttgtgattgccaatgccttaaccgaggacgagggcgactacgttttcgcccccgacgcatataatgtcacactccccgcgaaggttcatgtcatagaccctcccaagatcatcttggacggcctggacgccgataataccgtcactgtcattgccgggaacaaacttaggctggaaattcctatatccggcgagccacctcccaaggctatgtggagcagaggtgataaagccattatggagggctcaggtaggatcaggaccgagtcttacccagacagcagcactctcgtgatcgacatagcagaaagggatgactccggtgtgtatcatatcaatttgaagaacgaggccggagaagctcatgctagcattaaggtaaaggtggtggattttccagacccaccagtcgcccccaccgtgactgaggtgggcgacgactggtgtatcatgaactgggaaccccccgcatacgacggagggagccccatcctgggatattttattgaaaggaagaagaagcagtcttctcgttggatgcgcctgaacttcgacctgtgcaaggagacgacgtttgagcctaagaagatgatcgagggagtggcttatgaggtgcgcattttcgctgtgaacgccatcggtatcagcaagccgtccatgccctcaaggccctttgttccactcgccgtgacttcgccgcctaccttgttgaccgtggacagtgtaacagacactacggtgaccatgcgctggcggccgcctgatcacattggagctgctgggttggatggttacgtcctcgagtattgttttgagggcactgaagactggattgtggccaacaaagacctaatcgataagaccaaattcacaatcactggactgcccaccgatgccaaaatttttgtgcgtgtgaaggctgtcaatgccgctggggcctccgaaccaaaatactatagccaacctattctagtcaaagaaatcatagagccccctaagataaggatccctcgacatctcaagcagacctatatccgaagagtgggggaggctgtgaacctcgtgattccatttcaaggcaagccccggcctgagctgacgtggaaaaaggatggggctgaaattgataaaaaccagattaacattagaaacagcgaaactgatacaatcatcttcattcgaaaagccgaaaggtcccattcaggcaagtatgacctgcaagtcaaagttgacaagttcgtcgaaactgcgtccatagatatacagattatagaccggccaggcccgccacagatagtgaagatagaggatgtgtggggagaaaacgttgccctgacttggacgccacctaaggatgatggaaacgccgccatcaccgggtatactatccagaaagccgataagaagtcaatggagtggttcacagtgattgagcactaccatcggacctctgcgacaatcacggagctggttataggtaacgagtattacttccgagttttcagcgaaaacatgtgtggactctccgaggatgcaacgatgactaaagagagtgcagtaattgctagggacggcaagatttacaaaaacccagtgtacgaggattttgatttttccgaggctccgatgttcacacagcctcttgtgaatacatacgctatcgctggctataatgccacgctaaactgtagcgtcaggggtaacccaaagcccaaaatcacctggatgaagaataaggtggccatcgtcgatgacccccgataccgtatgttttcgaaccagggggtgtgtaccctggagatccgcaaaccatccccatacgacggtggcacctactgttgtaaagcagtgaacgacttgggaacagtggaaatcgaatgtaaactggaagtcaaggtgatttaccaaggcgtgaacacaccgggacagcccgtgttccttgaaggccagcagcagtccttacataacaaggatttctag

SEQ ID NO: 88954 - DNA, 3399 bp, Artificial Sequence
  derived and/or modified sequence
atgcctgagcccaccaagaaggaggagaatgaggtgcctgccccagcccctcctcctgaggactggaccctggtggagaccccacctggagaggagcaggccaagcagaatgccaacagccagctgagcatcctcttcatcgagaagccccagggcggcaccgtgaaggtgggggaggacatcaccttcatcgccaaggtgaaggccgaggacctgctgaggaagcccaccatcaagtggttcaagggcaagtggatggacctggccagcaaggccggcaagcacctgcagctgaaggagacctttgagcggcacagccgggtgtacacctttgagatgcagatcatcaaggccaaggacaactttgctggcaactaccgctgtgaggtgacctacaaggacaagtttgacagctgcagctttgacctggaggtgcatgagagcacaggcaccacccccaacatcgacatccgcagcgccttcaagaggtctggagagggccaggaggatgctggggagctggacttcagcggcctgctgaagaggcgggaggtgaagcagcaggaggaggagccccaggtggatgtgtgggagctgctgaagaatgccaagcccagtgaatatgagaagatcgccttccagtatggcatcacagacctgcggggcatgctgaagaggctgaagaggatgagaagagaggagaagaagtctgctgcctttgccaagatcctggaccctgcctaccaggtggacaagggcggccgggtgcgctttgtggtggagctggccgaccccaagctggaggtgaagtggtacaagaatggccaggagatccggcccagcaccaagtacatctttgagcacaagggctgccagaggatcctcttcatcaacaactgccagatgacagatgacagcgagtactacgtgacagctggagatgagaagtgcagcacagagctgtttgtgcgggagccccccatcatggtgaccaagcagctggaggacaccacagcctactgtggggagcgggtggagctggagtgtgaggtgtctgaagatgatgccaacgtgaagtggttcaagaatggagaggagatcatccctggccccaagagccgctaccgcatccgggtggagggcaagaagcacatcctgatcatcgagggcgccaccaaggcagatgctgctgagtacagcgtgatgaccaccggcggccagagcagcgccaagctgtctgtggacctgaagcccctgaagatcctgacccccctgacagaccagacagtgaacctgggcaaggagatctgcctgaagtgtgagatcagcgagaacatccctgggaagtggaccaagaatggcctgcctgtgcaggagagtgaccggctgaaggtggtgcacaagggccgcatccacaagctggtgattgccaatgccctgacagaagatgaaggagactatgtgtttgccccagatgcctacaacgtgaccctgcctgccaaggtgcacgtgattgatcctcccaagatcatcctggatggcctggatgctgacaacacagtgacagtgattgctggcaacaagctgcggctggagatccccatcagcggggagcccccacccaaggccatgtggagcagaggagacaaggccatcatggagggcagcggccgcatcagaacagagagctacccagacagcagcaccctggtgattgatattgctgagagagatgacagcggcgtgtaccacatcaacctgaagaatgaagctggggaggcccacgccagcatcaaggtgaaggtggtggacttcccagacccccctgtggcccccaccgtgacagaggtgggagatgactggtgcatcatgaactgggagcccccagcctatgatggcggcagccccatcctgggctacttcatcgagaggaagaagaagcagagcagccgctggatgaggctgaactttgacctgtgcaaggagaccacctttgagcccaagaagatgattgaaggagtggcctatgaggtgcgcatctttgctgtgaatgccatcggcatcagcaagcccagcatgcccagccggccctttgtgcccctggccgtgaccagcccccccaccctgctgactgtggacagcgtgacagacaccaccgtgaccatgcgctggaggcccccagaccacatcggggctgctggcctggatggctacgtgctggagtactgctttgagggcacagaggactggatcgtggccaacaaggacctgattgacaagaccaagttcaccatcaccggcctgcccacagatgccaagatctttgtgcgggtgaaggctgtgaatgctgctggggccagcgagcccaagtactacagccagcccatcctggtgaaggagatcatcgagccccccaagatccgcatccccaggcacctgaagcagacctacatcagaagagtgggggaggccgtgaacctggtgatccccttccagggcaagcccaggcctgagctgacctggaagaaggatggagctgagattgacaagaaccagatcaacatccggaacagcgagacagacaccatcatcttcatcaggaaggccgagaggagccacagcggcaagtatgacctgcaggtgaaggtggacaagtttgtggagacagccagcattgacatccagatcatcgaccggcccggccccccccagatcgtgaagattgaagatgtgtggggagaaaatgtggccctgacctggaccccacccaaggatgatggaaatgctgccatcaccggctacaccatccagaaggctgacaagaagtccatggagtggttcaccgtcatcgagcactaccacaggaccagcgccaccatcacagagctggtgattggaaatgagtactacttccgggtcttcagcgagaacatgtgtggcctgtctgaagatgccaccatgaccaaggagagcgctgtgattgccagagatggcaagatctacaagaaccctgtgtatgaagattttgacttcagcgaggcccccatgttcacccagcccctggtgaacacctacgccatcgccggctacaatgccaccctgaactgcagcgtgcggggcaaccccaagcccaagatcacctggatgaagaacaaggtggccatcgtggatgacccccgctacaggatgttcagcaaccagggcgtgtgcaccctggagatcaggaagcccagcccctatgatggcggcacctactgctgcaaggctgtgaatgacctgggcaccgtggagattgagtgcaagctggaggtgaaggtgatctaccagggcgtgaacaccccaggccagcctgtgttcctggagggccagcagcagagcctgcacaacaaggacttctag

SEQ ID NO: 88955 - DNA, 3749 bp, Artificial Sequence
  derived and/or modified sequence
gtcacaccgacctgcaccatctctcgcctgcctgtggggtttctgtcaactagtcgtggagggaaggagactctttaaagaataacatcttattgtggccatgccagaacccactaagaaagaggaaaatgaagtgccagccccagccccacccccggaagactggacccttgtcgaaactcctcctggggaggaacaagccaagcagaatgccaactcccagctgtccatcttgttcattgaaaaacctcaaggaggaacagtgaaagttggtgaagatatcaccttcatagccaaagtcaaggctgaagatcttctgagaaaacccactatcaaatggttcaaaggaaaatggatggacctggccagcaaagccgggaagcaccttcagctgaaggaaacctttgagaggcacagtcgggtgtacacatttgagatgcagatcatcaaggccaaagataactttgcaggaaattacagatgcgaggtcacctataaggataagtttgacagctgttcatttgatcttgaagtgcacgaatctactgggactactccaaacattgacatcagatctgctttcaagagaagtggagaaggtcaagaggatgcaggagaacttgactttagtggtctcctgaaacgtagggaggtgaagcagcaggaggaagaaccccaggtggacgtatgggagttgctgaagaacgcgaaacccagtgagtacgagaagatcgccttccagtatggaatcaccgacctgcgcggcatgctcaagcgactcaagcgcatgcgcagagaggagaagaagagcgcagcttttgcaaaaattcttgatcctgcatatcaggttgacaaaggaggcagagtgaggtttgttgtggagctggcagatccaaagttggaggtgaaatggtataaaaatggtcaagaaattcgacccagtaccaaatacatctttgaacacaaaggatgccagagaatcctgtttatcaataactgtcagatgacagatgattcagagtattatgtgacagccggtgatgagaaatgttccactgagctcttcgtaagagagcctccaattatggtgaccaaacagctggaagatacaactgcttattgtggggagagagtggaattagaatgtgaggtgtctgaagatgatgccaatgtaaaatggtttaagaatggtgaagagattatccctggtccaaaatcaagataccgaattagagttgagggtaaaaaacacatcttgatcatagagggagcaacaaaggctgatgctgcagaatattcagtaatgacaacaggaggacaatcatctgctaaacttagtgttgacttgaaacctctgaagattttgacacctctgactgatcagactgtaaatcttggaaaagaaatctgcctgaagtgtgaaatctctgaaaacataccaggaaaatggactaaaaatggcctacctgttcaggagagtgaccgtctaaaggtggttcacaagggaaggatccacaagttagtgatagccaatgccctcactgaagatgaaggtgattatgtatttgcacctgatgcctacaatgttactctgcctgccaaagttcatgttattgatcctcctaagatcatcctggatggtcttgatgctgacaacacagtgacagtgattgcaggaaacaagcttcgtcttgagatccccatcagcggagaaccacctcctaaagccatgtggagccggggagataaggctattatggaaggcagtggccggataagaacagaatcttaccctgatagcagcactctggtcattgatatagctgaaagagatgactctggtgtttaccacatcaatctgaaaaacgaagctggagaggcacatgcaagcatcaaggttaaagttgtggacttccctgatcctccagtggcaccgactgtgacagaggtgggagatgactggtgtatcatgaactgggagcctcctgcctacgacggaggctctccaatcctaggatattttattgagaggaagaagaaacaaagctccaggtggatgaggctgaattttgatctctgcaaagaaacaacttttgagcccaagaagatgattgaaggtgtggcctatgaggtccgcatctttgcagtcaatgccattggcatctccaagcccagtatgccctccaggccttttgttcctttggctgtaacaagccctcctactcttctgactgtggactctgtcactgacacgactgtcacgatgaggtggcgccccccagaccacattggtgcagcaggtttagatggctatgtgctagagtattgctttgaaggaactgaggactggatagttgcaaacaaagatctgattgacaagacgaagttcaccatcacaggtctgccaacagatgcaaagatctttgtgcgtgtgaaggctgttaatgcagctggtgccagcgagcccaagtactattctcagcccattctcgtgaaggaaatcatagaacctccaaagattcgcattccaagacacctgaagcaaacctatatccgcagagttggagaagctgtcaatctggttatacctttccagggaaaaccaagaccagaattaacttggaagaaggatggtgcagaaattgataagaatcaaataaacattcgcaactctgagactgatacaatcatatttattagaaaagcagagaggagccactctgggaaatatgatctgcaagtcaaagtggacaaattcgtggagaccgcatcaattgacatccagatcattgaccgtccaggtccaccccaaattgtgaagattgaggatgtctggggagaaaatgtcgctctcacatggactccaccaaaggatgatggaaatgctgctatcacaggctataccattcagaaggctgacaagaagagcatggaatggtttactgtcattgagcattatcatcgaaccagtgccaccattactgaattggtcatagggaatgaatattacttccgggtcttttctgaaaacatgtgtggcctcagtgaggatgccaccatgactaaagagagtgcagtgatcgccagggatggtaaaatctacaaaaatccagtgtatgaagactttgatttctcagaggcacccatgtttactcagcctttggttaacacctatgccatagctggttacaatgccaccctaaactgcagtgtgagaggaaatcctaagcctaaaataacctggatgaaaaacaaagttgctattgtggatgatccaagatacaggatgttcagcaaccagggagtctgtaccctggaaattcgcaagcccagcccctatgatggaggcacttactgctgcaaagcagtcaatgaccttgggacagtggagattgaatgcaaactggaggtgaaagtgatatatcaaggagtaaatacccctggacaaccagtcttcctggaggggcagcaacagtcattgcacaataaggatttttgaatgtataatatcatctaaggtgggctctccttctgcagactcctcttgcaaggcgtacctccaaacataattgattcgtatctgcgagacttacactcaagcaatcctgaggaatactgagggagggcctggctactgtctctctgcactctgctgctttgaaatctggttgaaatgagaaaaagcattttctgttttcccaccaggcccccaagtgtggtctttttctttcctcctaatgttgaagaga

SEQ ID NO: 88956 - DNA, 3399 bp, Artificial Sequence
  derived and/or modified sequence
atgcccgagcccaccaagaaggaggagaacgaggtgcccgcccccgctcccccacctgaagactggactctcgtggagacgccaccaggtgaggagcaagctaagcagaacgcaaacagccaactgtcaattctctttatcgaaaaaccacagggcggaaccgtaaaagtgggcgaggacatcacttttattgctaaagtgaaggcagaggatctgttgcggaaaccaaccatcaaatggtttaagggcaagtggatggacctggcgagtaaggctggtaagcacctccagctcaaagaaaccttcgaacgccactcacgtgtgtatacatttgagatgcaaattattaaggcgaaggacaatttcgcagggaattaccgctgtgaagttacctataaggacaagttcgatagctgttcatttgacttggaggtccacgagagcaccgggactacacccaatatcgatatccgctcggcgtttaaacggtcgggtgagggccaggaagacgctggggaactagacttcagcggcctgctcaagaggagggaagtcaaacagcaagaagaggagccacaagtggatgtgtgggaactgcttaaaaacgccaaaccgtccgaatacgagaagatagccttccagtacggtatcacggatttaagaggaatgctaaaaaggcttaagagaatgagacgtgaagagaagaagtcggcagccttcgccaaaatcctggatcccgcctatcaggtggataagggagggagggtgagattcgtggtcgaactcgccgatccaaagcttgaagtcaaatggtacaaaaatgggcaggaaattagacctagcactaaatacatctttgaacacaagggctgccagcggattctcttcattaataattgccagatgaccgacgactccgagtactacgtcacggcaggcgatgagaagtgcagtacagagttatttgtacgagagccccctattatggttacgaaacaattggaagacactacggcgtattgcggggaaagagtagagcttgaatgcgaagtgagcgaggatgacgccaatgtgaaatggtttaagaatggagaagagattatcccgggccctaagagtcggtaccgcatcagggttgaaggaaaaaagcacatcctgatcattgaaggggcgacaaaagccgatgctgcagagtacagtgtcatgacgactggcggacagtcatctgctaaactcagcgttgacttaaagccactgaagatcttgactccgttaaccgaccagacggtgaatctgggtaaggagatctgcctcaaatgcgagatcagtgagaacatccccggaaagtggaccaagaacggattgccagtgcaggaatctgatagattaaaggtcgttcacaaagggcggattcacaagttggttatcgccaacgccctaacggaggacgaaggtgattatgtctttgcaccagacgcttataatgtcaccctgccagcgaaagtgcacgttatcgatcctcccaagatcattctggatggactggacgctgacaataccgtgacagtgatcgccggtaataaactgagactggagattcccatctcaggcgaaccgcccccaaaggcgatgtggtcccgcggtgataaggccatcatggaggggagtgggcggatccgaacggaatcctaccctgacagcagtacgttggtgatcgatattgctgaacgcgacgattccggggtctatcacataaatctgaagaacgaggccggggaggcacatgcatccattaaagtgaaggtcgtcgacttcccagaccctcccgtcgcaccaactgtgaccgaagtcggtgacgactggtgcattatgaattgggagccccctgcctacgatggcgggtctcccatcttggggtacttcattgagaggaagaagaagcaaagctccaggtggatgagactgaatttcgatctgtgtaaagagactaccttcgagcccaaaaaaatgatcgaaggcgtcgcctatgaggtgcgcatttttgcagtaaatgccatcggtatctcaaaaccaagcatgccaagtcgcccatttgtgcctctagcggtaacttcccccccaaccctcttaactgtagatagtgttactgataccacagtcactatgcgttggcgaccacctgaccacatcggcgctgcgggcctcgatggctacgtgctcgagtattgctttgaaggaaccgaggattggatcgtagcaaataaggacctcattgacaagacaaaattcacaatcacaggattgccgacggacgctaaaatcttcgttagggttaaagcagtcaatgccgcaggcgcctccgagcccaagtattactcccaacctattcttgttaaggagatcattgaaccacctaagattaggatcccccggcacctgaagcagacttatatcagacgcgtgggagaggctgtcaacctcgtgatcccgttccagggcaaacctagaccagagctgacttggaaaaaagatggagcagaaattgataagaatcagatcaacattcggaattccgagaccgataccatcattttcataaggaaggctgagagaagtcattcaggcaagtacgacttacaggtgaaagttgacaaattcgttgagacagcgtctattgacatacaaatcattgataggcctggacctccccagattgtaaaaatcgaggacgtttggggtgagaacgtggccttaacttggaccccaccaaaagacgacggcaatgctgctatcactgggtatacaattcagaaggccgacaagaaatctatggagtggttcaccgtcatcgagcattaccacagaacgtccgctaccataaccgaactggtcatagggaatgaatattacttcagggtcttttcagagaatatgtgtggattgagcgaggatgcgaccatgacaaaggagtccgctgtgattgccagagacggcaagatctataaaaatccagtgtatgaagacttcgacttttccgaggctcccatgttcactcagccactagtaaacacctatgcaatcgcgggatacaatgctaccttgaactgtagtgttcggggaaaccccaaacccaaaattacatggatgaagaacaaggtggccatcgtcgacgacccgagatatagaatgttctcgaaccagggtgtgtgtactctggagattcggaaacctagcccctacgacggtggtacatactgttgcaaagctgtcaacgatcttggcactgtggaaattgagtgcaaattggaggtgaaggtgatctaccagggcgtcaatactcctggccagccggtcttcctggaaggacagcaacagagtctgcacaacaaggacttttag

SEQ ID NO: 88957 - DNA, 3399 bp, Artificial Sequence
  derived and/or modified sequence
atgccggagccaaccaaaaaagaagagaacgaagtcccagcgcctgcccctccccctgaggactggacccttgtggaaaccccgccaggcgaggaacaggctaagcagaatgcaaattcccagctgtcaatcctttttatagaaaagccacaagggggtaccgtcaaagtgggggaggacataacatttatagccaaggtgaaagctgaagatctgttgcggaaacctacaataaaatggtttaagggaaaatggatggacctggcctccaaggctgggaagcacttacaacttaaagagacattcgaacgtcattcccgggtgtacactttcgaaatgcaaatcattaaagccaaagacaatttcgcaggcaactaccgttgcgaagttacgtataaagacaaatttgactcatgcagtttcgatcttgaagtgcatgagagtaccggcaccacacccaacattgatattagaagcgcctttaagcggtccggggaaggacaggaggacgctggcgaactcgactttagcggtctacttaagagaagggaggtgaagcagcaggaagaagaaccacaggtggacgtatgggagctcctaaaaaatgcgaaacccagtgaatacgagaagatcgcatttcagtacgggatcaccgacttgaggggaatgctcaagcgcctcaagaggatgcgcagagaagaaaaaaagagtgccgcatttgccaagatactcgacccagcataccaagtagataagggtggtcgtgtgaggttcgtggttgagttagccgatcccaagcttgaggttaaatggtacaaaaacgggcaggaaattcgcccatcaaccaagtacatcttcgagcacaaggggtgccagaggatcctattcatcaataactgccagatgacagacgacagtgagtactatgttacagctggggatgagaagtgctcaacggagttattcgtacgcgaaccacccataatggtgactaaacagctggaagacacaaccgcgtactgtggtgagcgggtagagcttgagtgtgaggtgtccgaggacgacgctaacgttaagtggtttaagaatggagaggaaatcatcccagggcctaaaagccggtatcgaatacgtgtggaaggaaagaagcatattctaattattgaaggcgctaccaaggccgatgcagctgaatatagcgtcatgacaaccgggggtcagtcgagtgctaaactgtccgtggatctgaagcctctcaagatattgacccctctgaccgaccagaccgtgaacctcggaaaagaaatctgtttgaaatgcgagataagcgaaaacatcccgggaaagtggacaaaaaatggactgcctgtgcaggagagcgacaggttgaaagtggtgcacaaaggcagaattcataaactggtgatagctaacgctctgacagaagacgagggcgactacgttttcgcacccgacgcctataacgtgaccctgcccgctaaagtccacgtcatcgatccgccaaagatcatcctggatggactcgacgccgataacaccgtgactgtaatagcgggaaataaattgcgtctggagattcctattagcggcgaacctcccccaaaggccatgtggagcagaggtgacaaggcgatcatggagggctccggcaggattcggactgagagctatccagattccagtacgttggtaattgatatcgctgagagagacgattccggcgtgtatcacattaacctaaaaaatgaagctggggaagcccacgcctcaattaaagtcaaggtggtggacttccctgacccacctgtggcccctaccgtcaccgaggtgggcgacgactggtgcattatgaactgggaacccccagcctatgatgggggaagccctatattggggtactttattgagagaaagaaaaagcagagttccaggtggatgcgactcaatttcgatttgtgcaaggagaccacctttgagccaaagaaaatgattgaaggggtggcttatgaagtccgaatctttgcggtcaatgctattgggattagtaaaccttcaatgcctagtcgcccttttgtgcctctcgcagtgaccagtccccctaccctcctcactgttgattccgttaccgacaccaccgttaccatgcggtggcgaccccctgaccacatcggtgctgctggattggatggttacgtgttggagtactgttttgagggtactgaagattggattgttgctaataaggatctgatcgacaaaacaaagtttactattactggcttacccacagacgcaaaaatatttgttagagtgaaggcagtgaatgccgctggtgccagcgagccaaagtactactcccaaccgatactggttaaggagatcatcgagcccccaaaaatccgaatacctaggcaccttaagcagacctacatccggagggtgggcgaggctgtgaacctggtgatcccttttcaaggtaagccacggcctgagttaacatggaagaaggacggcgctgaaatagataaaaatcagatcaatatccgcaactcagagactgacactattatatttattaggaaagcagagcggagccactccggtaaatacgacctgcaggtgaaagttgataagttcgtcgaaacagcaagcattgacattcagatcattgatcggcctggccctccacagatcgtgaaaatagaggatgtgtggggcgaaaacgtagcccttacatggacaccccctaaggatgacggaaatgcggctatcactggatataccattcagaaagccgataaaaagtccatggaatggtttacggtcattgagcactatcaccgtacaagtgccaccatcacagaacttgtaatcggtaatgaatactactttcgtgttttctctgagaacatgtgcggactctccgaggatgcgactatgacaaaggaaagtgcagtgattgctagagatggtaagatctacaagaatcctgtgtacgaagattttgacttctcggaagccccaatgtttactcaacccctggtgaatacttatgctattgcagggtataacgctacactcaattgctccgtccgaggcaaccccaaacccaagatcacatggatgaaaaacaaagtggccatcgtcgatgatccacgctaccgcatgttcagcaatcaaggcgtgtgtacgctagagatccgtaaaccttccccttatgacggaggtacatactgttgcaaagcagtgaatgacttgggaacggtggagatcgagtgtaaattggaagtgaaagtaatatatcagggtgtgaatacccccggacagcctgtcttcctcgagggccaacaacagagcttgcataacaaggacttttag

SEQ ID NO: 88958 - DNA, 3399 bp, Artificial Sequence
  derived and/or modified sequence
atgcccgagcccaccaagaaggaggagaacgaggtgcccgcccccgcccccccccccgaggactggaccctggtggagaccccccccggcgaggagcaggccaagcagaacgccaacagccagctgagcatcctgttcatcgagaagccccagggcggcaccgtgaaggtgggcgaggacatcaccttcatcgccaaggtgaaggccgaggacctgctgagaaagcccaccatcaagtggttcaagggcaagtggatggacctggccagcaaggccggcaagcacctgcagctgaaggagaccttcgagagacacagcagagtgtacaccttcgagatgcagatcatcaaggccaaggacaacttcgccggcaactacagatgcgaggtgacctacaaggacaagttcgacagctgcagcttcgacctggaggtgcacgagagcaccggcaccacccccaacatcgacatcagaagcgccttcaagagaagcggcgagggccaggaggacgccggcgagctggacttcagcggcctgctgaagagaagagaggtgaagcagcaggaggaggagccccaggtggacgtgtgggagctgctgaagaacgccaagcccagcgagtacgagaagatcgccttccagtacggcatcaccgacctgagaggcatgctgaagagactgaagagaatgagaagagaggagaagaagagcgccgccttcgccaagatcctggaccccgcctaccaggtggacaagggcggcagagtgagattcgtggtggagctggccgaccccaagctggaggtgaagtggtacaagaacggccaggagatcagacccagcaccaagtacatcttcgagcacaagggctgccagagaatcctgttcatcaacaactgccagatgaccgacgacagcgagtactacgtgaccgccggcgacgagaagtgcagcaccgagctgttcgtgagagagccccccatcatggtgaccaagcagctggaggacaccaccgcctactgcggcgagagagtggagctggagtgcgaggtgagcgaggacgacgccaacgtgaagtggttcaagaacggcgaggagatcatccccggccccaagagcagatacagaatcagagtggagggcaagaagcacatcctgatcatcgagggcgccaccaaggccgacgccgccgagtacagcgtgatgaccaccggcggccagagcagcgccaagctgagcgtggacctgaagcccctgaagatcctgacccccctgaccgaccagaccgtgaacctgggcaaggagatctgcctgaagtgcgagatcagcgagaacatccccggcaagtggaccaagaacggcctgcccgtgcaggagagcgacagactgaaggtggtgcacaagggcagaatccacaagctggtgatcgccaacgccctgaccgaggacgagggcgactacgtgttcgcccccgacgcctacaacgtgaccctgcccgccaaggtgcacgtgatcgacccccccaagatcatcctggacggcctggacgccgacaacaccgtgaccgtgatcgccggcaacaagctgagactggagatccccatcagcggcgagcccccccccaaggccatgtggagcagaggcgacaaggccatcatggagggcagcggcagaatcagaaccgagagctaccccgacagcagcaccctggtgatcgacatcgccgagagagacgacagcggcgtgtaccacatcaacctgaagaacgaggccggcgaggcccacgccagcatcaaggtgaaggtggtggacttccccgacccccccgtggcccccaccgtgaccgaggtgggcgacgactggtgcatcatgaactgggagccccccgcctacgacggcggcagccccatcctgggctacttcatcgagagaaagaagaagcagagcagcagatggatgagactgaacttcgacctgtgcaaggagaccaccttcgagcccaagaagatgatcgagggcgtggcctacgaggtgagaatcttcgccgtgaacgccatcggcatcagcaagcccagcatgcccagcagacccttcgtgcccctggccgtgaccagcccccccaccctgctgaccgtggacagcgtgaccgacaccaccgtgaccatgagatggagaccccccgaccacatcggcgccgccggcctggacggctacgtgctggagtactgcttcgagggcaccgaggactggatcgtggccaacaaggacctgatcgacaagaccaagttcaccatcaccggcctgcccaccgacgccaagatcttcgtgagagtgaaggccgtgaacgccgccggcgccagcgagcccaagtactacagccagcccatcctggtgaaggagatcatcgagccccccaagatcagaatccccagacacctgaagcagacctacatcagaagagtgggcgaggccgtgaacctggtgatccccttccagggcaagcccagacccgagctgacctggaagaaggacggcgccgagatcgacaagaaccagatcaacatcagaaacagcgagaccgacaccatcatcttcatcagaaaggccgagagaagccacagcggcaagtacgacctgcaggtgaaggtggacaagttcgtggagaccgccagcatcgacatccagatcatcgacagacccggccccccccagatcgtgaagatcgaggacgtgtggggcgagaacgtggccctgacctggaccccccccaaggacgacggcaacgccgccatcaccggctacaccatccagaaggccgacaagaagagcatggagtggttcaccgtgatcgagcactaccacagaaccagcgccaccatcaccgagctggtgatcggcaacgagtactacttcagagtgttcagcgagaacatgtgcggcctgagcgaggacgccaccatgaccaaggagagcgccgtgatcgccagagacggcaagatctacaagaaccccgtgtacgaggacttcgacttcagcgaggcccccatgttcacccagcccctggtgaacacctacgccatcgccggctacaacgccaccctgaactgcagcgtgagaggcaaccccaagcccaagatcacctggatgaagaacaaggtggccatcgtggacgaccccagatacagaatgttcagcaaccagggcgtgtgcaccctggagatcagaaagcccagcccctacgacggcggcacctactgctgcaaggccgtgaacgacctgggcaccgtggagatcgagtgcaagctggaggtgaaggtgatctaccagggcgtgaacacccccggccagcccgtgttcctggagggccagcagcagagcctgcacaacaaggacttctag

SEQ ID NO: 88959 - protein, 1127 aa, Artificial Sequence
  derived and/or modified sequence
MPEPTKKEENEVPAPAPPPEEPSKEKEAGTTPAKDWTLVETPPGEEQAKQNANSQLSILFIEKPQGGTVKVGEDITFIAKVKAEDLLRKPTIKWFKGKWMDLASKAGKHLQLKETFERHSRVYTFEMQIIKAKDNFAGNYRCEVTYKDKFDSCSFDLEVHESTGTTPNIDIRSAFKRREVKQQEEEPQVDVWELLKNAKPSEYEKIAFQYGITDLRGMLKRLKRMRREEKKSAAFAKILDPAYQVDKGGRVRFVVELADPKLEVKWYKNGQEIRPSTKYIFEHKGCQRILFINNCQMTDDSEYYVTAGDEKCSTELFVREPPIMVTKQLEDTTAYCGERVELECEVSEDDANVKWFKNGEEIIPGPKSRYRIRVEGKKHILIIEGATKADAAEYSVMTTGGQSSAKLSVDLKPLKILTPLTDQTVNLGKEICLKCEISENIPGKWTKNGLPVQESDRLKVVHKGRIHKLVIANALTEDEGDYVFAPDAYNVTLPAKVHVIDPPKIILDGLDADNTVTVIAGNKLRLEIPISGEPPPKAMWSRGDKAIMEGSGRIRTESYPDSSTLVIDIAERDDSGVYHINLKNEAGEAHASIKVKVVDFPDPPVAPTVTEVGDDWCIMNWEPPAYDGGSPILGYFIERKKKQSSRWMRLNFDLCKETTFEPKKMIEGVAYEVRIFAVNAIGISKPSMPSRPFVPLAVTSPPTLLTVDSVTDTTVTMRWRPPDHIGAAGLDGYVLEYCFEGTEDWIVANKDLIDKTKFTITGLPTDAKIFVRVKAVNAAGASEPKYYSQPILVKEIIEPPKIRIPRHLKQTYIRRVGEAVNLVIPFQGKPRPELTWKKDGAEIDKNQINIRNSETDTIIFIRKAERSHSGKYDLQVKVDKFVETASIDIQIIDRPGPPQIVKIEDVWGENVALTWTPPKDDGNAAITGYTIQKADKKSMEWFTVIEHYHRTSATITELVIGNEYYFRVFSENMCGLSEDATMTKESAVIARDGKIYKNPVYEDFDFSEAPMFTQPLVNTYAIAGYNATLNCSVRGNPKPKITWMKNKVAIVDDPRYRMFSNQGVCTLEIRKPSPYDGGTYCCKAVNDLGTVEIECKLEVKVIYQGVNTPGQPVFLEGQQQSLHNKDF

SEQ ID NO: 88960 - DNA, 3384 bp, Artificial Sequence
  derived and/or modified sequence
atgcctgagcctaccaagaaggaggagaatgaagtgccagctcctgctccccctcctgaggagccatcaaaggagaaggaggctgggacaacgcctgccaaagactggaccctggtggagacacctcctggcgaagagcaagcaaagcagaatgcaaatagtcagctctctatcctgtttattgagaagcctcagggtggaacagtaaaagtgggtgaggacattacattcatcgcgaaggtcaaggcggaggacctgctgcggaagcccaccattaagtggtttaaaggaaagtggatggatctagcttccaaagctggaaagcatctccaactgaaggagaccttcgagaggcactcgagggtgtatacattcgagatgcagatcattaaggccaaggataatttcgcgggcaactacagatgtgaagttacatataaggataagtttgactcatgtagcttcgacctcgaggtgcacgaatccaccggaaccacacctaatattgatatacggtctgccttcaagaggagggaagtaaaacagcaggaggaggagcctcaggtagatgtatgggaactcctgaaaaacgccaaaccctccgaatacgagaagattgccttccagtacggcatcaccgatctcagagggatgttgaaaagattgaaaagaatgcgaagagaggagaaaaagagcgctgccttcgcgaaaattctggacccagcgtatcaggtcgacaagggcgggcgggtgagatttgtcgtcgagttagccgaccctaaactggaggtaaagtggtacaaaaacgggcaggagattcggccctctactaagtacattttcgagcacaaaggatgtcagaggatcctgttcataaacaactgtcagatgacggatgacagcgaatactacgtgacggccggcgacgaaaagtgttccactgaactgtttgtgcgcgagccgcccatcatggtgactaagcagctggaggataccacagcgtactgtggtgagagagttgagctcgaatgtgaagtgtccgaggacgacgccaatgtgaagtggtttaagaatggagaagaaatcattccaggacccaagtctaggtaccgcattcgggtggaaggcaaaaaacatattctgattatcgagggcgccaccaaagccgacgcggcggagtattcagttatgactacaggtggtcagtcctcagccaaattgagtgttgatctgaagcctctgaaaattctgactccattgactgatcaaacggtgaatctgggaaaagagatttgtctgaaatgcgagatctctgaaaacatacccggcaagtggaccaagaatggattgccagtgcaggagagcgatcgcctgaaagtagtacataaaggtcgcattcataagctagtgattgctaacgccctcactgaggacgaaggagactacgtttttgcaccggacgcctataatgtgacactgccagctaaagtgcatgttatcgatcccccaaaaatcatcctcgatgggctcgacgccgataacacagtcacagtgatcgctggcaataaactccgtttggagatcccaatttccggggaaccccctccaaaggcaatgtggagccgcggcgataaggctattatggaaggttccggcaggatcaggacagaatcttatccagatagcagcacattggtcattgatattgcagaacgggatgatagcggcgtgtatcacattaatttgaaaaatgaggccggtgaggcacatgcctcgattaaggtaaaggttgtggacttcccagaccctcctgttgctccaaccgtgacagaggttggcgacgattggtgcatcatgaactgggaaccccccgcctatgacggaggttctccaatcctcggttatttcattgaacggaaaaagaagcaatccagtaggtggatgagacttaacttcgacttgtgtaaggaaaccacattcgagccgaaaaaaatgattgaaggggtggcatacgaggtgcggatcttcgctgtgaatgccataggaatttccaagcccagcatgcctagcagacccttcgttcctctggcagtgaccagccctccaacacttctgaccgtggacagcgtgactgataccactgtgacaatgcggtggagaccccctgatcatatcggcgccgctggactcgacgggtatgtgcttgagtactgctttgagggcactgaggactggatagttgctaacaaagacctgattgacaaaacaaaattcacaatcacaggtttacccactgatgccaagatatttgttagagtgaaggccgttaacgccgccggcgcctccgaaccaaaatattattcccagcctattttagtgaaggaaattatcgaaccacctaagatcaggattccccggcacctgaaacagacgtacatccgcagggtgggagaggccgtcaatttggtgatcccttttcagggtaaaccgcgccctgaattgacatggaaaaaggacggagcggagattgacaagaaccagataaatatcagaaacagcgaaaccgacactattatttttattcggaaagctgagcggagtcactcagggaagtatgatctgcaggtcaaggtggacaagttcgtggaaaccgcaagtatcgatattcagatcatcgatcgtcctggtccacctcagattgtgaagatcgaagacgtgtggggcgagaacgtcgctttaacctggacacccccaaaggacgacgggaacgctgcgatcactggatacacgatccaaaaggccgacaagaagtcaatggagtggttcactgtgatcgagcactaccaccgcaccagcgcaaccataacagaattagtcatcggcaacgaatattactttagggtgttcagcgagaatatgtgcggacttagtgaggatgctacaatgaccaaggagtccgctgtcattgctagagacggcaagatttacaagaaccctgtttacgaagatttcgatttcagtgaggccccaatgttcacccagccgctggttaacacatacgcgatagccggttacaatgcaaccctgaattgtagtgtccggggcaacccaaagcccaagattacatggatgaaaaacaaggtcgccattgtggatgatcccagatatcgcatgttctccaatcagggcgtgtgcacactcgagatcaggaagccgagcccatacgacggcggcacatattgctgcaaagcagtgaatgacctgggcaccgtcgaaattgaatgcaaacttgaggttaaggtgatctaccaaggtgtcaacacgccggggcaaccagtgtttctagagggacaacagcagtctctgcataacaaagacttttag

SEQ ID NO: 88961 - DNA, 3384 bp, Artificial Sequence
  derived and/or modified sequence
atgcctgagcccaccaagaaggaggagaatgaggtgcctgccccagcccctcctcctgaggagcccagcaaggagaaggaggccggcaccaccccagccaaggactggaccctggtggagaccccacctggagaggagcaggccaagcagaatgccaacagccagctgagcatcctcttcatcgagaagccccagggcggcaccgtgaaggtgggggaggacatcaccttcatcgccaaggtgaaggccgaggacctgctgaggaagcccaccatcaagtggttcaagggcaagtggatggacctggccagcaaggccggcaagcacctgcagctgaaggagacctttgagcggcacagccgggtgtacacctttgagatgcagatcatcaaggccaaggacaactttgctggcaactaccgctgtgaggtgacctacaaggacaagtttgacagctgcagctttgacctggaggtgcatgagagcacaggcaccacccccaacatcgacatccgcagcgccttcaagagaagagaggtgaagcagcaggaggaggagccccaggtggatgtgtgggagctgctgaagaatgccaagcccagtgaatatgagaagatcgccttccagtatggcatcacagacctgcggggcatgctgaagaggctgaagaggatgaggcgggaggagaagaagtctgctgcctttgccaagatcctggaccctgcctaccaggtggacaagggcggccgggtgcgctttgtggtggagctggccgaccccaagctggaggtgaagtggtacaagaatggccaggagatccggcccagcaccaagtacatctttgagcacaagggctgccagaggatcctcttcatcaacaactgccagatgacagatgattctgagtactacgtgacagctggagatgagaagtgcagcacagagctgtttgtgcgggagccccccatcatggtgaccaagcagctggaggacaccacagcctactgtggggagcgggtggagctggagtgtgaggtgtctgaagatgatgccaacgtgaagtggttcaagaatggagaggagatcatccctggccccaagagccgctaccgcatccgggtggagggcaagaagcacatcctgatcattgaaggagccaccaaggcagatgctgctgagtacagcgtgatgaccactggaggccagagcagcgccaagctgtctgtggacctgaagcccctgaagatcctgacccccctgacagaccagacagtgaacctgggcaaggagatctgcctgaagtgtgagatcagcgagaacatccctgggaagtggaccaagaatggcctgcctgtgcaggagagtgaccggctgaaggtggtgcacaagggccgcatccacaagctggtgattgccaatgccctgacagaagatgaaggagactatgtgtttgccccagatgcctacaacgtgaccctgcctgccaaggtgcacgtgattgacccccccaagatcatcctggatggcctggatgctgacaacacagtgacagtgattgctggcaacaagctgcggctggagatccccatctctggagagcccccacccaaggccatgtggagcagaggagacaaggccatcatggagggcagcggccgcatcagaacagagagctacccagacagcagcaccctggtgattgatattgctgagagagatgattctggagtgtaccacatcaacctgaagaatgaggccggggaggcccacgccagcatcaaggtgaaggtggtggacttcccagacccccctgtggcccccaccgtgacagaggtgggagatgactggtgcatcatgaactgggagcccccagcctatgatggcggcagccccatcctgggctacttcattgaaaggaagaagaagcagagcagccgctggatgaggctgaactttgacctgtgcaaggagaccacctttgagcccaagaagatgattgagggcgtggcctatgaggtgcgcatctttgctgtgaatgccatcggcatcagcaagcccagcatgcccagccggccctttgtgcccctggccgtgaccagcccccccaccctgctgactgtggacagcgtgacagacaccaccgtgaccatgcgctggaggcccccagaccacatcggggccgccggcctggatggctacgtgctggagtactgctttgagggcacagaggactggatcgtggccaacaaggacctgattgacaagaccaagttcaccatcaccggcctgcccacagatgccaagatctttgtgcgggtgaaggctgtgaatgctgctggggccagcgagcccaagtactacagccagcccatcctggtgaaggagatcatcgagccccccaagatccgcatccccaggcacctgaagcagacctacatccggcgggtgggggaggccgtgaacctggtgatccccttccagggcaagcccaggcctgagctgacctggaagaaggatggagctgagattgacaagaaccagatcaacatcagaaattctgaaacagacaccatcatcttcatcaggaaggccgagaggagccacagcggcaagtatgacctgcaggtgaaggtggacaagtttgtggagacagccagcattgacatccagatcatcgacaggcctggccccccccagatcgtgaagattgaagatgtgtggggagaaaatgtggccctgacctggaccccacccaaggatgatggaaatgctgccatcaccggctacaccatccagaaggctgacaagaagtccatggagtggttcaccgtgattgagcactaccacaggaccagcgccaccatcacagagctggtgattggaaatgagtactacttccgggtcttcagcgagaacatgtgtggcctgtctgaagatgccaccatgaccaaggagagcgctgtgattgccagagatggcaagatctacaagaaccctgtgtatgaggactttgacttcagcgaggcccccatgttcacccagcccctggtgaacacctacgccatcgccggctacaatgccaccctgaactgcagcgtgcggggcaaccccaagcccaagatcacctggatgaagaacaaggtggccatcgtggatgacccccgctacaggatgttcagcaaccagggcgtgtgcaccctggagatcaggaagcccagcccctatgatggcggcacctactgctgcaaggctgtgaatgacctgggcaccgtggagattgagtgcaagctggaggtgaaggtgatctaccagggcgtgaacaccccaggccagcccgtcttcctggagggccagcagcagagcctgcacaacaaggacttctag

SEQ ID NO: 88962 - DNA, 3512 bp, Artificial Sequence
  derived and/or modified sequence
gcctgcctgtggggtttctgtcaactagtcgtggagggaaggagactctttaaagaataacatcttattgtggccatgccagaacccactaagaaagaggaaaatgaagtgccagccccagccccacccccggaagaaccaagtaaagagaaggaggccggaactacaccagcaaaagactggacccttgtcgaaactcctcctggggaggaacaagccaagcagaatgccaactcccagctgtccatcttgttcattgaaaaacctcaaggaggaacagtgaaagttggtgaagatatcaccttcatagccaaagtcaaggctgaagatcttctgagaaaacccactatcaaatggttcaaaggaaaatggatggacctggccagcaaagccgggaagcaccttcagctgaaggaaacctttgagaggcacagtcgggtgtacacatttgagatgcagatcatcaaggccaaagataactttgcaggaaattacagatgcgaggtcacctataaggataagtttgacagctgttcatttgatcttgaagtgcacgaatctactgggactactccaaacattgacatcagatctgctttcaagagaagggaggtgaagcagcaggaggaagaaccccaggtggacgtatgggagttgctgaagaacgcgaaacccagtgagtacgagaagatcgccttccagtatggaatcaccgacctgcgcggcatgctcaagcgactcaagcgcatgcgcagagaggagaagaagagcgcagcttttgcaaaaattcttgatcctgcatatcaggttgacaaaggaggcagagtgaggtttgttgtggagctggcagatccaaagttggaggtgaaatggtataaaaatggtcaagaaattcgacccagtaccaaatacatctttgaacacaaaggatgccagagaatcctgtttatcaataactgtcagatgacagatgattcagagtattatgtgacagccggtgatgagaaatgttccactgagctcttcgtaagagagcctccaattatggtgaccaaacagctggaagatacaactgcttattgtggggagagagtggaattagaatgtgaggtgtctgaagatgatgccaatgtaaaatggtttaagaatggtgaagagattatccctggtccaaaatcaagataccgaattagagttgagggtaaaaaacacatcttgatcatagagggagcaacaaaggctgatgctgcagaatattcagtaatgacaacaggaggacaatcatctgctaaacttagtgttgacttgaaacctctgaagattttgacacctctgactgatcagactgtaaatcttggaaaagaaatctgcctgaagtgtgaaatctctgaaaacataccaggaaaatggactaaaaatggcctacctgttcaggagagtgaccgtctaaaggtggttcacaagggaaggatccacaagttagtgatagccaatgccctcactgaagatgaaggtgattatgtatttgcacctgatgcctacaatgttactctgcctgccaaagttcatgttattgatcctcctaagatcatcctggatggtcttgatgctgacaacacagtgacagtgattgcaggaaacaagcttcgtcttgagatccccatcagcggagaaccacctcctaaagccatgtggagccggggagataaggctattatggaaggcagtggccggataagaacagaatcttaccctgatagcagcactctggtcattgatatagctgaaagagatgactctggtgtttaccacatcaatctgaaaaacgaagctggagaggcacatgcaagcatcaaggttaaagttgtggacttccctgatcctccagtggcaccgactgtgacagaggtgggagatgactggtgtatcatgaactgggagcctcctgcctacgacggaggctctccaatcctaggatattttattgagaggaagaagaaacaaagctccaggtggatgaggctgaattttgatctctgcaaagaaacaacttttgagcccaagaagatgattgaaggtgtggcctatgaggtccgcatctttgcagtcaatgccattggcatctccaagcccagtatgccctccaggccttttgttcctttggctgtaacaagccctcctactcttctgactgtggactctgtcactgacacgactgtcacgatgaggtggcgccccccagaccacattggtgcagcaggtttagatggctatgtgctagagtattgctttgaaggaactgaggactggatagttgcaaacaaagatctgattgacaagacgaagttcaccatcacaggtctgccaacagatgcaaagatctttgtgcgtgtgaaggctgttaatgcagctggtgccagcgagcccaagtactattctcagcccattctcgtgaaggaaatcatagaacctccaaagattcgcattccaagacacctgaagcaaacctatatccgcagagttggagaagctgtcaatctggttatacctttccagggaaaaccaagaccagaattaacttggaagaaggatggtgcagaaattgataagaatcaaataaacattcgcaactctgagactgatacaatcatatttattagaaaagcagagaggagccactctgggaaatatgatctgcaagtcaaagtggacaaattcgtggagaccgcatcaattgacatccagatcattgaccgtccaggtccaccccaaattgtgaagattgaggatgtctggggagaaaatgtcgctctcacatggactccaccaaaggatgatggaaatgctgctatcacaggctataccattcagaaggctgacaagaagagcatggaatggtttactgtcattgagcattatcatcgaaccagtgccaccattactgaattggtcatagggaatgaatattacttccgggtcttttctgaaaacatgtgtggcctcagtgaggatgccaccatgactaaagagagtgcagtgatcgccagggatggtaaaatctacaaaaatccagtgtatgaagactttgatttctcagaggcacccatgtttactcagcctttggttaacacctatgccatagctggttacaatgccaccctaaactgcagtgtgagaggaaatcctaagcctaaaataacctggatgaaaaacaaagttgctattgtggatgatccaagatacaggatgttcagcaaccagggagtctgtaccctggaaattcgcaagcccagcccctatgatggaggcacttactgctgcaaagcagtcaatgaccttgggacagtggagattgaatgcaaactggaggtgaaagtgatatatcaaggagtaaatacccctggacaaccagtcttcctggaggggcagcaacagtcattgcacaataaggatttttgaatgtataatatcatctaaggtgggctctccttctgcagactcctcttgcaagg

SEQ ID NO: 88963 - DNA, 3384 bp, Artificial Sequence
  derived and/or modified sequence
atgcccgagcccaccaagaaggaggagaacgaggtgcccgcccccgcgccccctcccgaagagccgagcaaggaaaaggaagccgggacaacacccgccaaggattggaccctagtggaaactccaccaggagaggaacaagcgaagcagaacgccaacagtcaactgtctatcctattcatagagaagccacaggggggtactgtgaaggtgggcgaggacattactttcatcgctaaagtaaaagcagaagatctgttaagaaaaccaacaatcaaatggtttaaaggcaagtggatggatttagcgtccaaggccgggaaacacctgcagttaaaagagaccttcgaaagacactcacgtgtctatacattcgaaatgcagattataaaagccaaggacaattttgccggcaattacagatgcgaggttacttacaaagataagtttgattcatgctccttcgaccttgaggtgcacgaatccacaggcaccacccctaacatcgatatccggtcagcctttaaaaggagagaagtcaaacagcaggaagaagaaccccaggttgatgtctgggagctgctaaaaaacgccaaaccctccgaatatgagaaaatcgcatttcagtacgggataactgatctgcgagggatgctcaagcgtttgaagcgcatgcggagggaagagaagaagagcgccgcttttgccaagatcttggatcctgcctatcaggtggataagggcggaagagttagattcgtggtggagctggccgatcctaaattggaagtgaaatggtacaaaaacggtcaggagatccggcctagcaccaaatacatcttcgaacacaaaggatgccagagaatcctgtttatcaacaactgtcagatgacagatgactccgaatattacgtgaccgccggggatgagaagtgctcaaccgagctcttcgttcgcgagcctccaatcatggtgacgaagcagctcgaggataccaccgcctactgtggtgagagagtagagttggaatgtgaggtgagcgaagatgatgcaaacgtgaaatggttcaaaaacggggaggagatcatccctggccccaaatctcgctacaggatccgcgtggagggaaaaaagcacatcctgataatagaaggggccaccaaggccgacgccgcggagtattctgtcatgacgaccggcggacaatcttctgccaagctttctgtagatctcaagcccctgaagattctcaccccgttgactgaccaaactgtgaatctggggaaagagatatgcctcaaatgcgagatttcggagaacataccaggtaagtggaccaaaaacgggctgccagtccaggagagtgatcgcctgaaggtagtgcacaaaggtcggattcataagctcgtgatcgccaacgcactgactgaggacgaaggcgactatgtttttgccccagacgcatataacgtcacactgccagctaaagtgcacgtgatagacccccccaagatcatcttggatggactagatgccgacaatacagtgaccgtgattgccggcaacaaattaaggctggaaatacctatttctggcgagcccccaccaaaagccatgtggtctcgcggcgataaagccatcatggaagggtctggccggattagaacggagtcttacccggactcgtctactctggttattgatatcgctgaacgcgatgatagtggagtttaccatatcaatctgaagaatgaggcaggcgaggcccacgcttcgattaaggttaaagtggtggactttccagacccacccgtggcgcccaccgtgactgaagtgggtgatgactggtgcatcatgaactgggagccacctgcctacgacggtggatccccaatcctcgggtattttatagagcggaagaaaaagcaaagtagcagatggatgagactgaatttcgatctgtgcaaggagacaacctttgaaccaaaaaaaatgattgaaggcgtagcctatgaagtgcgtatcttcgctgtgaacgctatcggcatctcaaaacctagcatgcccagccgaccatttgtcccactggctgtaacctccccccctacgctgctaacagtggacagtgtgacggatacaacggtgactatgcggtggcggccacctgaccatatcggtgctgctggacttgacggatacgtcctggagtattgctttgaaggtaccgaggattggatcgtggcgaacaaggatctcatcgacaaaacaaaattcacaattaccgggctcccaactgacgcaaaaatcttcgtcagagttaaagccgtgaacgccgccggcgccagcgagccgaagtactactcacagcccatattggtgaaggagatcatcgagccaccaaaaatccgcatcccaaggcacttgaaacagacatatatcagaagggtgggagaggctgtgaaccttgtgatccccttccaaggcaagccccgaccagagctgacctggaaaaaggacggagcagaaattgataagaaccaaattaacattcggaattctgagaccgacaccattatttttatcaggaaagccgaacgttcacatagtggaaagtatgaccttcaagtaaaggtggacaagttcgtggagaccgcctcaatagatatccaaataattgacagacctgggccaccgcaaatagtcaagattgaggatgtgtggggagagaacgtggcattgacctggactccccctaaggatgatgggaacgccgctatcacagggtacaccatacagaaggcagacaaaaaatctatggaatggttcactgtgattgagcactaccaccgaacctcagccacaataacagaactagtcatcggaaacgaatactactttagagttttcagtgaaaacatgtgcggcctaagcgaggatgcaaccatgaccaaggaaagcgcagtcattgccagagacgggaagatatataagaacccagtctatgaagacttcgacttctcagaggctcccatgttcacgcagccactggttaacacttacgccatcgcaggctacaacgccaccctgaattgcagtgtaagggggaaccctaaacccaaaattacttggatgaaaaataaggtggccatcgtcgatgatccaagatatcgtatgttcagcaatcagggcgtgtgtacgctcgagattagaaagccctccccatatgacgggggtacatactgctgtaaggctgtgaacgatctggggactgttgaaatcgagtgcaagctggaggttaaggtcatctatcagggggttaatacacccggccagcctgttttcctggaaggacagcagcagagcttacataacaaggacttttag

SEQ ID NO: 88964 - DNA, 3384 bp, Artificial Sequence
  derived and/or modified sequence
atgccagagccaacaaagaaagaggagaacgaagtgcccgcacccgcaccgcctccagaagaaccctccaaggagaaggaagctggaaccacccctgccaaagactggacgttggtggaaaccccccctggagaggaacaggcgaagcaaaatgccaatagccagctttccatcttgtttatcgaaaaacctcagggtggtacggtcaaagttggagaggacatcacctttatcgcgaaagtcaaagctgaggacctgctgcggaaacctacaatcaaatggttcaaggggaaatggatggatctcgcttctaaggccggaaagcacctgcagctgaaagagacatttgaacggcactcccgagtctatacttttgaaatgcagatcatcaaggcaaaggacaacttcgcaggaaattaccgctgcgaagtgacttacaaagataaattcgattcttgttcatttgacttagaggtccatgaatcaacgggtactactcccaacattgatatccggtctgcttttaagagaagggaggtcaagcagcaagaggaggagccacaggtggatgtttgggagctgttgaaaaatgcaaagccatctgaatacgaaaagattgcattccagtatggtatcacagatttgagaggaatgctcaagagactcaagcggatgcgaagggaggaaaagaaatccgctgcgtttgccaaaatactggaccctgcttaccaggtggacaagggcggacgcgttcggtttgtggtcgaactggcagatccgaagttggaggtcaagtggtataagaacggccaagaaattagaccctccaccaaatatattttcgagcataaggggtgtcagcgcattctatttatcaacaactgtcagatgacggacgacagcgagtactacgtgaccgctggagacgagaaatgctccacagagctgttcgtaagagagcctccaattatggtgacaaagcagctcgaggacactactgcctactgtggggaaagggtggagcttgagtgcgaggttagcgaggatgatgctaacgttaaatggttcaaaaatggagaagagatcatccctggacccaagtcacggtataggattcgggtggaggggaaaaagcacattctgatcatcgaaggcgctactaaagccgatgctgcagaatactcagttatgacaactggaggccaatccagtgccaaactgtccgtagatcttaaacccctcaaaattctgaccccgctcaccgatcagacagtgaatttggggaaggagatctgcctcaagtgtgagatttctgagaatattcccggaaaatggacaaaaaacggtctgcctgtgcaggagagcgatcggttaaaagtcgtccataagggcagaatacacaaacttgttatcgccaacgcattaactgaggatgaaggggactacgtcttcgccccagacgcttataatgtgactctgcctgccaaggtccatgtgatcgacccacctaagatcattttagacggactggacgccgacaataccgtgactgtcatagcagggaataagctaagactggagatcccaatctcgggtgagcccccaccgaaggccatgtggtcccggggagacaaagccatcatggaagggtcaggaagaattaggaccgagagctaccctgattccagtacactggtgatcgacattgccgaaagggacgacagcggtgtgtaccacattaatctgaagaacgaggcgggagaagctcatgcttctatcaaggtcaaggttgttgatttccccgaccctcctgtggcccctacggtcacagaagtgggagatgactggtgtataatgaattgggaacctcccgcttacgatgggggtagcccgatcttgggatattttattgagagaaaaaagaaacagtcgagtcggtggatgcgcctgaatttcgatctctgtaaagaaaccacgttcgagcctaaaaagatgattgaaggggttgcctatgaagtgcgaatcttcgctgtgaacgctatcggaatctcaaagcctagcatgccgtccaggccattcgtccccctggccgtcactagtccgccaaccctgctgacagtagactcagtgacggacaccacagttacaatgcggtggaggcctccagaccacataggagccgctggtctcgatggatatgtgctggagtactgttttgagggaacggaagattggatcgtggctaataaagacttgattgataaaacaaagttcacgattactggtctccccactgatgccaagatctttgtccgggtaaaggcagtgaacgcagccggagccagcgaacctaagtattacagccagcctattctggtaaaggagatcattgagccacccaaaattaggatccccagacatctgaaacagacctacattcggagagtcggcgaggccgttaatttagttatcccgtttcaggggaaacctcgccctgaactgacctggaaaaaagatggagctgagatcgataagaaccagatcaacatccgcaactcggaaacagacacaatcatttttattaggaaggctgaacgctctcatagtgggaaatacgatctccaggtgaaggtagataagttcgttgagacagcttccatagatattcagattattgacagaccaggccctccacagatcgtgaaaatcgaggacgtttggggggaaaacgtcgctttaacttggacgccgccaaaggatgatgggaatgctgcgatcactggatatactatccaaaaggctgacaaaaagagcatggaatggttcacagtgatagagcactatcatcgcacgtccgcgacgataaccgagctcgttatcggaaacgagtattactttcgggttttcagcgagaacatgtgcgggttgagtgaggatgcgacaatgacgaaggaaagcgcagtcattgctcgggacggaaaaatatacaagaaccctgtgtacgaagatttcgacttcagcgaagccccaatgttcacccagccgctagtgaatacgtacgcgattgcagggtacaacgcgacactgaattgtagcgtgcgtggcaatccaaagcccaagattacatggatgaagaacaaggttgccattgtagatgacccccgatataggatgtttagtaaccagggcgtttgtactctcgaaataagaaagccaagtccttatgatggaggaacctactgttgcaaagctgtgaacgaccttggcacagttgaaattgaatgtaaacttgaggttaaggtcatctaccagggcgttaatacgccagggcagcctgtctttctggaaggccagcagcagtccttgcataacaaggatttctag

SEQ ID NO: 88965 - DNA, 3384 bp, Artificial Sequence
  derived and/or modified sequence
atgcccgagcccaccaagaaggaggagaacgaggtgcccgcccccgcccccccccccgaggagcccagcaaggagaaggaggccggcaccacccccgccaaggactggaccctggtggagaccccccccggcgaggagcaggccaagcagaacgccaacagccagctgagcatcctgttcatcgagaagccccagggcggcaccgtgaaggtgggcgaggacatcaccttcatcgccaaggtgaaggccgaggacctgctgagaaagcccaccatcaagtggttcaagggcaagtggatggacctggccagcaaggccggcaagcacctgcagctgaaggagaccttcgagagacacagcagagtgtacaccttcgagatgcagatcatcaaggccaaggacaacttcgccggcaactacagatgcgaggtgacctacaaggacaagttcgacagctgcagcttcgacctggaggtgcacgagagcaccggcaccacccccaacatcgacatcagaagcgccttcaagagaagagaggtgaagcagcaggaggaggagccccaggtggacgtgtgggagctgctgaagaacgccaagcccagcgagtacgagaagatcgccttccagtacggcatcaccgacctgagaggcatgctgaagagactgaagagaatgagaagagaggagaagaagagcgccgccttcgccaagatcctggaccccgcctaccaggtggacaagggcggcagagtgagattcgtggtggagctggccgaccccaagctggaggtgaagtggtacaagaacggccaggagatcagacccagcaccaagtacatcttcgagcacaagggctgccagagaatcctgttcatcaacaactgccagatgaccgacgacagcgagtactacgtgaccgccggcgacgagaagtgcagcaccgagctgttcgtgagagagccccccatcatggtgaccaagcagctggaggacaccaccgcctactgcggcgagagagtggagctggagtgcgaggtgagcgaggacgacgccaacgtgaagtggttcaagaacggcgaggagatcatccccggccccaagagcagatacagaatcagagtggagggcaagaagcacatcctgatcatcgagggcgccaccaaggccgacgccgccgagtacagcgtgatgaccaccggcggccagagcagcgccaagctgagcgtggacctgaagcccctgaagatcctgacccccctgaccgaccagaccgtgaacctgggcaaggagatctgcctgaagtgcgagatcagcgagaacatccccggcaagtggaccaagaacggcctgcccgtgcaggagagcgacagactgaaggtggtgcacaagggcagaatccacaagctggtgatcgccaacgccctgaccgaggacgagggcgactacgtgttcgcccccgacgcctacaacgtgaccctgcccgccaaggtgcacgtgatcgacccccccaagatcatcctggacggcctggacgccgacaacaccgtgaccgtgatcgccggcaacaagctgagactggagatccccatcagcggcgagcccccccccaaggccatgtggagcagaggcgacaaggccatcatggagggcagcggcagaatcagaaccgagagctaccccgacagcagcaccctggtgatcgacatcgccgagagagacgacagcggcgtgtaccacatcaacctgaagaacgaggccggcgaggcccacgccagcatcaaggtgaaggtggtggacttccccgacccccccgtggcccccaccgtgaccgaggtgggcgacgactggtgcatcatgaactgggagccccccgcctacgacggcggcagccccatcctgggctacttcatcgagagaaagaagaagcagagcagcagatggatgagactgaacttcgacctgtgcaaggagaccaccttcgagcccaagaagatgatcgagggcgtggcctacgaggtgagaatcttcgccgtgaacgccatcggcatcagcaagcccagcatgcccagcagacccttcgtgcccctggccgtgaccagcccccccaccctgctgaccgtggacagcgtgaccgacaccaccgtgaccatgagatggagaccccccgaccacatcggcgccgccggcctggacggctacgtgctggagtactgcttcgagggcaccgaggactggatcgtggccaacaaggacctgatcgacaagaccaagttcaccatcaccggcctgcccaccgacgccaagatcttcgtgagagtgaaggccgtgaacgccgccggcgccagcgagcccaagtactacagccagcccatcctggtgaaggagatcatcgagccccccaagatcagaatccccagacacctgaagcagacctacatcagaagagtgggcgaggccgtgaacctggtgatccccttccagggcaagcccagacccgagctgacctggaagaaggacggcgccgagatcgacaagaaccagatcaacatcagaaacagcgagaccgacaccatcatcttcatcagaaaggccgagagaagccacagcggcaagtacgacctgcaggtgaaggtggacaagttcgtggagaccgccagcatcgacatccagatcatcgacagacccggccccccccagatcgtgaagatcgaggacgtgtggggcgagaacgtggccctgacctggaccccccccaaggacgacggcaacgccgccatcaccggctacaccatccagaaggccgacaagaagagcatggagtggttcaccgtgatcgagcactaccacagaaccagcgccaccatcaccgagctggtgatcggcaacgagtactacttcagagtgttcagcgagaacatgtgcggcctgagcgaggacgccaccatgaccaaggagagcgccgtgatcgccagagacggcaagatctacaagaaccccgtgtacgaggacttcgacttcagcgaggcccccatgttcacccagcccctggtgaacacctacgccatcgccggctacaacgccaccctgaactgcagcgtgagaggcaaccccaagcccaagatcacctggatgaagaacaaggtggccatcgtggacgaccccagatacagaatgttcagcaaccagggcgtgtgcaccctggagatcagaaagcccagcccctacgacggcggcacctactgctgcaaggccgtgaacgacctgggcaccgtggagatcgagtgcaagctggaggtgaaggtgatctaccagggcgtgaacacccccggccagcccgtgttcctggagggccagcagcagagcctgcacaacaaggacttctag

SEQ ID NO: 88966 - protein, 1120 aa, Artificial Sequence
  derived and/or modified sequence
MPEPTKKEDWTLVETPPGEEQAKQNANSQLSILFIEKPQGGTVKVGEDITFIAKVKAEDLLRKPTIKWFKGKWMDLASKAGKHLQLKETFERHSRVYTFEMQIIKAKDNFAGNYRCEVTYKDKFDSCSFDLEVHESTGTTPNIDIRSAFKRSGEGQEDAGELDFSGLLKRREVKQQEEEPQVDVWELLKNAKPSEYEKIAFQYGITDLRGMLKRLKRMRREEKKSAAFAKILDPAYQVDKGGRVRFVVELADPKLEVKWYKNGQEIRPSTKYIFEHKGCQRILFINNCQMTDDSEYYVTAGDEKCSTELFVREPPIMVTKQLEDTTAYCGERVELECEVSEDDANVKWFKNGEEIIPGPKSRYRIRVEGKKHILIIEGATKADAAEYSVMTTGGQSSAKLSVDLKPLKILTPLTDQTVNLGKEICLKCEISENIPGKWTKNGLPVQESDRLKVVHKGRIHKLVIANALTEDEGDYVFAPDAYNVTLPAKVHVIDPPKIILDGLDADNTVTVIAGNKLRLEIPISGEPPPKAMWSRGDKAIMEGSGRIRTESYPDSSTLVIDIAERDDSGVYHINLKNEAGEAHASIKVKVVDFPDPPVAPTVTEVGDDWCIMNWEPPAYDGGSPILGYFIERKKKQSSRWMRLNFDLCKETTFEPKKMIEGVAYEVRIFAVNAIGISKPSMPSRPFVPLAVTSPPTLLTVDSVTDTTVTMRWRPPDHIGAAGLDGYVLEYCFEGTEDWIVANKDLIDKTKFTITGLPTDAKIFVRVKAVNAAGASEPKYYSQPILVKEIIEPPKIRIPRHLKQTYIRRVGEAVNLVIPFQGKPRPELTWKKDGAEIDKNQINIRNSETDTIIFIRKAERSHSGKYDLQVKVDKFVETASIDIQIIDRPGPPQIVKIEDVWGENVALTWTPPKDDGNAAITGYTIQKADKKSMEWFTVIEHYHRTSATITELVIGNEYYFRVFSENMCGLSEDATMTKESAVIARDGKIYKNPVYEDFDFSEAPMFTQPLVNTYAIAGYNATLNCSVRGNPKPKITWMKNKVAIVDDPRYRMFSNQGVCTLEIRKPSPYDGGTYCCKAVNDLGTVEIECKLEVKVIYQGVNTPGQPVFLEGQQQSLHNKDF

SEQ ID NO: 88967 - DNA, 3363 bp, Artificial Sequence
  derived and/or modified sequence
atgccggagcccacaaagaaggaggattggactctcgtggaaacaccgccaggcgaagaacaagcaaaacagaacgcgaatagccagctgagtatcttatttattgagaaaccgcaagggggaacagtcaaggttggagaggacatcaccttcatagctaaagtcaaggcagaagacttacttcgaaagcctacgatcaaatggttcaaaggaaaatggatggacttggcttctaaagcggggaagcatctgcagctgaaggagacattcgaaaggcactcgcgtgtctatactttcgagatgcagataatcaaagcaaaggacaactttgcagggaactataggtgtgaagtaacctacaaggacaagttcgattcttgcagcttcgatttggaggtacacgagtctacaggaaccacgcccaacatagatatccggtccgcctttaagagatccggagaggggcaggaggacgcaggcgaattggatttctctggcctactgaagcgccgagaggttaaacagcaggaagaggagccacaggtggacgtgtgggagctgttaaagaatgcaaagccctcagagtatgagaaaattgccttccagtacggaattaccgatctgcgaggcatgctgaagagactgaagcggatgagacgggaggaaaaaaagtctgccgcgtttgccaaaatcctggaccccgcctatcaagtcgacaagggtggaagggtccgattcgtggtcgaattagctgaccccaagctggaggtgaagtggtataagaacgggcaggaaatacgaccaagcacaaaatatatctttgagcacaaaggatgtcagcgaattttgtttatcaacaactgtcagatgaccgacgattcagagtactatgtaacagccggagacgagaagtgctcaacggagcttttcgtgcgagagccacccatcatggtcacgaagcagctggaggacacaactgcttattgtggggagcgcgtagaactcgagtgcgaagtctcagaggatgatgcaaatgtgaagtggttcaaaaacggcgaggagattattcctggccccaaatctagatacaggatccgtgttgaaggcaagaaacacatactgatcattgaaggggcgacaaaggctgatgccgcagagtactccgttatgaccactggtggtcagagctcagccaaattgtctgtcgacctgaaaccacttaagattctaactcctctgacagaccagacagtgaatctcggtaaggaaatttgtctgaagtgcgaaatatccgaaaatataccaggaaaatggactaaaaatggcctgcctgttcaagagtccgaccgcctgaaagttgttcataagggtcgcatccacaagttagtcatcgcaaatgctctcactgaggatgagggtgactatgtattcgcccccgacgcatacaacgtcacactgcccgctaaagtacatgtgatcgacccccctaaaataatcttggatggactggacgctgataacacagtcacagtaatagccggaaacaagctcaggctggaaatccccatcagcggggagcctccgcccaaggcaatgtggagccggggtgataaggctatcatggagggcagcggcaggatacggactgagtcctatccagattcctctaccttggtcattgacatcgccgagcgtgatgatagcggagtctaccacattaatctgaagaatgaagctggcgaagcccatgcttccattaaggtgaaggtggttgactttcctgacccgcctgtcgcccccacagtgacagaagtgggcgacgactggtgtattatgaattgggaacctcccgcctatgatggagggagccccattttgggttatttcattgagcgaaaaaagaaacagtctagccgctggatgagactaaatttcgacctttgcaaagaaaccactttcgaaccaaaaaaaatgatcgagggcgtcgcatatgaggtgcgcatttttgccgtaaacgcaataggcatctcaaaaccatctatgccttctagaccatttgtacccctggcggtgacctcacctccaacactacttacagttgactccgtgaccgatacgactgtgaccatgcggtggcgacctccagatcatattggtgctgctggcctcgacggatacgtccttgagtactgctttgaaggtaccgaagactggatcgtggcgaataaagatctgatagacaagaccaagtttacaatcactggtctgcccacggacgccaagatcttcgtcagggtgaaagcagtgaacgccgctggagccagcgaaccaaagtactactctcagcccatccttgtgaaagagattatcgaaccacctaaaatcaggatccccagacatctgaagcagacatacatccgtagggtaggggaggcagtgaatctggtaatcccctttcagggcaagccgcggcccgagctgacatggaagaaggatggtgcggaaatcgacaaaaaccagatcaacattaggaactccgaaacggataccataatatttatccgaaaggcggagcgatcgcactccggtaagtacgacctccaggttaaggttgacaagtttgtcgagactgcttccattgacattcagatcattgatcggccaggtccgccgcagatagtgaaaattgaagatgtctggggcgagaatgtggcgttgacctggactccccccaaggacgacgggaacgccgccatcactggctacacgatccagaaggcagataagaaaagcatggaatggttcaccgtcatagaacactaccacagaaccagcgccaccatcaccgagctggtgatcggcaacgagtactactttcgtgtctttagcgaaaacatgtgcgggctttccgaggatgctaccatgacgaaggagtccgcagtaatagccagggacggcaaaatctataaaaaccccgtctatgaagacttcgacttcagtgaggctcctatgtttactcaacctctcgtcaacacctacgctattgcaggctacaatgcaacactcaattgtagcgtgcggggcaatcctaaaccaaaaatcacatggatgaaaaataaagtggctatcgtggatgatcctcgttacaggatgtttagcaaccagggggtgtgcaccctggaaatacggaagccctcaccctacgatgggggcacatactgctgtaaagctgtaaacgatctcggcaccgtagagattgaatgcaagctggaagtgaaggtgatctatcagggtgtgaacaccccaggccagcccgtgtttctggaaggtcagcagcagagtctgcataacaaagacttttag

SEQ ID NO: 88968 - DNA, 3363 bp, Artificial Sequence
  derived and/or modified sequence
atgcctgagcccaccaagaaggaggactggaccctggtggagaccccacctggagaggagcaggccaagcagaatgccaacagccagctgagcatcctcttcatcgagaagccccagggcggcaccgtgaaggtgggggaggacatcaccttcatcgccaaggtgaaggccgaggacctgctgaggaagcccaccatcaagtggttcaagggcaagtggatggacctggccagcaaggccggcaagcacctgcagctgaaggagacctttgagcggcacagccgggtgtacacctttgagatgcagatcatcaaggccaaggacaactttgctggcaactaccgctgtgaggtgacctacaaggacaagtttgacagctgcagctttgacctggaggtgcatgagagcacaggcaccacccccaacatcgacatccgcagcgccttcaagaggtctggagagggccaggaggatgctggggagctggacttcagcggcctgctgaagaggcgggaggtgaagcagcaggaggaggagccccaggtggatgtgtgggagctgctgaagaatgccaagcccagtgaatatgagaagatcgccttccagtatggcatcacagacctgcggggcatgctgaagaggctgaagaggatgagaagagaggagaagaagtctgctgcctttgccaagatcctggaccctgcctaccaggtggacaagggcggccgggtgcgctttgtggtggagctggccgaccccaagctggaggtgaagtggtacaagaatggccaggagatccggcccagcaccaagtacatctttgagcacaagggctgccagaggatcctcttcatcaacaactgccagatgacagatgacagcgagtactacgtgacagctggagatgagaagtgcagcacagagctgtttgtgcgggagccccccatcatggtgaccaagcagctggaggacaccacagcctactgtggggagcgggtggagctggagtgtgaggtgtctgaagatgatgccaacgtgaagtggttcaagaatggagaggagatcatccctggccccaagagccgctaccgcatccgggtggagggcaagaagcacatcctgatcatcgagggcgccaccaaggcagatgctgctgagtacagcgtgatgaccaccggcggccagagcagcgccaagctgtctgtggacctgaagcccctgaagatcctgacccccctgacagaccagacagtgaacctgggcaaggagatctgcctgaagtgtgagatcagcgagaacatccctgggaagtggaccaagaatggcctgcctgtgcaggagagtgaccggctgaaggtggtgcacaagggccgcatccacaagctggtgattgccaatgccctgacagaagatgaaggagactatgtgtttgccccagatgcctacaacgtgaccctgcctgccaaggtgcacgtgattgatcctcccaagatcatcctggatggcctggatgctgacaacacagtgacagtgattgctggcaacaagctgcggctggagatccccatcagcggggagcccccacccaaggccatgtggagcagaggagacaaggccatcatggagggcagcggccgcatcagaacagagagctacccagacagcagcaccctggtgattgatattgctgagagagatgacagcggcgtgtaccacatcaacctgaagaatgaagctggggaggcccacgccagcatcaaggtgaaggtggtggacttcccagacccccctgtggcccccaccgtgacagaggtgggagatgactggtgcatcatgaactgggagcccccagcctatgatggcggcagccccatcctgggctacttcatcgagaggaagaagaagcagagcagccgctggatgaggctgaactttgacctgtgcaaggagaccacctttgagcccaagaagatgattgaaggagtggcctatgaggtgcgcatctttgctgtgaatgccatcggcatcagcaagcccagcatgcccagccggccctttgtgcccctggccgtgaccagcccccccaccctgctgactgtggacagcgtgacagacaccaccgtgaccatgcgctggaggcccccagaccacatcggggctgctggcctggatggctacgtgctggagtactgctttgagggcacagaggactggatcgtggccaacaaggacctgattgacaagaccaagttcaccatcaccggcctgcccacagatgccaagatctttgtgcgggtgaaggctgtgaatgctgctggggccagcgagcccaagtactacagccagcccatcctggtgaaggagatcatcgagccccccaagatccgcatccccaggcacctgaagcagacctacatcagaagagtgggggaggccgtgaacctggtgatccccttccagggcaagcccaggcctgagctgacctggaagaaggatggagctgagattgacaagaaccagatcaacatccggaacagcgagacagacaccatcatcttcatcaggaaggccgagaggagccacagcggcaagtatgacctgcaggtgaaggtggacaagtttgtggagacagccagcattgacatccagatcatcgaccggcccggccccccccagatcgtgaagattgaagatgtgtggggagaaaatgtggccctgacctggaccccacccaaggatgatggaaatgctgccatcaccggctacaccatccagaaggctgacaagaagtccatggagtggttcaccgtcatcgagcactaccacaggaccagcgccaccatcacagagctggtgattggaaatgagtactacttccgggtcttcagcgagaacatgtgtggcctgtctgaagatgccaccatgaccaaggagagcgctgtgattgccagagatggcaagatctacaagaaccctgtgtatgaagattttgacttcagcgaggcccccatgttcacccagcccctggtgaacacctacgccatcgccggctacaatgccaccctgaactgcagcgtgcggggcaaccccaagcccaagatcacctggatgaagaacaaggtggccatcgtggatgacccccgctacaggatgttcagcaaccagggcgtgtgcaccctggagatcaggaagcccagcccctatgatggcggcacctactgctgcaaggctgtgaatgacctgggcaccgtggagattgagtgcaagctggaggtgaaggtgatctaccagggcgtgaacaccccaggccagcctgtgttcctggagggccagcagcagagcctgcacaacaaggacttctag

SEQ ID NO: 88969 - DNA, 3834 bp, Artificial Sequence
  derived and/or modified sequence
agatgtgagaaaggtccccatagctgtcaagttcctgcatccttgtgctgaagaaagggaggtgccatcatgattgatgttcagaggcagtataaaagcactgggtttctccccaactgcttgtcacaccgacctgcaccatctctcgcctgcctgtggggtttctgtcaactagtcgtggagggaaggagactctttaaagaataacatcttattgtggccatgccagaacccactaagaaagaggactggacccttgtcgaaactcctcctggggaggaacaagccaagcagaatgccaactcccagctgtccatcttgttcattgaaaaacctcaaggaggaacagtgaaagttggtgaagatatcaccttcatagccaaagtcaaggctgaagatcttctgagaaaacccactatcaaatggttcaaaggaaaatggatggacctggccagcaaagccgggaagcaccttcagctgaaggaaacctttgagaggcacagtcgggtgtacacatttgagatgcagatcatcaaggccaaagataactttgcaggaaattacagatgcgaggtcacctataaggataagtttgacagctgttcatttgatcttgaagtgcacgaatctactgggactactccaaacattgacatcagatctgctttcaagagaagtggagaaggtcaagaggatgcaggagaacttgactttagtggtctcctgaaacgtagggaggtgaagcagcaggaggaagaaccccaggtggacgtatgggagttgctgaagaacgcgaaacccagtgagtacgagaagatcgccttccagtatggaatcaccgacctgcgcggcatgctcaagcgactcaagcgcatgcgcagagaggagaagaagagcgcagcttttgcaaaaattcttgatcctgcatatcaggttgacaaaggaggcagagtgaggtttgttgtggagctggcagatccaaagttggaggtgaaatggtataaaaatggtcaagaaattcgacccagtaccaaatacatctttgaacacaaaggatgccagagaatcctgtttatcaataactgtcagatgacagatgattcagagtattatgtgacagccggtgatgagaaatgttccactgagctcttcgtaagagagcctccaattatggtgaccaaacagctggaagatacaactgcttattgtggggagagagtggaattagaatgtgaggtgtctgaagatgatgccaatgtaaaatggtttaagaatggtgaagagattatccctggtccaaaatcaagataccgaattagagttgagggtaaaaaacacatcttgatcatagagggagcaacaaaggctgatgctgcagaatattcagtaatgacaacaggaggacaatcatctgctaaacttagtgttgacttgaaacctctgaagattttgacacctctgactgatcagactgtaaatcttggaaaagaaatctgcctgaagtgtgaaatctctgaaaacataccaggaaaatggactaaaaatggcctacctgttcaggagagtgaccgtctaaaggtggttcacaagggaaggatccacaagttagtgatagccaatgccctcactgaagatgaaggtgattatgtatttgcacctgatgcctacaatgttactctgcctgccaaagttcatgttattgatcctcctaagatcatcctggatggtcttgatgctgacaacacagtgacagtgattgcaggaaacaagcttcgtcttgagatccccatcagcggagaaccacctcctaaagccatgtggagccggggagataaggctattatggaaggcagtggccggataagaacagaatcttaccctgatagcagcactctggtcattgatatagctgaaagagatgactctggtgtttaccacatcaatctgaaaaacgaagctggagaggcacatgcaagcatcaaggttaaagttgtggacttccctgatcctccagtggcaccgactgtgacagaggtgggagatgactggtgtatcatgaactgggagcctcctgcctacgacggaggctctccaatcctaggatattttattgagaggaagaagaaacaaagctccaggtggatgaggctgaattttgatctctgcaaagaaacaacttttgagcccaagaagatgattgaaggtgtggcctatgaggtccgcatctttgcagtcaatgccattggcatctccaagcccagtatgccctccaggccttttgttcctttggctgtaacaagccctcctactcttctgactgtggactctgtcactgacacgactgtcacgatgaggtggcgccccccagaccacattggtgcagcaggtttagatggctatgtgctagagtattgctttgaaggaactgaggactggatagttgcaaacaaagatctgattgacaagacgaagttcaccatcacaggtctgccaacagatgcaaagatctttgtgcgtgtgaaggctgttaatgcagctggtgccagcgagcccaagtactattctcagcccattctcgtgaaggaaatcatagaacctccaaagattcgcattccaagacacctgaagcaaacctatatccgcagagttggagaagctgtcaatctggttatacctttccagggaaaaccaagaccagaattaacttggaagaaggatggtgcagaaattgataagaatcaaataaacattcgcaactctgagactgatacaatcatatttattagaaaagcagagaggagccactctgggaaatatgatctgcaagtcaaagtggacaaattcgtggagaccgcatcaattgacatccagatcattgaccgtccaggtccaccccaaattgtgaagattgaggatgtctggggagaaaatgtcgctctcacatggactccaccaaaggatgatggaaatgctgctatcacaggctataccattcagaaggctgacaagaagagcatggaatggtttactgtcattgagcattatcatcgaaccagtgccaccattactgaattggtcatagggaatgaatattacttccgggtcttttctgaaaacatgtgtggcctcagtgaggatgccaccatgactaaagagagtgcagtgatcgccagggatggtaaaatctacaaaaatccagtgtatgaagactttgatttctcagaggcacccatgtttactcagcctttggttaacacctatgccatagctggttacaatgccaccctaaactgcagtgtgagaggaaatcctaagcctaaaataacctggatgaaaaacaaagttgctattgtggatgatccaagatacaggatgttcagcaaccagggagtctgtaccctggaaattcgcaagcccagcccctatgatggaggcacttactgctgcaaagcagtcaatgaccttgggacagtggagattgaatgcaaactggaggtgaaagtgatatatcaaggagtaaatacccctggacaaccagtcttcctggaggggcagcaacagtcattgcacaataaggatttttgaatgtataatatcatctaaggtgggctctccttctgcagactcctcttgcaaggcgtacctccaaacataattgattcgtatctgcgagacttacactcaagcaatcctgaggaatactgagggagggcctggctactgtctctctgcactctgctgctttgaaatctggttgaaatgagaaaaagcattttctgttttcccaccaggcccccaagtgtggtctttttctttcctcctaatgttgaagag

SEQ ID NO: 88970 - DNA, 3363 bp, Artificial Sequence
  derived and/or modified sequence
atgcccgagcccaccaagaaggaggactggaccctggtggagaccccgcccggtgaggaacaggcgaagcagaacgctaacagccaactcagcatactgtttattgagaaaccacagggcgggacagtaaaggtaggggaggacattacatttattgctaaagttaaagcggaagatctgttacgaaaacctacaatcaaatggtttaaaggaaagtggatggacttagctagtaaggcagggaagcacctgcaactgaaagaaacgtttgagagacacagtagggtgtatacatttgagatgcaaataattaaagcaaaggataacttcgctggcaattaccggtgcgaagtcacatataaggacaagttcgactcatgttcctttgatctcgaggtccacgagagcaccgggactactccaaatattgatatcaggtcagcctttaaacgaagtggtgaagggcaagaggacgccggcgaattagatttctctggtctgctcaaaaggcgggaagttaaacaacaggaggaagagccgcaggtggacgtgtgggagcttctgaaaaatgccaagccgagcgagtacgagaagatcgctttccagtacggcattactgacctgcgcgggatgctaaagaggctgaaaagaatgagaagggaagaaaaaaagtccgcagcctttgcgaaaattcttgatcccgcgtatcaagtcgacaaaggtggtcgggtgagatttgtggtagaactagctgaccccaagctggaggtaaaatggtataagaatgggcaggaaatacgccctagcactaagtatatcttcgagcataaaggatgccaacggatattgtttataaataactgccagatgactgatgatagtgagtattacgtgacagcaggcgacgagaagtgtagtaccgagctgttcgtgcgcgagccgcctatcatggtaacaaaacagctggaggacaccaccgcttactgtggcgagcgtgtagagctggagtgcgaggtgagtgaggatgacgcaaatgtgaaatggttcaagaatggcgaagagattattcctgggccaaaatctcgatacaggatccgcgtggagggcaagaagcacattttgattatcgaaggagcgacgaaagccgacgccgccgagtattccgtgatgacaacgggcggacagtcgtccgcaaagttgtccgtggatctcaaacccctaaaaattttaacacccctcactgaccaaactgtcaatcttggcaaggagatctgtttgaagtgtgaaatatcagagaacatccctgggaagtggactaagaacggtctgcccgtacaggagtctgatagactgaaggtggttcataaggggcgtatccacaaactggttatcgccaatgctctgactgaagacgaaggagattatgtctttgctcctgacgcgtacaatgtcaccttaccggcgaaggtgcacgtgattgatccgcctaagattatcctggatgggcttgatgccgacaatacagtgacagtcattgcaggcaacaagctgaggctggagatcccgatttccggcgagcctccaccaaaagctatgtggagccgcggggacaaggccattatggagggctcggggagaatccgcacagaaagctatccagattcttctaccctggtaatcgatatcgccgagagagatgacagcggagtgtaccatattaatctcaaaaatgaagccggtgaagctcacgcatcaattaaggtcaaggtggtcgacttccctgatcctcctgttgcaccgactgtgactgaagtcggtgacgactggtgcattatgaactgggaacctccagcctacgatggtggatcaccaatacttgggtattttatcgagcggaaaaagaaacaatcctcacgatggatgaggctcaacttcgatctctgcaaagaaactactttcgaacctaaaaaaatgattgaaggagtggcttacgaggtccgtattttcgccgtgaatgccatcggaatctccaaaccatccatgccctcgcgcccttttgttcctctagcagtgacttccccaccgacccttctgacagtagactccgtgactgacaccaccgtgaccatgcgctggcgaccaccagaccacatcggcgcggccggcctggatgggtatgtcctggagtactgtttcgaaggcaccgaggattggatcgtggcgaacaaagacctaattgataagaccaagttcactatcacagggttacccacagacgcgaaaatctttgtccgagtgaaagccgtaaatgccgccggggcttctgaaccaaaatattacagccagcccatacttgtaaaggagatcatcgagcccccgaagattcgtatacctcgacacctcaagcagacttacatccggagggttggagaggctgtgaatctggtaattcctttccagggaaagcctcggccagaattgacctggaagaaggatggagctgagattgacaagaaccagattaatatccgcaactctgagactgacactataatcttcatccgaaaagccgaaagatcgcattccggtaaatatgatttgcaagtcaaagtcgataaattcgttgaaaccgcttcaattgacatccaaattatagaccgccccgggccgccacaaattgttaagatcgaagacgtctggggtgagaacgtggcattgacgtggactccccctaaggatgacggcaacgctgccattactgggtacaccatacaaaaagccgacaagaaatccatggaatggtttactgttatcgagcactatcaccgcaccagcgcgacaattactgaactcgttatcggcaatgaatactacttcagagtcttttcggaaaacatgtgtggactgtcggaggatgctaccatgacaaaggagtctgcagtgattgcccgcgatggaaaaatttataaaaatcccgtatatgaagacttcgatttcagtgaagcccctatgtttactcagccacttgttaatacatacgctatcgctggctataacgcgacccttaattgttctgtgcgcgggaaccctaagcctaagataacttggatgaagaataaagtggccattgtagatgatccgcgatacagaatgttcagtaaccagggggtgtgcacactagagattaggaaacccagtccctatgatggcggtacatactgttgcaaggccgtgaatgacctgggaactgtagagatagagtgcaagctggaagtgaaggtaatctatcagggggtaaacacacccggacagcctgtttttttggagggacagcaacaaagcctgcacaacaaggacttttag

SEQ ID NO: 88971 - DNA, 3363 bp, Artificial Sequence
  derived and/or modified sequence
atgcccgagcccaccaagaaggaggattggaccctggtggagactccccctggcgaagaacaagcgaagcaaaatgctaacagtcagctgagcattctatttatcgagaaacctcaggggggtacagtcaaggtcggggaggatatcactttcattgctaaggtgaaggcagaggacctgctgagaaagcccactatcaaatggttcaaggggaaatggatggacctcgcaagcaaggccggaaagcacttacagctgaaggaaactttcgaacggcattctagggtgtacacgttcgaaatgcagatcattaaagccaaagacaacttcgctggtaattaccgatgtgaggtcacgtataaggataagttcgactcttgcagcttcgacctggaggtccacgagtccacgggcactacaccaaacattgacattagaagtgcctttaaaagatctggggagggccaggaagatgctggggaattggacttttcggggctgctgaagcgcagagaggtgaaacaacaggaagaggaaccccaagttgatgtctgggagcttctaaagaacgctaagcctagtgagtatgaaaagatcgccttccagtacggtatcaccgatttgcggggtatgctaaaacggttgaagaggatgcgaagagaggagaagaaatcagccgcttttgcaaagatcctggacccagcttaccaagtcgacaagggcggtagggtaaggtttgtagtcgaactggccgaccccaaacttgaagtgaaatggtataagaacggacaggagattagacctagcaccaagtatatctttgagcacaaaggatgtcagaggattctctttatcaacaattgtcagatgacagacgatagtgagtattacgtgactgccggagacgaaaagtgtagcactgagctgtttgttcgcgaaccccctatcatggtgaccaagcagctggaagacaccactgcctactgcggtgagcgcgtagaattagagtgcgaagtttccgaagacgacgccaacgttaagtggtttaagaatggggaggaaatcatccctggcccaaagtccagataccggattcgggtggaaggcaagaagcatattttgattatcgagggggctaccaaggcggacgcagcagaatactcagtcatgactacgggtgggcagtcatccgcaaaactgagcgtggacctgaaaccgctcaagatacttacgcccctgacagatcagacagtgaatcttggtaaggaaatctgcctgaaatgcgaaataagcgaaaatatccctggaaaatggaccaagaacggactgccagtacaagagtcagaccggctgaaagtggtccataaaggccgtattcacaagttagtgattgctaatgccctgactgaagacgaaggagactacgtcttcgccccagacgcctacaacgtcactttgcctgcaaaggtgcatgttatcgatccccctaagattatactggatggactggacgcagataatactgtgaccgtgatagcagggaataaattgcgtttggagatcccaatctctggcgagcccccaccgaaggccatgtggtcacgcggagacaaggcaatcatggagggatcaggaaggattcgtactgaaagttatccagattcatcaaccctggttatcgatatcgcagaacgagacgactccggcgtgtatcacattaacttgaagaacgaagctggggaggcacacgcaagcataaaggtgaaagtggtagattttcccgacccaccggtcgcgccaaccgtgaccgaggtgggagacgactggtgcatcatgaattgggagccaccagcctacgacggcggatcccccattcttggatatttcatagagcggaagaaaaaacagagtagccgttggatgagactcaacttcgatctctgcaaggaaacaacctttgagcccaagaagatgattgagggagtcgcctatgaggtgcgaattttcgcagtaaatgccattggtattagcaaaccgagtatgccgtctaggcccttcgtgcctctggcggtgacttcacctccaacccttttgaccgtcgacagcgtgacagatactacggttaccatgcggtggaggccgcctgatcacatcggtgcagctggactggacgggtatgtgcttgagtactgcttcgaggggacggaagactggatcgtcgcgaacaaagacctcattgacaagacaaagtttacaatcacggggttgcccacagacgctaaaatttttgtgcgagttaaggctgtgaacgctgcgggagcttccgagcccaaatattacagccagccaatcctggtgaaggaaattatcgaacccccaaagattaggataccccgacaccttaagcagacttacattagaagagtgggggaagcggtgaatctcgtgattccgttccagggaaagcctagacccgaactgacttggaagaaagatggggcagaaattgacaagaaccagatcaatattaggaacagcgagaccgacaccatcatttttatccgtaaagcagaaaggagtcacagcggcaagtatgacttgcaagtgaaagtggataagttcgttgaaactgcttcaatcgacattcagatcattgaccggcctggaccaccacaaattgtgaagattgaggatgtttggggcgagaacgtggccctgacctggaccccccctaaggacgacggtaatgcggcaattaccggctacaccatccagaaggcagataaaaagagtatggagtggttcacggttattgagcactaccatagaacttcagccactatcacagaacttgtgatcggaaatgaatactatttccgggtgttctctgaaaatatgtgtggcctttccgaggatgccaccatgacaaaggagtcggccgtgatcgcaagagacggcaaaatctacaaaaatcctgtgtacgaagacttcgatttctctgaagctcccatgttcacacagcccttggtgaacacctatgctatagctggctacaatgctactctcaactgtagcgtgcggggtaaccctaagcccaaaatcacatggatgaaaaataaggttgccatcgtggacgatccacggtatagaatgttctcgaaccaaggtgtgtgcactctggaaattagaaagccttccccatacgatgggggtacttactgctgcaaggctgtgaacgacttgggaacagtggaaatcgaatgtaagctggaggttaaagtcatttatcagggggtcaacacaccgggtcagccagtcttcttggagggccaacagcaatcccttcacaataaagacttctag

SEQ ID NO: 88972 - DNA, 3363 bp, Artificial Sequence
  derived and/or modified sequence
atgcccgagcccaccaagaaggaggactggaccctggtggagaccccccccggcgaggagcaggccaagcagaacgccaacagccagctgagcatcctgttcatcgagaagccccagggcggcaccgtgaaggtgggcgaggacatcaccttcatcgccaaggtgaaggccgaggacctgctgagaaagcccaccatcaagtggttcaagggcaagtggatggacctggccagcaaggccggcaagcacctgcagctgaaggagaccttcgagagacacagcagagtgtacaccttcgagatgcagatcatcaaggccaaggacaacttcgccggcaactacagatgcgaggtgacctacaaggacaagttcgacagctgcagcttcgacctggaggtgcacgagagcaccggcaccacccccaacatcgacatcagaagcgccttcaagagaagcggcgagggccaggaggacgccggcgagctggacttcagcggcctgctgaagagaagagaggtgaagcagcaggaggaggagccccaggtggacgtgtgggagctgctgaagaacgccaagcccagcgagtacgagaagatcgccttccagtacggcatcaccgacctgagaggcatgctgaagagactgaagagaatgagaagagaggagaagaagagcgccgccttcgccaagatcctggaccccgcctaccaggtggacaagggcggcagagtgagattcgtggtggagctggccgaccccaagctggaggtgaagtggtacaagaacggccaggagatcagacccagcaccaagtacatcttcgagcacaagggctgccagagaatcctgttcatcaacaactgccagatgaccgacgacagcgagtactacgtgaccgccggcgacgagaagtgcagcaccgagctgttcgtgagagagccccccatcatggtgaccaagcagctggaggacaccaccgcctactgcggcgagagagtggagctggagtgcgaggtgagcgaggacgacgccaacgtgaagtggttcaagaacggcgaggagatcatccccggccccaagagcagatacagaatcagagtggagggcaagaagcacatcctgatcatcgagggcgccaccaaggccgacgccgccgagtacagcgtgatgaccaccggcggccagagcagcgccaagctgagcgtggacctgaagcccctgaagatcctgacccccctgaccgaccagaccgtgaacctgggcaaggagatctgcctgaagtgcgagatcagcgagaacatccccggcaagtggaccaagaacggcctgcccgtgcaggagagcgacagactgaaggtggtgcacaagggcagaatccacaagctggtgatcgccaacgccctgaccgaggacgagggcgactacgtgttcgcccccgacgcctacaacgtgaccctgcccgccaaggtgcacgtgatcgacccccccaagatcatcctggacggcctggacgccgacaacaccgtgaccgtgatcgccggcaacaagctgagactggagatccccatcagcggcgagcccccccccaaggccatgtggagcagaggcgacaaggccatcatggagggcagcggcagaatcagaaccgagagctaccccgacagcagcaccctggtgatcgacatcgccgagagagacgacagcggcgtgtaccacatcaacctgaagaacgaggccggcgaggcccacgccagcatcaaggtgaaggtggtggacttccccgacccccccgtggcccccaccgtgaccgaggtgggcgacgactggtgcatcatgaactgggagccccccgcctacgacggcggcagccccatcctgggctacttcatcgagagaaagaagaagcagagcagcagatggatgagactgaacttcgacctgtgcaaggagaccaccttcgagcccaagaagatgatcgagggcgtggcctacgaggtgagaatcttcgccgtgaacgccatcggcatcagcaagcccagcatgcccagcagacccttcgtgcccctggccgtgaccagcccccccaccctgctgaccgtggacagcgtgaccgacaccaccgtgaccatgagatggagaccccccgaccacatcggcgccgccggcctggacggctacgtgctggagtactgcttcgagggcaccgaggactggatcgtggccaacaaggacctgatcgacaagaccaagttcaccatcaccggcctgcccaccgacgccaagatcttcgtgagagtgaaggccgtgaacgccgccggcgccagcgagcccaagtactacagccagcccatcctggtgaaggagatcatcgagccccccaagatcagaatccccagacacctgaagcagacctacatcagaagagtgggcgaggccgtgaacctggtgatccccttccagggcaagcccagacccgagctgacctggaagaaggacggcgccgagatcgacaagaaccagatcaacatcagaaacagcgagaccgacaccatcatcttcatcagaaaggccgagagaagccacagcggcaagtacgacctgcaggtgaaggtggacaagttcgtggagaccgccagcatcgacatccagatcatcgacagacccggccccccccagatcgtgaagatcgaggacgtgtggggcgagaacgtggccctgacctggaccccccccaaggacgacggcaacgccgccatcaccggctacaccatccagaaggccgacaagaagagcatggagtggttcaccgtgatcgagcactaccacagaaccagcgccaccatcaccgagctggtgatcggcaacgagtactacttcagagtgttcagcgagaacatgtgcggcctgagcgaggacgccaccatgaccaaggagagcgccgtgatcgccagagacggcaagatctacaagaaccccgtgtacgaggacttcgacttcagcgaggcccccatgttcacccagcccctggtgaacacctacgccatcgccggctacaacgccaccctgaactgcagcgtgagaggcaaccccaagcccaagatcacctggatgaagaacaaggtggccatcgtggacgaccccagatacagaatgttcagcaaccagggcgtgtgcaccctggagatcagaaagcccagcccctacgacggcggcacctactgctgcaaggccgtgaacgacctgggcaccgtggagatcgagtgcaagctggaggtgaaggtgatctaccagggcgtgaacacccccggccagcccgtgttcctggagggccagcagcagagcctgcacaacaaggacttctag

SEQ ID NO: 88973 - protein, 1139 aa, Artificial Sequence
  derived and/or modified sequence
MPEPTKKEDEEEVSPPSALPPDWTLVETPPGEEQAKQNANSQLSILFIEKPQGGTVKVGEDITFIAKVKAEDLLRKPTIKWFKGKWMDLASKAGKHLQLKETFERHSRVYTFEMQIIKAKDNFAGNYRCEVTYKDKFDSCSFDLEVHESTGTTPNIDIRSAFKRSGEGQEDAGELDFSGLLKRREVKQQEEEPQVDVWELLKNAKPSEYEKIAFQYGITDLRGMLKRLKRMRREEKKSAAFAKILDPAYQVDKGGRVRFVVELADPKLEVKWYKNGQEIRPSTKYIFEHKGCQRILFINNCQMTDDSEYYVTAGDEKCSTELFVREPPIMVTKQLEDTTAYCGERVELECEVSEDDANVKWFKNGEEIIPGPKSRYRIRVEGKKHILIIEGATKADAAEYSVMTTGGQSSAKLSVDLKPLKILTPLTDQTVNLGKEICLKCEISENIPGKWTKNGLPVQESDRLKVVHKGRIHKLVIANALTEDEGDYVFAPDAYNVTLPAKVHVIDPPKIILDGLDADNTVTVIAGNKLRLEIPISGEPPPKAMWSRGDKAIMEGSGRIRTESYPDSSTLVIDIAERDDSGVYHINLKNEAGEAHASIKVKVVDFPDPPVAPTVTEVGDDWCIMNWEPPAYDGGSPILGYFIERKKKQSSRWMRLNFDLCKETTFEPKKMIEGVAYEVRIFAVNAIGISKPSMPSRPFVPLAVTSPPTLLTVDSVTDTTVTMRWRPPDHIGAAGLDGYVLEYCFEGTEDWIVANKDLIDKTKFTITGLPTDAKIFVRVKAVNAAGASEPKYYSQPILVKEIIEPPKIRIPRHLKQTYIRRVGEAVNLVIPFQGKPRPELTWKKDGAEIDKNQINIRNSETDTIIFIRKAERSHSGKYDLQVKVDKFVETASIDIQIIDRPGPPQIVKIEDVWGENVALTWTPPKDDGNAAITGYTIQKADKKSMEWFTVIEHYHRTSATITELVIGNEYYFRVFSENMCGLSEDATMTKESAVIARDGKIYKNPVYEDFDFSEAPMFTQPLVNTYAIAGYNATLNCSVRGNPKPKITWMKNKVAIVDDPRYRMFSNQGVCTLEIRKPSPYDGGTYCCKAVNDLGTVEIECKLEVKGGLSFCRLLLQGVPPNIIDSYLRDLHSSNPEEY

SEQ ID NO: 88974 - DNA, 3420 bp, Artificial Sequence
  derived and/or modified sequence
atgcctgaacctacaaagaaagaggacgaggaagaagtaagtccgcccagcgcacttccaccggattggactctagttgaaactccacctggcgaagaacaggcaaagcagaatgccaacagccagttgagtattctctttattgagaagccccaaggtgggactgtgaaggtgggagaggatattacgtttattgcgaaagtcaaggctgaagaccttctccgtaagcctacaatcaaatggttcaaaggtaagtggatggacctggcttctaaagcaggaaaacaccttcagcttaaggagacgttcgaacgtcattcccgcgtatatacctttgaaatgcagattataaaggccaaggacaattttgccggcaactatcggtgcgaggttacttacaaggacaagttcgatagctgctcgtttgaccttgaggtgcatgaatcaaccggcaccactccaaatatcgatattagaagtgcattcaagaggtctggagagggccaggaggacgccggggaattggacttctctggccttcttaaaagaagggaagtgaagcagcaggaagaagagccacaggttgatgtctgggagttacttaagaacgcaaagccgtctgagtacgagaagattgccttccaatacggaataaccgatctgagggggatgctcaaacgcctaaaaaggatgcgccgagaggagaagaaatccgctgcatttgccaagatactggaccccgcttaccaagtggacaagggtggaagggtgaggttcgtcgtcgaactcgccgatcccaagctggaggtgaaatggtacaaaaacggtcaagaaatcaggccatctaccaaatacatctttgagcataaggggtgccagaggatactgtttataaataactgccaaatgactgatgattcagagtactacgtgactgcaggcgatgagaaatgttccactgaactgttcgttagggagcccccaattatggtaacaaaacagttggaggacacaaccgcatactgcggggagcgcgttgaacttgaatgcgaggtaagtgaggatgatgccaatgtcaagtggtttaaaaacggcgaagagatcatcccgggtcctaagagtaggtatcggatccgagtcgaagggaaaaagcacatcctgattattgaaggcgccacaaaagcagatgccgcagaatatagcgtcatgacaaccggcggtcagagcagcgccaagctgagtgtggatctcaaacctctcaagatacttacaccactaaccgaccagacagttaacctcgggaaagaaatatgtttgaagtgcgagatcagtgaaaatataccaggcaagtggaccaagaacggcctcccggttcaagaaagcgatcgcctgaaggtggtgcataaggggcgcatacataagctagtaattgctaacgctctgacggaggatgagggagactacgtgttcgctcctgacgcctacaacgtcacccttcccgccaaggtacacgtcatcgaccccccaaagataatcctggacggtttggatgctgacaacactgtgaccgtcatcgctgggaacaaactgcgacttgaaatcccaatttccggagaaccacccccaaaggcgatgtggtccaggggtgacaaggcaattatggaggggtcaggcaggattagaaccgaatcgtatccggattcctcgactctagtgatcgacattgctgagagggatgacagtggcgtctatcatataaatctgaagaacgaggcgggggaggcccacgcttcaatcaaggtgaaagtggttgactttcctgaccctcccgtggcccctaccgttacagaagtgggagacgactggtgcattatgaactgggagcccccagcttatgacggcggtagtcctattttgggctattttatcgagaggaaaaagaagcagtcttccaggtggatgaggctgaatttcgacctgtgcaaagaaacaaccttcgaaccgaaaaagatgatcgaaggagtcgcttacgaagtgaggatattcgcagtcaatgctataggtatctcaaagccctcgatgccatctcgcccatttgtacctctggcagtgacctcaccccccaccctgctcacggtggactcagtgacagacacaacagttacaatgcggtggcgaccgcccgaccatatcggagccgccggactggatggctatgtcctcgagtactgctttgagggcaccgaagactggattgttgcaaataaggacttaatcgacaaaaccaagttcaccattaccgggctgccaaccgacgcgaaaatcttcgtgagggtgaaggccgtaaatgcagcaggagccagtgaaccaaagtactattcacagccaatccttgtcaaagagatcatagagccaccaaaaataagaatcccccgccacctgaaacagacttatattagacgcgtgggtgaggccgttaacctggtgattccattccaggggaaacctcggcctgaactgacatggaaaaaagacggggccgaaattgacaagaatcagattaacatccggaattctgaaacagataccattatcttcattaggaaagccgagaggtctcactctggcaaatacgatctccaggtgaaggtagacaagttcgtcgagacagccagtatcgatatccagataattgatagacctggtccgccccagatagtgaagattgaggacgtgtggggggaaaatgtcgctctgacctggaccccccccaaggatgatggcaatgccgccatcaccggctacaccatccagaaggccgataaaaagtcaatggaatggttcactgtcattgagcactatcacagaactagcgctaccatcacagagctagtgattgggaacgagtactatttccgcgtgttttccgaaaatatgtgtggtctgtcagaggatgcaacgatgactaaggaaagtgcggtgattgctcgagacggtaaaatctacaagaatccagtgtacgaggattttgacttttccgaagcccctatgtttacccaaccgttggtcaatacctatgccatcgcaggctataatgccactttaaattgttcagtcagaggcaaccccaagcctaagataacatggatgaaaaataaggttgcaattgtcgatgacccccggtacagaatgtttagtaatcagggggtatgcaccttggaaattcgtaaaccctccccctatgatggtggaacctactgctgtaaagctgtcaatgacctgggcacggttgagatcgaatgcaagctagaagtaaagggtggtctaagtttctgtcgactcctgctgcagggggtcccccccaatatcattgacagctacttgagagacctgcattcttccaatcccgaggagtactag

SEQ ID NO: 88975 - DNA, 3420 bp, Artificial Sequence
  derived and/or modified sequence
atgcctgagcccaccaagaaggaggatgaggaggaggtgtccccaccttctgccctgcccccagactggaccctggtggagaccccacctggagaggagcaggccaagcagaatgccaacagccagctgagcatcctcttcatcgagaagccccagggcggcaccgtgaaggtgggggaggacatcaccttcatcgccaaggtgaaggccgaggacctgctgaggaagcccaccatcaagtggttcaagggcaagtggatggacctggccagcaaggccggcaagcacctgcagctgaaggagacctttgagcggcacagccgggtgtacacctttgagatgcagatcatcaaggccaaggacaactttgctggcaactaccgctgtgaggtgacctacaaggacaagtttgacagctgcagctttgacctggaggtgcatgagagcacaggcaccacccccaacatcgacatccgcagcgccttcaagaggtctggagagggccaggaggatgctggggagctggacttcagcggcctgctgaagagaagagaggtgaagcagcaggaggaggagccccaggtggatgtgtgggagctgctgaagaatgccaagcccagtgaatatgagaagatcgccttccagtatggcatcacagacctgcggggcatgctgaagaggctgaagaggatgaggcgggaggagaagaagtctgctgcctttgccaagatcctggaccctgcctaccaggtggacaagggcggccgggtgcgctttgtggtggagctggccgaccccaagctggaggtgaagtggtacaagaatggccaggagatccggcccagcaccaagtacatctttgagcacaagggctgccagaggatcctcttcatcaacaactgccagatgacagatgattctgagtactacgtgacagctggagatgagaagtgcagcacagagctgtttgtgcgggagccccccatcatggtgaccaagcagctggaggacaccacagcctactgtggggagcgggtggagctggagtgtgaggtgtctgaagatgatgccaacgtgaagtggttcaagaatggagaggagatcatccctggccccaagagccgctaccgcatccgggtggagggcaagaagcacatcctgatcattgaaggagccaccaaggcagatgctgctgagtacagcgtgatgaccactggaggccagagcagcgccaagctgtctgtggacctgaagcccctgaagatcctgacccccctgacagaccagacagtgaacctgggcaaggagatctgcctgaagtgtgagatcagcgagaacatccctgggaagtggaccaagaatggcctgcctgtgcaggagagtgaccggctgaaggtggtgcacaagggccgcatccacaagctggtgattgccaatgccctgacagaagatgaaggagactatgtgtttgccccagatgcctacaacgtgaccctgcctgccaaggtgcacgtgattgacccccccaagatcatcctggatggcctggatgctgacaacacagtgacagtgattgctggcaacaagctgcggctggagatccccatctctggagagcccccacccaaggccatgtggagcagaggagacaaggccatcatggagggcagcggccgcatcagaacagagagctacccagacagcagcaccctggtgattgatattgctgagagagatgattctggagtgtaccacatcaacctgaagaatgaggccggggaggcccacgccagcatcaaggtgaaggtggtggacttcccagacccccctgtggcccccaccgtgacagaggtgggagatgactggtgcatcatgaactgggagcccccagcctatgatggcggcagccccatcctgggctacttcattgaaaggaagaagaagcagagcagccgctggatgaggctgaactttgacctgtgcaaggagaccacctttgagcccaagaagatgattgagggcgtggcctatgaggtgcgcatctttgctgtgaatgccatcggcatcagcaagcccagcatgcccagccggccctttgtgcccctggccgtgaccagcccccccaccctgctgactgtggacagcgtgacagacaccaccgtgaccatgcgctggaggcccccagaccacatcggggccgccggcctggatggctacgtgctggagtactgctttgagggcacagaggactggatcgtggccaacaaggacctgattgacaagaccaagttcaccatcaccggcctgcccacagatgccaagatctttgtgcgggtgaaggctgtgaatgctgctggggccagcgagcccaagtactacagccagcccatcctggtgaaggagatcatcgagccccccaagatccgcatccccaggcacctgaagcagacctacatccggcgggtgggggaggccgtgaacctggtgatccccttccagggcaagcccaggcctgagctgacctggaagaaggatggagctgagattgacaagaaccagatcaacatcagaaattctgaaacagacaccatcatcttcatcaggaaggccgagaggagccacagcggcaagtatgacctgcaggtgaaggtggacaagtttgtggagacagccagcattgacatccagatcatcgacaggcctggccccccccagatcgtgaagattgaagatgtgtggggagaaaatgtggccctgacctggaccccacccaaggatgatggaaatgctgccatcaccggctacaccatccagaaggctgacaagaagtccatggagtggttcaccgtgattgagcactaccacaggaccagcgccaccatcacagagctggtgattggaaatgagtactacttccgggtcttcagcgagaacatgtgtggcctgtctgaagatgccaccatgaccaaggagagcgctgtgattgccagagatggcaagatctacaagaaccctgtgtatgaggactttgacttcagcgaggcccccatgttcacccagcccctggtgaacacctacgccatcgccggctacaatgccaccctgaactgcagcgtgcggggcaaccccaagcccaagatcacctggatgaagaacaaggtggccatcgtggatgacccccgctacaggatgttcagcaaccagggcgtgtgcaccctggagatcaggaagcccagcccctatgatggcggcacctactgctgcaaggctgtgaatgacctgggcaccgtggagattgagtgcaagctggaggtgaagggcggcctgtccttctgccgcctgctgctgcagggcgtgccccccaacatcatcgacagctacctgcgggacctgcacagcagcaaccctgaggagtactag

SEQ ID NO: 88976 - DNA, 3644 bp, Artificial Sequence
  derived and/or modified sequence
gtcacaccgacctgcaccatctctcgcctgcctgtggggtttctgtcaactagtcgtggagggaaggagactctttaaagaataacatcttattgtggccatgccagaacccactaagaaagaggatgaagaggaagtctccccgcctagcgccttgcctccagactggacccttgtcgaaactcctcctggggaggaacaagccaagcagaatgccaactcccagctgtccatcttgttcattgaaaaacctcaaggaggaacagtgaaagttggtgaagatatcaccttcatagccaaagtcaaggctgaagatcttctgagaaaacccactatcaaatggttcaaaggaaaatggatggacctggccagcaaagccgggaagcaccttcagctgaaggaaacctttgagaggcacagtcgggtgtacacatttgagatgcagatcatcaaggccaaagataactttgcaggaaattacagatgcgaggtcacctataaggataagtttgacagctgttcatttgatcttgaagtgcacgaatctactgggactactccaaacattgacatcagatctgctttcaagagaagtggagaaggtcaagaggatgcaggagaacttgactttagtggtctcctgaaacgtagggaggtgaagcagcaggaggaagaaccccaggtggacgtatgggagttgctgaagaacgcgaaacccagtgagtacgagaagatcgccttccagtatggaatcaccgacctgcgcggcatgctcaagcgactcaagcgcatgcgcagagaggagaagaagagcgcagcttttgcaaaaattcttgatcctgcatatcaggttgacaaaggaggcagagtgaggtttgttgtggagctggcagatccaaagttggaggtgaaatggtataaaaatggtcaagaaattcgacccagtaccaaatacatctttgaacacaaaggatgccagagaatcctgtttatcaataactgtcagatgacagatgattcagagtattatgtgacagccggtgatgagaaatgttccactgagctcttcgtaagagagcctccaattatggtgaccaaacagctggaagatacaactgcttattgtggggagagagtggaattagaatgtgaggtgtctgaagatgatgccaatgtaaaatggtttaagaatggtgaagagattatccctggtccaaaatcaagataccgaattagagttgagggtaaaaaacacatcttgatcatagagggagcaacaaaggctgatgctgcagaatattcagtaatgacaacaggaggacaatcatctgctaaacttagtgttgacttgaaacctctgaagattttgacacctctgactgatcagactgtaaatcttggaaaagaaatctgcctgaagtgtgaaatctctgaaaacataccaggaaaatggactaaaaatggcctacctgttcaggagagtgaccgtctaaaggtggttcacaagggaaggatccacaagttagtgatagccaatgccctcactgaagatgaaggtgattatgtatttgcacctgatgcctacaatgttactctgcctgccaaagttcatgttattgatcctcctaagatcatcctggatggtcttgatgctgacaacacagtgacagtgattgcaggaaacaagcttcgtcttgagatccccatcagcggagaaccacctcctaaagccatgtggagccggggagataaggctattatggaaggcagtggccggataagaacagaatcttaccctgatagcagcactctggtcattgatatagctgaaagagatgactctggtgtttaccacatcaatctgaaaaacgaagctggagaggcacatgcaagcatcaaggttaaagttgtggacttccctgatcctccagtggcaccgactgtgacagaggtgggagatgactggtgtatcatgaactgggagcctcctgcctacgacggaggctctccaatcctaggatattttattgagaggaagaagaaacaaagctccaggtggatgaggctgaattttgatctctgcaaagaaacaacttttgagcccaagaagatgattgaaggtgtggcctatgaggtccgcatctttgcagtcaatgccattggcatctccaagcccagtatgccctccaggccttttgttcctttggctgtaacaagccctcctactcttctgactgtggactctgtcactgacacgactgtcacgatgaggtggcgccccccagaccacattggtgcagcaggtttagatggctatgtgctagagtattgctttgaaggaactgaggactggatagttgcaaacaaagatctgattgacaagacgaagttcaccatcacaggtctgccaacagatgcaaagatctttgtgcgtgtgaaggctgttaatgcagctggtgccagcgagcccaagtactattctcagcccattctcgtgaaggaaatcatagaacctccaaagattcgcattccaagacacctgaagcaaacctatatccgcagagttggagaagctgtcaatctggttatacctttccagggaaaaccaagaccagaattaacttggaagaaggatggtgcagaaattgataagaatcaaataaacattcgcaactctgagactgatacaatcatatttattagaaaagcagagaggagccactctgggaaatatgatctgcaagtcaaagtggacaaattcgtggagaccgcatcaattgacatccagatcattgaccgtccaggtccaccccaaattgtgaagattgaggatgtctggggagaaaatgtcgctctcacatggactccaccaaaggatgatggaaatgctgctatcacaggctataccattcagaaggctgacaagaagagcatggaatggtttactgtcattgagcattatcatcgaaccagtgccaccattactgaattggtcatagggaatgaatattacttccgggtcttttctgaaaacatgtgtggcctcagtgaggatgccaccatgactaaagagagtgcagtgatcgccagggatggtaaaatctacaaaaatccagtgtatgaagactttgatttctcagaggcacccatgtttactcagcctttggttaacacctatgccatagctggttacaatgccaccctaaactgcagtgtgagaggaaatcctaagcctaaaataacctggatgaaaaacaaagttgctattgtggatgatccaagatacaggatgttcagcaaccagggagtctgtaccctggaaattcgcaagcccagcccctatgatggaggcacttactgctgcaaagcagtcaatgaccttgggacagtggagattgaatgcaaactggaggtgaaaggtgggctctccttctgcagactcctcttgcaaggcgtacctccaaacataattgattcgtatctgcgagacttacactcaagcaatcctgaggaatactgagggagggcctggctactgtctctctgcactctgctgctttgaaatctggttgaaatgagaaaaagcattttctgttttcccaccaggcccccaagtgtggtctttttctttcctcctaatgttg

SEQ ID NO: 88977 - DNA, 3420 bp, Artificial Sequence
  derived and/or modified sequence
atgcccgagcccaccaagaaggaggacgaggaggaggtgagcccccccagcgctctgccccctgactggaccctagtggaaacacccccgggggaagaacaggccaaacaaaacgctaattcccagctgtccatcctgttcatcgaaaaaccccaggggggcacagtgaaagttggggaggatattacctttattgcaaaggtaaaagctgaggaccttctgagaaaaccaacaatcaagtggtttaaaggaaaatggatggacttagcctccaaggccggcaagcacctgcagttgaaggagacatttgaaagacattccagagtttatacctttgagatgcaaattattaaagccaaagacaactttgcaggcaactacaggtgcgaagtgacctacaaggataagtttgactcatgttcttttgatctggaggtccacgaatctaccgggacaacacccaatattgatatcaggagcgccttcaagaggtccggcgagggacaggaggacgcaggggagcttgatttttcgggactactgaagcgtagagaggtcaagcagcaggaagaggagccccaggtcgacgtgtgggagctgttgaagaacgccaagccgtcagagtacgaaaaaattgccttccaatacgggatcaccgaccttcgaggtatgctgaagcggcttaaaaggatgcgtagggaagaaaagaagtccgccgcattcgctaagatccttgatccggcatatcaggtggacaagggcggacgggtgaggtttgtggtggaattggctgatcccaaattggaggttaagtggtacaagaacggtcaggaaatcaggccctccaccaaatatatctttgagcataaggggtgccaaaggatcttattcatcaacaactgtcagatgaccgacgattccgagtactacgttacagcaggagatgagaagtgttctacggaactttttgtaagggagccccccatcatggtcaccaagcagctcgaagacaccaccgcctactgcggtgaacgggtggaactggagtgcgaggttagtgaggatgacgctaacgtgaaatggttcaaaaacggcgaggaaattatcccggggccaaaatctcgttataggatacgagtggagggcaagaagcacattctgattatcgaaggagctacaaaggcagacgccgctgaatattccgtcatgaccaccggagggcagtcctcagccaaactgagcgtggacctgaaaccattgaaaatcctgacacctctgacagaccagacagtgaacctgggtaaagaaatctgtcttaagtgcgagatatcggaaaacatcccagggaaatggaccaagaacggcctacccgtccaggaaagcgacaggctaaaagttgtccacaaaggaaggattcacaaactggtcatcgccaacgccctcaccgaggatgagggcgactacgtttttgcacccgatgcttacaatgtgaccctcccagcaaaggtacacgtgatcgaccctccaaaaatcattctggacggtttggacgctgataacacagtcacagttatcgcggggaacaagctgcggctggaaatccctataagtggagagcccccacctaaggcgatgtggtcaaggggagacaaggctattatggaaggcagcggacgcattcgcaccgaatcttacccagacagcagtaccctggtcatagatatcgctgagcgggacgacagcggagtctaccacattaatctcaagaatgaggctggagaagcccacgccagtatcaaggttaaggtcgtagacttcccagacccccccgtagcccctacagtgacagaggtgggcgacgattggtgcattatgaactgggagccacccgcatacgatggcggtagcccaattctgggttatttcatcgagaggaaaaagaagcagtccagtaggtggatgagattgaattttgacctttgtaaagaaacaacgttcgagccaaagaagatgatcgagggggtcgcttacgaggtacgtatcttcgcagtgaatgccatcggcatctctaaaccttccatgccctctcggcctttcgtgcccctggcagtgacgtcccctccgactttactgaccgtagactccgtgaccgacaccacggtgaccatgcggtggaggccgccggatcatatcggcgcagctggcttggatgggtatgtcctggagtactgtttcgaggggacggaagattggattgtggccaataaggatctgattgataaaaccaaattcacaattacaggcctgccaacggacgcaaaaatctttgtgagagtgaaggctgtgaacgccgccggagcctccgagcctaaatactacagtcaacctatcctggtaaaagaaataattgaaccacccaagattcggatacccaggcatctcaagcagacctacatccgaagggtaggggaggcagtcaatctcgtcatccccttccaggggaagccccgaccagagctgacatggaaaaaggacggtgccgagattgataagaaccagatcaacattcgtaattcagaaacagacaccattattttcattcgaaaagctgagcgttcccactctggaaagtacgaccttcaggtgaaggtggacaagttcgtggaaaccgctagcatagacattcagatcatcgacaggcctggcccaccacagattgttaaaatcgaagatgtatggggggaaaacgtcgctctcacttggacgccccctaaggacgacgggaacgcagcaattaccgggtacacaattcagaaagcagacaagaaatcgatggagtggtttaccgttatcgaacactaccatcgtacctctgccaccattacggaactcgtcatcggcaatgagtactattttcgagtattttcagagaatatgtgcggcctgtccgaggatgctacgatgacaaaggaatccgccgtgatagcaagggacggaaaaatctataaaaaccccgtctatgaggacttcgacttcagtgaggctcctatgtttacccagcctctagtcaatacttatgctatcgctggctataatgctactctgaattgttccgtgaggggaaacccaaaacccaagattacatggatgaagaacaaggtggcaattgtggatgatccacgttatcgcatgttttctaatcagggggtctgcaccctcgagatccggaagcccagcccttatgacgggggtacttactgttgcaaagctgttaacgacctgggtactgtggagattgaatgtaaactggaggtaaagggcggcctttcattctgcaggctattactgcaaggagtgccccccaacattatagactcctacctcagagacctgcacagcagtaaccctgaggagtactag

SEQ ID NO: 88978 - DNA, 3420 bp, Artificial Sequence
  derived and/or modified sequence
atgcccgagcctacgaagaaggaggacgaagaggaggtcagccctccgtcagctttacctcctgattggaccctagtagagactcccccaggcgaagagcaggccaagcaaaacgctaattcccagttgtctatccttttcattgagaaaccacagggtggcactgttaaggtcggcgaggacatcacctttatcgccaaggtcaaagctgaggacttactgagaaagcccaccatcaaatggttcaagggcaaatggatggatttggcaagcaaggcaggcaagcacttgcaactgaaggagacatttgagcgccattcaagagtgtatacctttgagatgcaaattatcaaggctaaggataactttgccggtaactacagatgcgaggtgacttataaggacaaattcgattcttgctcattcgacttagaggtgcacgagagcactggcacaacacctaatatcgacatacgatctgctttcaagcgttcaggagagggtcaagaagacgctggggagctggatttttccggtttgctcaagaggcgggaggtgaagcagcaggaagaagagcctcaggtagacgtgtgggagctcttaaagaatgcaaagccatctgagtacgaaaagatcgcgtttcagtacggaataaccgacttacgcggaatgctgaagcggctcaaacgtatgagaagagaagaaaagaagagcgcagcctttgctaagattctggacccagcatatcaggtagacaagggcggaagagtccgctttgttgtggaactcgccgaccccaagctcgaagttaagtggtataagaatgggcaggagatccgcccttcaaccaaatacatctttgagcataaaggctgccagcggattctattcataaataactgccagatgactgacgatagcgaatattacgtaaccgcgggagacgagaagtgtagcacagaactctttgtacgcgagccgccaatcatggttaccaaacaattggaagacaccaccgcgtattgtggggagcgcgtagagttagaatgcgaagtgtcagaggacgatgcaaacgtaaagtggtttaaaaatggggaggagatcatccctgggccaaagtctcggtatcggattcgcgtggaaggcaagaaacacattctgataattgagggggctacaaaggctgacgccgctgagtacagcgtgatgacaactgggggtcaatctagcgcaaaactcagtgttgatttgaagcctctaaagatcctcaccccacttacggatcagaccgtgaacttaggcaaggaaatttgtctgaagtgtgaaatctcagaaaacattcctggtaagtggacaaaaaatggactaccagtccaggagtccgatcgtttaaaagtggttcacaaaggtcggatccacaaattggtaatcgccaatgccctcaccgaagacgagggtgactacgtgtttgcacctgacgcctacaacgtgaccctgcctgcaaaagtgcatgtcatcgaccccccaaagatcatattagacgggctggatgccgataatacagtgactgtcattgccggaaacaaactgcgactggagatccccatcagcggggagccgccacccaaagcaatgtggtctaggggagataaagccatcatggaaggatccggcaggattcgcaccgagagctaccccgattccagcaccttagtgattgacattgccgaacgcgatgacagtggcgtgtaccatatcaacctaaagaatgaagccggtgaagctcatgcttcaataaaagtgaaagtagtggatttcccagatccgccagtcgccccaacagttacggaagtaggcgatgattggtgcatcatgaattgggagccaccagcctatgacgggggttctcctatccttggatacttcatagaaaggaaaaagaagcagagttcaagatggatgagacttaattttgatctttgcaaagaaacaaccttcgaacctaagaagatgattgagggggtcgcctatgaggttagaatattcgccgtgaatgccatcggcatcagcaagccctccatgccctcccggcctttcgtacctctggccgtgacgagtccccctactctactcaccgtggattcagtaactgatacaacagtcacgatgagatggagaccacccgaccatatcggcgctgcagggctcgacggttacgttcttgagtattgttttgaaggcaccgaggattggattgttgcaaataaagatttgatcgacaagacaaagttcacgatcactggacttccaactgacgccaagatttttgtgcgagtgaaagctgtgaacgctgccggtgctagcgagccaaaatattactcacagcctattctagtgaaagagatcattgagccaccgaaaattaggatccccaggcatctgaaacaaacgtatatccggagggtgggggaggcagttaacctggttatcccattccagggcaaacccaggcctgaattgacctggaaaaaggacggcgctgagatcgataaaaaccagattaacataagaaacagcgaaaccgacactataatatttattcggaaggctgaaagaagtcattctgggaagtatgaccttcaggtaaaagtggacaagttcgttgaaacagcatcaattgatatccagatcatcgatcgacccggtcccccacaaatagttaagatagaggatgtttggggcgagaatgtggctttgacttggacaccaccgaaggatgacggcaacgctgcaattaccggctatacaattcagaaggctgacaagaaaagtatggagtggtttacagtcattgagcattatcaccgtacatctgcaactattaccgagttggtcatcggaaacgagtattatttccgcgtattcagtgaaaacatgtgtgggttgagcgaagacgctaccatgaccaaggaaagtgcagtaatcgcgcgtgacggtaagatctataagaatccggtttatgaagattttgattttagcgaagctcctatgttcactcagcctcttgtcaatacatacgcaatcgccggttacaacgccacattgaactgtagcgttcggggaaatcctaagcctaagatcacatggatgaaaaataaagtggccattgttgatgaccctaggtacaggatgttttcaaaccagggggtgtgtacactggagatccgtaagcccagtccatacgatggcggaacttactgctgtaaagcggtaaacgatctgggcaccgtggaaattgaatgtaagcttgaagtgaaagggggattaagcttttgccgtctactgctgcagggcgtgcccccaaacatcatagattcctacctcagagatctgcactctagcaatccagaagaatactag

SEQ ID NO: 88979 - DNA, 3420 bp, Artificial Sequence
  derived and/or modified sequence
atgcccgagcccaccaagaaggaggacgaggaggaggtgagcccccccagcgccctgccccccgactggaccctggtggagaccccccccggcgaggagcaggccaagcagaacgccaacagccagctgagcatcctgttcatcgagaagccccagggcggcaccgtgaaggtgggcgaggacatcaccttcatcgccaaggtgaaggccgaggacctgctgagaaagcccaccatcaagtggttcaagggcaagtggatggacctggccagcaaggccggcaagcacctgcagctgaaggagaccttcgagagacacagcagagtgtacaccttcgagatgcagatcatcaaggccaaggacaacttcgccggcaactacagatgcgaggtgacctacaaggacaagttcgacagctgcagcttcgacctggaggtgcacgagagcaccggcaccacccccaacatcgacatcagaagcgccttcaagagaagcggcgagggccaggaggacgccggcgagctggacttcagcggcctgctgaagagaagagaggtgaagcagcaggaggaggagccccaggtggacgtgtgggagctgctgaagaacgccaagcccagcgagtacgagaagatcgccttccagtacggcatcaccgacctgagaggcatgctgaagagactgaagagaatgagaagagaggagaagaagagcgccgccttcgccaagatcctggaccccgcctaccaggtggacaagggcggcagagtgagattcgtggtggagctggccgaccccaagctggaggtgaagtggtacaagaacggccaggagatcagacccagcaccaagtacatcttcgagcacaagggctgccagagaatcctgttcatcaacaactgccagatgaccgacgacagcgagtactacgtgaccgccggcgacgagaagtgcagcaccgagctgttcgtgagagagccccccatcatggtgaccaagcagctggaggacaccaccgcctactgcggcgagagagtggagctggagtgcgaggtgagcgaggacgacgccaacgtgaagtggttcaagaacggcgaggagatcatccccggccccaagagcagatacagaatcagagtggagggcaagaagcacatcctgatcatcgagggcgccaccaaggccgacgccgccgagtacagcgtgatgaccaccggcggccagagcagcgccaagctgagcgtggacctgaagcccctgaagatcctgacccccctgaccgaccagaccgtgaacctgggcaaggagatctgcctgaagtgcgagatcagcgagaacatccccggcaagtggaccaagaacggcctgcccgtgcaggagagcgacagactgaaggtggtgcacaagggcagaatccacaagctggtgatcgccaacgccctgaccgaggacgagggcgactacgtgttcgcccccgacgcctacaacgtgaccctgcccgccaaggtgcacgtgatcgacccccccaagatcatcctggacggcctggacgccgacaacaccgtgaccgtgatcgccggcaacaagctgagactggagatccccatcagcggcgagcccccccccaaggccatgtggagcagaggcgacaaggccatcatggagggcagcggcagaatcagaaccgagagctaccccgacagcagcaccctggtgatcgacatcgccgagagagacgacagcggcgtgtaccacatcaacctgaagaacgaggccggcgaggcccacgccagcatcaaggtgaaggtggtggacttccccgacccccccgtggcccccaccgtgaccgaggtgggcgacgactggtgcatcatgaactgggagccccccgcctacgacggcggcagccccatcctgggctacttcatcgagagaaagaagaagcagagcagcagatggatgagactgaacttcgacctgtgcaaggagaccaccttcgagcccaagaagatgatcgagggcgtggcctacgaggtgagaatcttcgccgtgaacgccatcggcatcagcaagcccagcatgcccagcagacccttcgtgcccctggccgtgaccagcccccccaccctgctgaccgtggacagcgtgaccgacaccaccgtgaccatgagatggagaccccccgaccacatcggcgccgccggcctggacggctacgtgctggagtactgcttcgagggcaccgaggactggatcgtggccaacaaggacctgatcgacaagaccaagttcaccatcaccggcctgcccaccgacgccaagatcttcgtgagagtgaaggccgtgaacgccgccggcgccagcgagcccaagtactacagccagcccatcctggtgaaggagatcatcgagccccccaagatcagaatccccagacacctgaagcagacctacatcagaagagtgggcgaggccgtgaacctggtgatccccttccagggcaagcccagacccgagctgacctggaagaaggacggcgccgagatcgacaagaaccagatcaacatcagaaacagcgagaccgacaccatcatcttcatcagaaaggccgagagaagccacagcggcaagtacgacctgcaggtgaaggtggacaagttcgtggagaccgccagcatcgacatccagatcatcgacagacccggccccccccagatcgtgaagatcgaggacgtgtggggcgagaacgtggccctgacctggaccccccccaaggacgacggcaacgccgccatcaccggctacaccatccagaaggccgacaagaagagcatggagtggttcaccgtgatcgagcactaccacagaaccagcgccaccatcaccgagctggtgatcggcaacgagtactacttcagagtgttcagcgagaacatgtgcggcctgagcgaggacgccaccatgaccaaggagagcgccgtgatcgccagagacggcaagatctacaagaaccccgtgtacgaggacttcgacttcagcgaggcccccatgttcacccagcccctggtgaacacctacgccatcgccggctacaacgccaccctgaactgcagcgtgagaggcaaccccaagcccaagatcacctggatgaagaacaaggtggccatcgtggacgaccccagatacagaatgttcagcaaccagggcgtgtgcaccctggagatcagaaagcccagcccctacgacggcggcacctactgctgcaaggccgtgaacgacctgggcaccgtggagatcgagtgcaagctggaggtgaagggcggcctgagcttctgcagactgctgctgcagggcgtgccccccaacatcatcgacagctacctgagagacctgcacagcagcaaccccgaggagtactag

SEQ ID NO: 88980 - protein, 135 aa, Artificial Sequence
  derived and/or modified sequence
MIKFFLMVNKQGQTRLSKYYEHVDINKRTLLETEVIKSCLSRSNEQCSFIEYKDFKLIYRQYAALFIVVGVNDTENEMAIYEFIHNFVEVLDEYFSRVEPIDELPKICSALEPQQTCFSPDSSSFKGAASTTPIY

SEQ ID NO: 88981 - DNA, 408 bp, Artificial Sequence
  derived and/or modified sequence
atgataaagtttttcctgatggtcaacaagcaagggcagacgcggctctccaagtactacgaacacgtggacattaataaaagaaccctgctagagaccgaggtgattaagtcatgtctcagccggagcaacgagcagtgcagctttattgaatacaaggacttcaagttaatctatagacagtatgctgcactgttcatcgtcgtaggggtgaatgacaccgagaacgaaatggcgatctacgagtttatccataactttgtcgaagtgcttgacgagtacttcagtagagttgagcccatcgacgaactgcccaaaatttgcagcgcgttagagcctcaacagacgtgcttttctccagacagtagcagcttcaagggtgcagctagtacgacacctatctactag

SEQ ID NO: 88982 - DNA, 297 bp, Artificial Sequence
  derived and/or modified sequence
atgattaagttcttcctgatggtcaacaagcaggggcagacacgcctatcaaagtactacgaacacgtcgacataaataaacgcactctgttggagacagaagtgatcaagagttgcttgtctcggtctaacgagcaatgtagtttcatcgagtataaagatttcaaactgatttatcggcagtacgcggcgctgttcattgtggtgggcgtgaatgatacagagaatgagatggcaatctatgagtttatccacaactttgtcgaggtgctggacgagtatttcagcagagtgtag

SEQ ID NO: 88983 - DNA, 1491 bp, Artificial Sequence
  derived and/or modified sequence
gcaccgcgtagccagtgaaggttggggagcaagcttatgcgggaaagagggagggggactccaggaaaagccgttgagaggaccatcacaacctgagcagcacaggttccagttacagccatcccttgtcataacttttgaactgtatttggaaaaatactggccaggaaagaaaaatgataaaatttttcctcatggtgaataaacaagggcagactcgactttctaagtactatgaacatgtggatattaataagcgtacacttctggaaacagaagtcataaagagctgtctctctcgatccaatgaacaatgctctttcattgaatataaggattttaagctgatatatcggcagtatgcagctctcttcattgtggttggagttaatgacactgagaacgagatggctatttatgaattcattcataactttgtggaagttttagatgagtatttcagccgagtggaaccaattgatgaacttcccaaaatatgctcagccctggagccccagcagacttgcttttctccagacagttcatcattcaaaggagctgcctccaccacccccatctactgaatagccaggggagggcaccaatgaacagcacagtatgggagacacaccaactactcttcaaatcagtgcgtacctgctctacgcgtgaaggtacagaaaacctccacggccttttcagtatttggtgcctttaaagaggcctaaggacttagtttatttgggctagactggaatgcagcagtactgccttcaggcctggacagccaggggctcctcgggccctgtgctctagaaggcccattctatgtctgcttcgccagcaccctttccccatcatggggcagatgcccaccagccctcactatctactgcttgaccatcctctgacttcctgggcccctagaatttataaggtccctagatatcccagaacctgccaccatggcctctgcaagcctctcctccaccttcaccccaagactaggggcaggaatgataagaaggctgggtggtagctgggatgtcccacctacgtgcctggggagagaagcaagagcaggctggagtctctactttgtattcttgtgaggcacaaatataggctagaatccaggccccacaaatataggctagaatccggaatgttttcttgatttaaagacatctttagaccgggcacagtggctcacgccagtaatcccagcactttggagggctgaagcaggaggattgcttgaggccaggagtttgagaccagcctgggcaacatagggagacccagtctctacaaaaaaatttaaaaagccaggcattggtggtgtgtgcctatagtcccaactactagggaggctgaggtgggaggatcacttgagcctgggggactgaggctgcagtgagccatgattgtgctactgcactccaatctggcaacagagcgagaccttgtctttaaaaataaaaataaaaa

SEQ ID NO: 88984 - DNA, 542 bp, Artificial Sequence
  derived and/or modified sequence
atactaaaagccaaaatggctgccccgaggaggcccgcaccgcgtagccagtgaaggttggggagcaagcttatgcgggaaagagggagggggactccaggaaaagccgttgagaggaccatcacaacctgagcagcacagtgaagaaagaaagctgaagagctcttggtcacttcagttccagttacagccatcccttgtcataacttttgaactgtatttggaaaaatactggccaggaaagaaaaatgataaaatttttcctcatggtgaataaacaagggcagactcgactttctaagtactatgaacatgtggatattaataagcgtacacttctggaaacagaagtcataaagagctgtctctctcgatccaatgaacaatgctctttcattgaatataaggattttaagctgatatatcggcagtatgcagctctcttcattgtggttggagttaatgacactgagaacgagatggctatttatgaattcattcataactttgtggaagttttagatgagtatttcagccgagtg

SEQ ID NO: 88985 - DNA, 408 bp, Artificial Sequence
  derived and/or modified sequence
atgatcaagttcttcctgatggtgaacaagcagggccagacccggctgagcaagtactatgagcacgtggacatcaacaagaggaccctgctggagacagaggtgatcaagagctgcctgagccgcagcaatgagcagtgcagcttcatcgagtacaaggacttcaagctgatctaccggcagtatgctgccctcttcatcgtggtgggcgtgaatgacacagaaaatgagatggccatctatgagttcatccacaactttgtggaggtgctggatgagtacttcagccgggtggagcccattgatgagctgcccaagatctgcagcgccctggagccccagcagacctgcttctccccagacagcagcagcttcaagggggccgccagcaccacccccatctactag

SEQ ID NO: 88986 - DNA, 297 bp, Artificial Sequence
  derived and/or modified sequence
atgatcaagttcttcctgatggtgaacaagcagggccagacccggctgagcaagtactatgagcacgtggacatcaacaagaggaccctgctggagacagaggtgatcaagagctgcctgagccgcagcaatgagcagtgcagcttcatcgagtacaaggacttcaagctgatctaccggcagtatgctgccctcttcatcgtggtgggcgtgaatgacacagaaaatgagatggccatctatgagttcatccacaactttgtggaggtgctggatgagtacttcagccgggtgtag

SEQ ID NO: 88987 - DNA, 408 bp, Artificial Sequence
  derived and/or modified sequence
atgatcaagttcttcctgatggtgaacaagcagggccagacccggttgtctaaatattatgaacacgtggatatcaataaacggacactgctagagacagaggttattaagtcatgcctttcgagatcaaatgaacagtgttcatttatcgaatacaaagatttcaagctgatttaccggcagtatgcagcactattcatagtggtcggagtgaatgataccgagaatgaaatggcgatctatgaatttattcacaattttgtggaagtgttagacgagtatttctctcgtgtggaacctattgacgagctccctaagatctgttctgccctggagcctcagcaaacatgtttctcacctgattcgtcatctttcaaaggcgccgctagtacgacacccatttactag

SEQ ID NO: 88988 - DNA, 297 bp, Artificial Sequence
  derived and/or modified sequence
atgatcaagttcttcctgatggtgaacaagcagggccagacccggctcagcaaatattatgagcacgtggacattaacaaaaggaccctattggaaacagaggttattaagtcctgcttgagccgatctaacgaacagtgcagcttcattgaatacaaggattttaaactgatttaccgccagtacgcagccctgttcatagtggtcggagtgaacgacacagagaatgagatggctatctacgaattcattcacaacttcgttgaggtcctggacgaatacttttctcgagtctag

SEQ ID NO: 88989 - DNA, 408 bp, Artificial Sequence
  derived and/or modified sequence
atgatcaaattcttcctgatggtgaataaacagggacaaacacgtctgagcaaatactacgaacacgtagatattaacaaaaggacacttctcgaaacggaggtgattaagagttgcctgtcaaggagcaacgagcagtgttcctttatcgaatacaaggattttaaactgatttaccgacagtatgccgctctgttcatcgtggtgggcgttaacgatacagaaaatgaaatggcgatctacgagttcattcacaatttcgtcgaagtgctagacgagtatttctctcgggtggagccgatcgacgagttgcctaagatttgtagtgccctcgagccccagcagacctgtttctctcctgactcctcatcctttaaaggcgcagcctccacaaccccgatctattag

SEQ ID NO: 88990 - DNA, 297 bp, Artificial Sequence
  derived and/or modified sequence
atgatcaagttcttcctgatggtcaacaagcagggacaaacgcggttaagcaaatattacgagcacgttgatataaacaaaagaacattgctggagaccgaagtcatcaagtcttgtctgtcccggagcaacgaacagtgctcgttcattgagtataaagacttcaaattaatttatcgccagtacgccgctctgtttattgtcgttggagtgaatgatactgaaaatgagatggccatctatgagttcattcacaattttgtggaggtattagatgagtatttcagccgggtgtag

SEQ ID NO: 88991 - DNA, 408 bp, Artificial Sequence
  derived and/or modified sequence
atgatcaagttcttcctgatggtgaacaagcagggccagaccagactgagcaagtactacgagcacgtggacatcaacaagagaaccctgctggagaccgaggtgatcaagagctgcctgagcagaagcaacgagcagtgcagcttcatcgagtacaaggacttcaagctgatctacagacagtacgccgccctgttcatcgtggtgggcgtgaacgacaccgagaacgagatggccatctacgagttcatccacaacttcgtggaggtgctggacgagtacttcagcagagtggagcccatcgacgagctgcccaagatctgcagcgccctggagccccagcagacctgcttcagccccgacagcagcagcttcaagggcgccgccagcaccacccccatctactag

SEQ ID NO: 88992 - DNA, 297 bp, Artificial Sequence
  derived and/or modified sequence
atgatcaagttcttcctgatggtgaacaagcagggccagaccagactgagcaagtactacgagcacgtggacatcaacaagagaaccctgctggagaccgaggtgatcaagagctgcctgagcagaagcaacgagcagtgcagcttcatcgagtacaaggacttcaagctgatctacagacagtacgccgccctgttcatcgtggtgggcgtgaacgacaccgagaacgagatggccatctacgagttcatccacaacttcgtggaggtgctggacgagtacttcagcagagtgtag

SEQ ID NO: 88993 - protein, 149 aa, Artificial Sequence
  derived and/or modified sequence
MIKFFLMVNKQGQTRLSKYYEHVDINKRTLLETEVIKSCLSRSNEQCSFIEYKDFKLIYRQYAALFIVVGVNDTENEMAIYEFIHNFVEVLDEYFSRVSELDVSFFNTVFHSTWQMHSGPYQTRSCSVTQAGVQRCDHGSLHPGSPGLK

SEQ ID NO: 88994 - DNA, 450 bp, Artificial Sequence
  derived and/or modified sequence
atgattaagtttttcctgatggtgaataagcaggggcaaactcgcctcagcaagtactatgagcacgtggacatcaacaaaagaaccctgttggaaacagaggtgatcaagtcctgcctatccagatccaatgagcaatgtagcttcattgagtacaaggacttcaagcttatctatcggcaatacgccgcactgtttatagtggttggtgtgaacgatactgagaacgagatggccatctacgagtttatacataacttcgtggaagtgctggatgagtacttcagcagggtatccgaactggatgtgtcattttttaatacggtcttccattcaacctggcaaatgcactccgggccttaccaaacccggtcttgttcagttacacaggcgggcgtgcaacggtgcgatcacggctcactgcatcccggctcccctggactcaagtag

SEQ ID NO: 88995 - DNA, 1122 bp, Artificial Sequence
  derived and/or modified sequence
gccccgaggaggcccgcaccgcgtagccagtgaaggttggggagcaagcttatgcgggaaagagggagggggactccaggaaaagccgttgagaggaccatcacaacctgagcagcacaggttccagttacagccatcccttgtcataacttttgaactgtatttggaaaaatactggccaggaaagaaaaatgataaaatttttcctcatggtgaataaacaagggcagactcgactttctaagtactatgaacatgtggatattaataagcgtacacttctggaaacagaagtcataaagagctgtctctctcgatccaatgaacaatgctctttcattgaatataaggattttaagctgatatatcggcagtatgcagctctcttcattgtggttggagttaatgacactgagaacgagatggctatttatgaattcattcataactttgtggaagttttagatgagtatttcagccgagtgagtgaattagatgtatcctttttcaatactgttttccacagtacttggcaaatgcactctggtccttatcagacaaggtcttgctctgtcacccaggctggagtgcagaggtgcgatcatggctcactacaccctggatctcctgggctcaagtgatcctcctacctcagcctcccaagtagctgggactacaggaaccaattgatgaacttcccaaaatatgctcagccctggagccccagcagacttgcttttctccagacagttcatcattcaaaggagctgcctccaccacccccatctactgaatagccaggggagggcaccaatgaacagcacagtatgggagacacaccaactactcttcaaatcagtgcgtacctgctctacgcgtgaaggtacagaaaacctccacggccttttcagtatttggtgcctttaaagaggcctaaggacttagtttatttgggctagactggaatgcagcagtactgccttcaggcctggacagccaggggctcctcgggccctgtgctctagaaggcccattctatgtctgcttcgccagcaccctttccccatcatggggcagatgcccaccagccctcactatctactgcttgaccatcctctgact

SEQ ID NO: 88996 - DNA, 450 bp, Artificial Sequence
  derived and/or modified sequence
atgatcaagttcttcctgatggtgaacaagcagggccagacccggctgagcaagtactatgagcacgtggacatcaacaagaggaccctgctggagacagaggtgatcaagagctgcctgagccgcagcaatgagcagtgcagcttcatcgagtacaaggacttcaagctgatctaccggcagtatgctgccctcttcatcgtggtgggcgtgaatgacacagaaaatgagatggccatctatgagttcatccacaactttgtggaggtgctggatgagtacttcagccgggtgtctgagctggatgtgtccttcttcaacacagtgttccacagcacctggcagatgcacagcggcccctaccagaccaggagctgcagcgtgacccaggccggcgtgcagagatgtgaccacggcagcctgcaccctggcagccctggcctgaagtag

SEQ ID NO: 88997 - DNA, 450 bp, Artificial Sequence
  derived and/or modified sequence
atgatcaagttcttcctgatggtgaacaagcagggccagacccggctctccaaatattacgaacacgtggacattaataagcggacactgcttgagaccgaggtgattaagagctgtctctccaggtcgaatgaacagtgctcattcatcgaatacaaagacttcaagctgatataccgccagtatgctgccctgttcatcgtggtcggcgtcaatgataccgagaacgaaatggctatctatgagtttatccacaattttgtagaagtccttgatgagtacttctctcgcgtgtccgaattggatgtatctttctttaacacagtcttccacagtacttggcagatgcacagtggcccatatcagaccaggagttgttcggtgacacaggccggagtgcaaagatgcgaccacggttcactgcaccccggatcacctgggctgaaatag

SEQ ID NO: 88998 - DNA, 450 bp, Artificial Sequence
  derived and/or modified sequence
atgatcaaattctttttaatggttaataagcaagggcagacacgactgtcgaagtattatgagcatgtggacatcaataagaggacgctgctagaaaccgaagttatcaaaagttgcttatctcgtagcaacgagcaatgctcttttatcgaatacaaagacttcaagctgatttatcgccaatatgccgctctctttattgtggttggggtgaatgataccgaaaacgagatggccatttacgaattcatacacaatttcgtcgaggtgctcgatgaatattttagcagagtgtcagagttagatgtgtccttctttaatacagtgttccactcaacatggcagatgcattcgggcccttaccaaacaagatcctgctctgtgacacaggccggagtgcaacggtgcgatcatggctccctgcatcccggaagcccaggtttgaagtag

SEQ ID NO: 88999 - DNA, 450 bp, Artificial Sequence
  derived and/or modified sequence
atgatcaagttcttcctgatggtgaacaagcagggccagaccagactgagcaagtactacgagcacgtggacatcaacaagagaaccctgctggagaccgaggtgatcaagagctgcctgagcagaagcaacgagcagtgcagcttcatcgagtacaaggacttcaagctgatctacagacagtacgccgccctgttcatcgtggtgggcgtgaacgacaccgagaacgagatggccatctacgagttcatccacaacttcgtggaggtgctggacgagtacttcagcagagtgagcgagctggacgtgagcttcttcaacaccgtgttccacagcacctggcagatgcacagcggcccctaccagaccagaagctgcagcgtgacccaggccggcgtgcagagatgcgaccacggcagcctgcaccccggcagccccggcctgaagtag

SEQ ID NO: 89000 - protein, 939 aa, Artificial Sequence
  derived and/or modified sequence
VPEAVRWGYFIPEQSQFACKCITKRQPRMKKASRSVGSVPKVSAISKTQTAEKIKPENSSSASTGGKLVKPGTAASLSKTKSSDDLLAGMAGGVTVTNGVKGKKSTCPSAAPSASAPAMTTVENKSKISTGTASSTKRSTSTGNKESSSTRERLRERTRLNQSKKLPSAGQGANDMALAKRSRSRTATECDVRMSKSKSDNQISDRAALEAKVKDLLTLAKTKDVEILHLRNELRDMRAQLGINEDHSEGDEKSEKETIMAHQPTDVESTLLQLQEQNTAIREELNQLKNENRMLKDRLNALGFSLEQRLDNSEKLFGYQSLSPEITPDNQSDGGGTLTSSVEGSAPGSVEDLLSQDENTLMDHQHSNSMDNLDSECSEVYQPLTSSDDALDAPSSSESEGIPSIERSRKGSSGNASEVSVACLTERIHQMEENQHSTSEELQATLQELADLQQITQELNSENERLGEEKVILMESLCQQSDKLEHFSRQIEYFRSLLDEHHISYVIDEDVKSGRYMELEQRYMDLAENARFEREQLLGVQQHLSNTLKMAEQDNKEAQEMIGALKERSHHMERIIESEQKGKAALAATLEEYKATVASDQIEMNRLKAQLENEKQKVAELYSIHNSGDKSDIQDLLESVRLDKEKAETLASSLQEDLAHTRNDANRLQDAIAKVEDEYRAFQEEAKKQIEDLNMTLEKLRSDLDEKETERSDMKETIFELEDEVEQHRAVKLHDNLIISDLENTVKKLQDQKHDMEREIKTLHRRLREESAEWRQFQADLQTAVVIANDIKSEAQEEIGDLKRRLHEAQEKNEKLTKELEEIKSRKQEEERGRVYNYMNAVERDLAALRQGMGLSRRSSTSSEPTPTVKTLIKSFDSASQVPNPAAAAIPRTPLSPSPMKTPPAAAVSPMQMESSSVAHAGMQWRDLGSLQPLPPGFK

SEQ ID NO: 89001 - protein, 789 aa, Artificial Sequence
  derived and/or modified sequence
MKKASRSVGSVPKVSAISKTQTAEKIKPENSSSASTGGKLVKPGTAASLSKTKSSDDLLAGMAGGVTVTNGVKGKKSTCPSAAPSASAPAMTTVENKSKISTGTASSTKRSTSTGNKESSSTRERLRERTRLNQSKKLPSAGQGANDMALAKRSRSRTATECDVRMSKSKSDNQISDRAALEAKVKDLLTLAKTKDVEILHLRNELRDMRAQLGINEDHSEGDEKSEKETIMAHQPTDVESTLLQLQEQNTAIREELNQLKNENRMLKDRLNALGFSLEQRLDNSEKLFGYQSLSPEITPDNQSDGGGTLTSSVEGSAPGSVEDLLSQDENTLMDHQHSNSMDNLDSECSEVYQPLTSSDDALDAPSSSESEGIPSIERSRKGSSGNASEVSVACLTERIHQMEENQHSTSEELQATLQELADLQQITQELNSENERLGEEKVILMESLCQQSDKLEHFSRQIEYFRSLLDEHHISYVIDEDVKSGRYMELEQRYMDLAENARFEREQLLGVQQHLSNTLKMAEQDNKEAQEMIGALKERSHHMERIIESEQKGKAALAATLEEYKATVASDQIEMNRLKAQLENEKQKVAELYSIHNSGDKSDIQDLLESVRLDKEKAETLASSLQEDLAHTRNDANRLQDAIAKVEDEYRAFQEEAKKQIEDLNMTLEKLRSDLDEKETERSDMKETIFELEDEVEQHRAVKLHDNLIISDLENTVKKLQDQKHDMEREIKTLHRRLREESAEWRQFQADLQTAVVIANDIKSEAQEEIGDLKRRLHEAQEKNEKLT

SEQ ID NO: 89002 - protein, 1078 aa, Artificial Sequence
  derived and/or modified sequence
MKKASRSVGSVPKVSAISKTQTAEKIKPENSSSASTGGKLVKPGTAASLSKTKSSDDLLAGMAGGVTVTNGVKGKKSTCPSAAPSASAPAMTTVENKSKISTGTASSTKRSTSTGNKESSSTRERLRERTRLNQSKKLPSAGQGANDMALAKRSRSRTATECDVRMSKSKSDNQISDRAALEAKVKDLLTLAKTKDVEILHLRNELRDMRAQLGINEDHSEGDEKSEKETIMAHQPTDVESTLLQLQEQNTAIREELNQLKNENRMLKDRLNALGFSLEQRLDNSEKLFGYQSLSPEITPDNQSDGGGTLTSSVEGSAPGSVEDLLSQDENTLMDHQHSNSMDNLDSECSEVYQPLTSSDDALDAPSSSESEGIPSIERSRKGSSGNASEVSVACLTERIHQMEENQHSTSEELQATLQELADLQQITQELNSENERLGEEKVILMESLCQQSDKLEHFSRQIEYFRSLLDEHHISYVIDEDVKSGRYMELEQRYMDLAENARFEREQLLGVQQHLSNTLKMAEQDNKEAQEMIGALKERSHHMERIIESEQKGKAALAATLEEYKATVASDQIEMNRLKAQLENEKQKVAELYSIHNSGDKSDIQDLLESVRLDKEKAETLASSLQEDLAHTRNDANRLQDAIAKVEDEYRAFQEEAKKQIEDLNMTLEKLRSDLDEKETERSDMKETIFELEDEVEQHRAVKLHDNLIISDLENTVKKLQDQKHDMEREIKTLHRRLREESAEWRQFQADLQTAVVIANDIKSEAQEEIGDLKRRLHEAQEKNEKLTKELEEIKSRKQEEERGRVYNYMNAVERDLAALRQGMGLSRRSSTSSEPTPTVKTLIKSFDSASQVPNPAAAAIPRTPLSPSPMKTPPAAAVSPMQRHSISGPISTSKPLTALSDKRPNYGEIPVQEHLLRTSSASRPASLPRVPAMESAKTLSVSRRSSEEVKRDISAQEGASPASLMAMGTTSPQLSLSSSPTASVTPTTRSRIREERKDPLSALAREYGGSKRNALLKWCQKKTEGYQRRNFMLAFQAAESVGIKSTLDINEMVRTERPDWQNVMLYVTAIYKYFET

SEQ ID NO: 89003 - DNA, 2820 bp, Artificial Sequence
  derived and/or modified sequence
gtgcccgaggccgtgagatggggctacttcatccccgagcagagccagttcgcctgcaagtgcatcaccaagagacagcccagaatgaagaaggccagcagaagcgtgggcagcgtgcccaaggtgagcgccatcagcaagacccagaccgccgagaagatcaagcccgagaacagcagcagcgccagcaccggcggcaagctggtgaagcccggcaccgccgccagcctgagcaagaccaagagcagcgacgacctgctggccggcatggccggcggcgtgaccgtgaccaacggcgtgaagggcaagaagagcacctgccccagcgccgcccccagcgccagcgcccccgccatgaccaccgtggagaacaagagcaagatcagcaccggcaccgccagcagcaccaagagaagcaccagcaccggcaacaaggagagcagcagcaccagagagagactgagagagagaaccagactgaaccagagcaagaagctgcccagcgccggccagggcgccaacgacatggccctggccaagagaagcagaagcagaaccgccaccgagtgcgacgtgagaatgagcaagagcaagagcgacaaccagatcagcgacagagccgccctggaggccaaggtgaaggacctgctgaccctggccaagaccaaggacgtggagatcctgcacctgagaaacgagctgagagacatgagagcccagctgggcatcaacgaggaccacagcgagggcgacgagaagagcgagaaggagaccatcatggcccaccagcccaccgacgtggagagcaccctgctgcagctgcaggagcagaacaccgccatcagagaggagctgaaccagctgaagaacgagaacagaatgctgaaggacagactgaacgccctgggcttcagcctggagcagagactggacaacagcgagaagctgttcggctaccagagcctgagccccgagatcacccccgacaaccagagcgacggcggcggcaccctgaccagcagcgtggagggcagcgcccccggcagcgtggaggacctgctgagccaggacgagaacaccctgatggaccaccagcacagcaacagcatggacaacctggacagcgagtgcagcgaggtgtaccagcccctgaccagcagcgacgacgccctggacgcccccagcagcagcgagagcgagggcatccccagcatcgagagaagcagaaagggcagcagcggcaacgccagcgaggtgagcgtggcctgcctgaccgagagaatccaccagatggaggagaaccagcacagcaccagcgaggagctgcaggccaccctgcaggagctggccgacctgcagcagatcacccaggagctgaacagcgagaacgagagactgggcgaggagaaggtgatcctgatggagagcctgtgccagcagagcgacaagctggagcacttcagcagacagatcgagtacttcagaagcctgctggacgagcaccacatcagctacgtgatcgacgaggacgtgaagagcggcagatacatggagctggagcagagatacatggacctggccgagaacgccagattcgagagagagcagctgctgggcgtgcagcagcacctgagcaacaccctgaagatggccgagcaggacaacaaggaggcccaggagatgatcggcgccctgaaggagagaagccaccacatggagagaatcatcgagagcgagcagaagggcaaggccgccctggccgccaccctggaggagtacaaggccaccgtggccagcgaccagatcgagatgaacagactgaaggcccagctggagaacgagaagcagaaggtggccgagctgtacagcatccacaacagcggcgacaagagcgacatccaggacctgctggagagcgtgagactggacaaggagaaggccgagaccctggccagcagcctgcaggaggacctggcccacaccagaaacgacgccaacagactgcaggacgccatcgccaaggtggaggacgagtacagagccttccaggaggaggccaagaagcagatcgaggacctgaacatgaccctggagaagctgagaagcgacctggacgagaaggagaccgagagaagcgacatgaaggagaccatcttcgagctggaggacgaggtggagcagcacagagccgtgaagctgcacgacaacctgatcatcagcgacctggagaacaccgtgaagaagctgcaggaccagaagcacgacatggagagagagatcaagaccctgcacagaagactgagagaggagagcgccgagtggagacagttccaggccgacctgcagaccgccgtggtgatcgccaacgacatcaagagcgaggcccaggaggagatcggcgacctgaagagaagactgcacgaggcccaggagaagaacgagaagctgaccaaggagctggaggagatcaagagcagaaagcaggaggaggagagaggcagagtgtacaactacatgaacgccgtggagagagacctggccgccctgagacagggcatgggcctgagcagaagaagcagcaccagcagcgagcccacccccaccgtgaagaccctgatcaagagcttcgacagcgccagccaggtgcccaaccccgccgccgccgccatccccagaacccccctgagccccagccccatgaagaccccccccgccgccgccgtgagccccatgcagatggagagcagcagcgtggcccacgccggcatgcagtggagagacctgggcagcctgcagcccctgccccccggcttcaagtag

SEQ ID NO: 89004 - DNA, 2370 bp, Artificial Sequence
  derived and/or modified sequence
atgaagaaggccagcagaagcgtgggcagcgtgcccaaggtgagcgccatcagcaagacccagaccgccgagaagatcaagcccgagaacagcagcagcgccagcaccggcggcaagctggtgaagcccggcaccgccgccagcctgagcaagaccaagagcagcgacgacctgctggccggcatggccggcggcgtgaccgtgaccaacggcgtgaagggcaagaagagcacctgccccagcgccgcccccagcgccagcgcccccgccatgaccaccgtggagaacaagagcaagatcagcaccggcaccgccagcagcaccaagagaagcaccagcaccggcaacaaggagagcagcagcaccagagagagactgagagagagaaccagactgaaccagagcaagaagctgcccagcgccggccagggcgccaacgacatggccctggccaagagaagcagaagcagaaccgccaccgagtgcgacgtgagaatgagcaagagcaagagcgacaaccagatcagcgacagagccgccctggaggccaaggtgaaggacctgctgaccctggccaagaccaaggacgtggagatcctgcacctgagaaacgagctgagagacatgagagcccagctgggcatcaacgaggaccacagcgagggcgacgagaagagcgagaaggagaccatcatggcccaccagcccaccgacgtggagagcaccctgctgcagctgcaggagcagaacaccgccatcagagaggagctgaaccagctgaagaacgagaacagaatgctgaaggacagactgaacgccctgggcttcagcctggagcagagactggacaacagcgagaagctgttcggctaccagagcctgagccccgagatcacccccgacaaccagagcgacggcggcggcaccctgaccagcagcgtggagggcagcgcccccggcagcgtggaggacctgctgagccaggacgagaacaccctgatggaccaccagcacagcaacagcatggacaacctggacagcgagtgcagcgaggtgtaccagcccctgaccagcagcgacgacgccctggacgcccccagcagcagcgagagcgagggcatccccagcatcgagagaagcagaaagggcagcagcggcaacgccagcgaggtgagcgtggcctgcctgaccgagagaatccaccagatggaggagaaccagcacagcaccagcgaggagctgcaggccaccctgcaggagctggccgacctgcagcagatcacccaggagctgaacagcgagaacgagagactgggcgaggagaaggtgatcctgatggagagcctgtgccagcagagcgacaagctggagcacttcagcagacagatcgagtacttcagaagcctgctggacgagcaccacatcagctacgtgatcgacgaggacgtgaagagcggcagatacatggagctggagcagagatacatggacctggccgagaacgccagattcgagagagagcagctgctgggcgtgcagcagcacctgagcaacaccctgaagatggccgagcaggacaacaaggaggcccaggagatgatcggcgccctgaaggagagaagccaccacatggagagaatcatcgagagcgagcagaagggcaaggccgccctggccgccaccctggaggagtacaaggccaccgtggccagcgaccagatcgagatgaacagactgaaggcccagctggagaacgagaagcagaaggtggccgagctgtacagcatccacaacagcggcgacaagagcgacatccaggacctgctggagagcgtgagactggacaaggagaaggccgagaccctggccagcagcctgcaggaggacctggcccacaccagaaacgacgccaacagactgcaggacgccatcgccaaggtggaggacgagtacagagccttccaggaggaggccaagaagcagatcgaggacctgaacatgaccctggagaagctgagaagcgacctggacgagaaggagaccgagagaagcgacatgaaggagaccatcttcgagctggaggacgaggtggagcagcacagagccgtgaagctgcacgacaacctgatcatcagcgacctggagaacaccgtgaagaagctgcaggaccagaagcacgacatggagagagagatcaagaccctgcacagaagactgagagaggagagcgccgagtggagacagttccaggccgacctgcagaccgccgtggtgatcgccaacgacatcaagagcgaggcccaggaggagatcggcgacctgaagagaagactgcacgaggcccaggagaagaacgagaagctgacctag

SEQ ID NO: 89005 - DNA, 3237 bp, Artificial Sequence
  derived and/or modified sequence
atgaagaaggccagcagaagcgtgggcagcgtgcccaaggtgagcgccatcagcaagacccagaccgccgagaagatcaagcccgagaacagcagcagcgccagcaccggcggcaagctggtgaagcccggcaccgccgccagcctgagcaagaccaagagcagcgacgacctgctggccggcatggccggcggcgtgaccgtgaccaacggcgtgaagggcaagaagagcacctgccccagcgccgcccccagcgccagcgcccccgccatgaccaccgtggagaacaagagcaagatcagcaccggcaccgccagcagcaccaagagaagcaccagcaccggcaacaaggagagcagcagcaccagagagagactgagagagagaaccagactgaaccagagcaagaagctgcccagcgccggccagggcgccaacgacatggccctggccaagagaagcagaagcagaaccgccaccgagtgcgacgtgagaatgagcaagagcaagagcgacaaccagatcagcgacagagccgccctggaggccaaggtgaaggacctgctgaccctggccaagaccaaggacgtggagatcctgcacctgagaaacgagctgagagacatgagagcccagctgggcatcaacgaggaccacagcgagggcgacgagaagagcgagaaggagaccatcatggcccaccagcccaccgacgtggagagcaccctgctgcagctgcaggagcagaacaccgccatcagagaggagctgaaccagctgaagaacgagaacagaatgctgaaggacagactgaacgccctgggcttcagcctggagcagagactggacaacagcgagaagctgttcggctaccagagcctgagccccgagatcacccccgacaaccagagcgacggcggcggcaccctgaccagcagcgtggagggcagcgcccccggcagcgtggaggacctgctgagccaggacgagaacaccctgatggaccaccagcacagcaacagcatggacaacctggacagcgagtgcagcgaggtgtaccagcccctgaccagcagcgacgacgccctggacgcccccagcagcagcgagagcgagggcatccccagcatcgagagaagcagaaagggcagcagcggcaacgccagcgaggtgagcgtggcctgcctgaccgagagaatccaccagatggaggagaaccagcacagcaccagcgaggagctgcaggccaccctgcaggagctggccgacctgcagcagatcacccaggagctgaacagcgagaacgagagactgggcgaggagaaggtgatcctgatggagagcctgtgccagcagagcgacaagctggagcacttcagcagacagatcgagtacttcagaagcctgctggacgagcaccacatcagctacgtgatcgacgaggacgtgaagagcggcagatacatggagctggagcagagatacatggacctggccgagaacgccagattcgagagagagcagctgctgggcgtgcagcagcacctgagcaacaccctgaagatggccgagcaggacaacaaggaggcccaggagatgatcggcgccctgaaggagagaagccaccacatggagagaatcatcgagagcgagcagaagggcaaggccgccctggccgccaccctggaggagtacaaggccaccgtggccagcgaccagatcgagatgaacagactgaaggcccagctggagaacgagaagcagaaggtggccgagctgtacagcatccacaacagcggcgacaagagcgacatccaggacctgctggagagcgtgagactggacaaggagaaggccgagaccctggccagcagcctgcaggaggacctggcccacaccagaaacgacgccaacagactgcaggacgccatcgccaaggtggaggacgagtacagagccttccaggaggaggccaagaagcagatcgaggacctgaacatgaccctggagaagctgagaagcgacctggacgagaaggagaccgagagaagcgacatgaaggagaccatcttcgagctggaggacgaggtggagcagcacagagccgtgaagctgcacgacaacctgatcatcagcgacctggagaacaccgtgaagaagctgcaggaccagaagcacgacatggagagagagatcaagaccctgcacagaagactgagagaggagagcgccgagtggagacagttccaggccgacctgcagaccgccgtggtgatcgccaacgacatcaagagcgaggcccaggaggagatcggcgacctgaagagaagactgcacgaggcccaggagaagaacgagaagctgaccaaggagctggaggagatcaagagcagaaagcaggaggaggagagaggcagagtgtacaactacatgaacgccgtggagagagacctggccgccctgagacagggcatgggcctgagcagaagaagcagcaccagcagcgagcccacccccaccgtgaagaccctgatcaagagcttcgacagcgccagccaggtgcccaaccccgccgccgccgccatccccagaacccccctgagccccagccccatgaagaccccccccgccgccgccgtgagccccatgcagagacacagcatcagcggccccatcagcaccagcaagcccctgaccgccctgagcgacaagagacccaactacggcgagatccccgtgcaggagcacctgctgagaaccagcagcgccagcagacccgccagcctgcccagagtgcccgccatggagagcgccaagaccctgagcgtgagcagaagaagcagcgaggaggtgaagagagacatcagcgcccaggagggcgccagccccgccagcctgatggccatgggcaccaccagcccccagctgagcctgagcagcagccccaccgccagcgtgacccccaccaccagaagcagaatcagagaggagagaaaggaccccctgagcgccctggccagagagtacggcggcagcaagagaaacgccctgctgaagtggtgccagaagaagaccgagggctaccagagaagaaacttcatgctggccttccaggccgccgagagcgtgggcatcaagagcaccctggacatcaacgagatggtgagaaccgagagacccgactggcagaacgtgatgctgtacgtgaccgccatctacaagtacttcgagacctag

SEQ ID NO: 89006 - DNA, 2820 bp, Artificial Sequence
  derived and/or modified sequence
gtacctgaagcagtcaggtggggatatttcatccctgagcaatctcaatttgcctgtaagtgtattaccaaacggcagccgcggatgaaaaaggcctcaaggtctgtgggtagcgtgccaaaggtttctgccatcagcaagacccagactgccgagaagattaaacctgagaatagtagctccgcatcaactgggggcaaacttgtgaagccagggaccgccgcctccttatccaagactaaaagttccgacgacctcttagcgggcatggctgggggagtaaccgtgacaaatggagtcaagggcaaaaagtctacatgcccctctgccgccccttccgcatctgccccagctatgaccaccgtggagaacaaaagtaaaatctccacaggaacagccagttcaaccaagaggagtacctccacgggtaataaagagtcctcatccacgcgagagaggcttcgggagcgcaccaggcttaatcagtccaagaaacttccaagtgccggccagggtgctaatgatatggccctggctaagcgttcccgaagccgcaccgctaccgagtgtgacgttagaatgagcaaatctaaaagcgacaatcagatttccgatagagctgcgttagaagctaaggtgaaggatctgctgacactagccaagacaaaggatgtcgagattctccatctgcggaacgaactcagggatatgcgcgctcagctgggcattaatgaggatcacagtgagggagatgaaaaatccgagaaggaaactataatggcccaccagcccacagatgttgagagcacattgctgcagttgcaggagcagaataccgcgatccgtgaggagctaaatcagctgaaaaacgagaacagaatgttaaaagatagactcaatgctctgggattttcccttgagcagcgactagataactccgagaaactttttggctaccagagtctgtccccagaaatcacccccgataaccagagcgatggcgggggtactctaacctcaagcgtggaggggtctgcccctggttctgtggaggacttgctgtcccaagatgaaaatacgctgatggatcatcagcattccaatagcatggataatctcgattctgagtgctcggaggtgtatcaaccactgacctctagcgacgacgctctggacgccccgtctagcagtgaatctgagggaatacccagcatcgagcggtcaaggaagggttcaagtggcaatgccagtgaagtgtccgtggcctgtcttactgagaggatacatcaaatggaagagaatcagcacagcacttccgaggaactgcaggccacacttcaggagctggcagaccttcaacagatcacccaagagctgaacagcgaaaatgaacggttaggcgaggaaaaggtaattttgatggaatctttgtgtcaacagtcagacaaattagagcactttagtagacagatcgagtacttccgctctctgttagatgaacaccatatctcctacgtgatcgatgaggatgttaaaagcgggagatatatggaactggaacagcgttatatggatctggcggagaacgcgaggtttgaacgggaacagctattaggggtgcagcagcatctgtccaatacgctcaagatggcagagcaagataacaaggaggcgcaggaaatgatcggcgctctgaaggagaggagtcatcacatggaacgcataatcgaaagcgagcagaagggtaaggctgctctggctgctacgctcgaggagtataaagccaccgtggcctcagaccaaattgagatgaatcgcctgaaggcccagctcgagaacgagaagcagaaggtggcggagctctacagcattcacaactctggagataagagtgacatccaggacttgctggagtccgtgcggctggataaggaaaaggctgagacgctggcctcctccctgcaagaagaccttgctcatactcgtaatgacgcaaataggctacaggacgcaatcgctaaagtggaggatgaatatcgagcttttcaggaggaagcaaagaagcagattgaagatctaaacatgaccttggagaaattaaggtccgacctggacgagaaagaaactgagcggagcgacatgaaggaaacgatctttgagctggaggatgaggtcgaacagcatcgggccgtcaaattgcatgataatctcataatctcagatctcgagaataccgtcaagaagctgcaagatcaaaagcacgacatggagagggagataaagacactacaccgtcggctgagggaggagagtgctgagtggagacaattccaggccgacctccagactgcggtggtgattgcgaacgatataaagagtgaggcgcaggaagagatcggggacctcaagcgccgcctgcacgaagcccaggaaaaaaacgaaaagctgacaaaggaattagaagagatcaagagtagaaagcaggaggaggaaaggggtcgggtgtataattacatgaacgccgtggaaagggacctggcagccctgcgacagggcatgggcctatcccggcggtcaagtaccagtagtgagccaacccccaccgtcaaaaccctgattaagtcattcgattctgccagtcaggttccaaatcctgccgctgccgctattcccagaacacctctgtccccctctcctatgaaaacaccgccggcagccgccgtgtcacctatgcagatggagtccagctcagtggcccatgcagggatgcaatggcgtgatcttggaagtctccagcctctccccccaggatttaaatag

SEQ ID NO: 89007 - DNA, 2370 bp, Artificial Sequence
  derived and/or modified sequence
atgaagaaagcttcccgctcagttggctcggttcccaaagtaagcgcgatttcaaagactcaaacagctgaaaagatcaagcccgaaaattcaagctccgctagcaccgggggcaaactcgtgaaacctggtaccgcagcgtcactatctaaaaccaaaagcagtgacgacctactcgccggcatggctggaggggtgaccgtcaccaacggagtgaaaggaaagaagagcacatgtccgtctgctgctccgagtgcctctgctcctgccatgaccactgtggaaaataagtctaagatctctaccgggaccgcctccagcacgaaacggtccaccagcacgggtaacaaagagagcagctcaaccagggaaagactcagggagaggacacggctgaatcaatctaaaaagctgccctctgctgggcaaggagccaacgacatggctctggccaagcgctcccggagccggaccgccacggagtgcgatgttagaatgtccaagtctaaatcggataatcaaattagcgatagagccgccttagaagccaaagtgaaagatctactgaccttggcaaagaccaaagacgtggagatcctgcacctcaggaacgagttgcgcgacatgcgcgcacaacttggtattaatgaggaccattcagaaggcgatgaaaaatcggaaaaagagaccattatggcccatcaacccacagacgtcgaatctactcttttacaactccaagagcaaaacacagcgatccgagaggagcttaaccaacttaagaacgagaatcggatgctgaaggatcgcctgaatgcgttgggcttcagtttggagcaaaggctggacaattcagagaagctgttcggctatcagtcactgtctcccgagatcacaccagataatcagtccgacgggggggggacactgacctcatccgtggagggcagcgcccccggcagtgtggaggacctcctctcgcaggatgagaacaccctgatggaccatcagcatagtaacagtatggataacctggactcagagtgctctgaggtttatcagccgctgacctctagcgacgacgcactcgacgcaccatcatcctcggagtcggagggtatcccttccatcgaacggtctaggaaagggtcttccggaaatgctagcgaggtgtctgtcgcctgcctgactgagagaattcatcagatggaggaaaaccagcacagcactagtgaagagctgcaggcaaccttgcaagaattagcagacttacaacagatcacacaagagcttaactcagagaacgagagactgggagaggagaaggtgatcctcatggaaagcctgtgccagcagagtgataaacttgagcacttctctcgacagattgagtatttcaggagcttattggatgaacaccatatcagttatgtcattgacgaggatgtcaagagtggacgatatatggagttggagcagcgctacatggatttggcagagaatgcccgcttcgagagggaacaactgcttggggttcagcaacatctgagcaatacccttaagatggcggaacaggataacaaggaggcacaagaaatgattggcgcattaaaagaaaggtcgcaccacatggagagaatcatagagagcgaacaaaagggaaaggcagccctggcagcgacactcgaagagtacaaagctacagtggcttcggatcaaatcgaaatgaatagactcaaggcacagctggagaacgagaagcagaaggtggccgagctctacagcatacataactccggcgacaaaagcgatatccaggaccttttggagtcagttaggctggataaagaaaaggccgagacgctcgctagtagcttgcaggaagatctcgctcatacgaggaatgacgcgaacaggcttcaggacgctattgctaaggttgaggacgagtatagagcatttcaggaagaagcaaagaagcagatcgaagacctgaacatgaccctagagaaactcaggtctgatttagatgaaaaagagactgaaaggtctgacatgaaggagaccatcttcgagttagaggatgaagtggaacagcatagagccgtgaagctgcatgacaatctcattatcagtgacctcgagaacacagttaagaaacttcaggatcagaagcacgatatggaacgggagatcaaaaccttgcatcgccggcttcgggaggaaagcgcggaatggcgccagttccaagctgatctccagactgccgtggtgatcgcaaatgatatcaagtctgaagcacaggaagagataggcgatctcaaacgcaggctccacgaggcgcaggaaaaaaatgagaagctgacatag

SEQ ID NO: 89008 - DNA, 3237 bp, Artificial Sequence
  derived and/or modified sequence
atgaaaaaggccagtagatccgtaggatctgtccctaaggtgtccgccatttctaagacccaaaccgccgagaagatcaagcctgagaacagcagcagcgctagcacaggtggaaagctcgtgaaaccggggactgccgccagtctcagcaaaaccaaatcctctgacgacttgcttgccggcatggctggaggggtgaccgtcaccaatggtgttaagggaaaaaaatcaacatgcccatcagccgcacccagcgcaagtgctcccgccatgaccacagtggaaaacaagtccaagatttccaccggcactgcctcctccactaagcggagcacctctactgggaacaaggagagttctagtacacgcgagagattgcgtgaaaggacccggctaaaccagagcaagaagcttccaagcgcaggccagggggcgaatgacatggcgctggcgaaacgcagccgcagtaggacagccacggaatgcgacgtgcggatgagcaagagcaagtctgacaatcagatcagcgatcgggcagccctggaagcaaaggttaaggatctgttgaccctggctaaaacaaaagatgtggagatcctgcacctgcggaatgagttgagggatatgagggcccagctgggaattaacgaggaccattcggagggagacgagaaatcagagaaggagactataatggcacaccaaccaacagatgttgaatctaccttgttgcaactgcaagagcagaacactgctatccgagaggagctcaaccagttgaaaaacgagaaccggatgctgaaggataggttgaatgccttgggcttttccctcgaacagagactggacaactccgagaaactatttggataccagtccctgtctccagagatcacacccgataatcagagcgacggcggcggaacactgacctcatctgtggagggcagcgcaccaggctcggtcgaggatctgctgtctcaagatgagaacactctgatggatcaccagcattcaaacagcatggacaatttggatagcgaatgctccgaagtgtatcagcctctgacaagcagcgacgatgcacttgatgcccccagctcttccgagtcagaagggattccaagtatcgagagatctagaaagggttcatcgggaaacgcctcagaggttagcgtggcgtgtctgaccgagaggatccaccagatggaagaaaatcaacactctacaagcgaagagctgcaggccaccctccaggaactggccgacctacagcaaattacccaagagctgaatagtgagaatgagcgcctcggggaggagaaggtcatcctgatggagtccctgtgtcaacagtccgacaaattggagcacttttcacgccagattgagtattttagaagccttctggacgaacaccacatatcctatgtaattgatgaagatgtcaagtccgggagatatatggaattagagcagaggtacatggacttggctgaaaacgcccggttcgagcgtgagcagctcttaggggtccaacagcatttgtcaaataccttgaagatggctgagcaggataacaaagaggctcaggagatgattggcgccctcaaggagaggagtcaccatatggagcggataattgaatccgaacagaagggaaaagctgccttagcggcaacccttgaggagtacaaagccactgtggctagcgaccaaattgagatgaaccggttaaaggcgcaattggagaatgagaagcagaaggttgccgagctatacagcatccataattcaggtgacaagagcgatattcaagacctcctagagtcagtgagactcgataaggagaaagcagagactctggcgagcagcctgcaagaggacctggcccacaccaggaacgatgcaaatcggctccaggatgccatcgctaaggttgaggacgagtaccgcgcatttcaggaggaggccaagaagcagatcgaggaccttaatatgacacttgagaagctgagatccgatctagatgagaaggagactgagcgatccgacatgaaagagacaatctttgaacttgaggacgaggtcgaacagcaccgcgctgtgaagctacacgacaatttaatcatctcagatcttgagaacaccgtcaagaaactgcaagaccagaagcacgacatggaacgcgaaataaaaacattgcatcgcagattgcgggaggagagcgctgaatggaggcagttccaggccgatctccagactgccgtagtgattgctaacgacattaagtcagaagcccaggaggagattggagatctgaagcgaagactgcatgaggcccaggagaaaaacgaaaaactcaccaaggaacttgaggagatcaagtctagaaagcaagaagaggaaagaggcagagtgtacaactacatgaatgccgtagagagggacttggcagccctcagacaggggatgggtctgtctagacgaagcagcacgagcagcgaaccaaccccaacagtgaagactttgattaagtcgttcgacagtgcttctcaggtccccaaccctgctgccgccgctattccaaggactcccctgagcccatctcctatgaagactcctcccgcagccgctgtgagccctatgcagcgccattctatcagtgggcctatttcaaccagcaaacccctgaccgccctcagtgataagcggcccaattatggcgagattcctgtacaggagcatctcctgagaaccagcagtgcctctaggcctgcctcactgcctagagtgccggccatggagtccgctaagacattgtcagtgtcaaggcgctccagcgaggaagtgaaacgggacatctctgcccaggaaggcgcttctcccgcctctttgatggctatgggcaccactagccctcagctgtcactgtcttctagccccacggccagtgtcacccccacaacaaggagcagaatcagagaagagagaaaagaccctctcagcgcacttgcaagagagtacggcggcagtaagcgcaacgcactcctgaagtggtgccaaaaaaagacagaaggctaccagagacgcaactttatgctggcgtttcaagcagccgagtcagttgggattaagagcaccttggatatcaacgagatggttcgcacggaacggccagactggcagaatgtcatgctatacgtcacagcaatttataagtactttgaaacatag

SEQ ID NO: 89009 - DNA, 2820 bp, Artificial Sequence
  derived and/or modified sequence
gtgcctgaggccgtgcgctggggctacttcatccctgagcagagccagtttgcctgcaagtgcatcaccaagaggcagcccaggatgaagaaggccagccgctctgtgggctctgtgcccaaggtgtctgccatcagcaagacccagacagctgagaagatcaagccagagaacagcagcagcgccagcactggaggcaagctggtgaagccaggcacagctgccagcctgagcaagaccaagagcagtgatgacctgctggccggcatggccggcggcgtgacagtgaccaacggggtgaagggcaagaagagcacctgccccagcgctgcccccagcgccagcgccccagccatgaccaccgtggagaacaagagcaagatcagcactggaacagccagcagcaccaagaggagcaccagcacaggcaacaaggagagcagcagcacccgggagcggctgcgggagaggacccggctgaaccagagcaagaagctgcccagcgctggccagggcgccaatgacatggccctggccaagaggagccgcagcaggacagccacagaatgtgatgtgaggatgagcaagagcaagagtgacaaccagatcagtgacagagctgccctggaggccaaggtgaaggacctgctgaccctggccaagaccaaggatgtggagatcctgcacctgagaaatgagctgcgggacatgagggcccagctgggcatcaatgaagaccacagtgaaggagatgagaagtctgagaaggagaccatcatggcccaccagcccacagatgtggagagcaccctgctgcagctgcaggagcagaacacagccatccgggaggagctgaaccagctgaagaatgaaaataggatgctgaaggaccggctgaatgccctgggcttcagcctggagcagaggctggacaacagcgagaagctgtttggctaccagagcctgagccctgagatcaccccagacaaccagagtgatggcggcggcaccctgaccagctctgtggagggcagcgcccctggctctgtggaggacctgctgagccaggatgagaacaccctgatggaccaccagcacagcaacagcatggacaacctggacagcgagtgcagcgaggtgtaccagcccctgaccagcagtgatgatgccctggatgcccccagcagcagcgagagcgagggcatccccagcattgaaagaagcaggaagggcagcagtggaaatgccagcgaggtgtctgtggcctgcctgacagagcgcatccaccagatggaggagaaccagcacagcaccagcgaggagctgcaggccaccctgcaggagctggccgacctgcagcagatcacccaggagctgaacagtgaaaatgaaaggctgggggaggagaaggtgatcctgatggagagcctgtgccagcagagcgacaagctggagcacttcagccggcagatcgagtacttccgcagcctgctggatgagcaccacatctcctatgtgattgatgaagatgtgaagagcggccgctacatggagctggagcagcgctacatggacctggccgagaatgccaggtttgagcgggagcagctgctgggcgtgcagcagcacctgagcaacaccctgaagatggccgagcaggacaacaaggaggcccaggagatgattggagccctgaaggagaggagccaccacatggagcgcatcatcgagagcgagcagaagggcaaggccgccctggccgccaccctggaggagtacaaggccaccgtggccagtgaccagatcgagatgaaccggctgaaggcccagctggagaatgagaagcagaaggtggccgagctgtacagcatccacaacagcggggacaagagtgacatccaggacctgctggagagcgtgcggctggacaaggagaaggccgagaccctggccagcagcctgcaggaggacctggcccacaccagaaatgatgccaaccggctgcaggatgccatcgccaaggtggaggatgagtaccgggccttccaggaggaggccaagaagcagatcgaggacctgaacatgaccctggagaagctgcggagtgacctggatgagaaggagacagagaggagtgacatgaaggagaccatctttgagctggaggatgaggtggagcagcacagagctgtgaagctgcatgacaacctgatcatcagtgacctggagaacacagtgaagaagctgcaggaccagaagcatgacatggagcgggagatcaagaccctgcaccggcggctgcgggaggagagcgctgagtggaggcagttccaggccgacctgcagacagctgtggtgattgccaatgacatcaagtctgaggcccaggaggagattggagacctgaagaggcggctgcacgaggcccaggagaagaatgagaagctgaccaaggagctggaggagatcaagagcaggaagcaggaggaggagcggggccgggtgtacaactacatgaatgctgtggagcgggacctggccgccctgcggcagggcatgggcctgagcagaagaagcagcaccagcagcgagcccacccccaccgtgaagaccctcatcaagagctttgacagcgccagccaggtgcccaacccagctgctgctgccatccccaggacccccctgagccccagccccatgaagaccccacctgctgctgctgtgagccccatgcagatggagagcagctctgtggcccatgctggcatgcagtggagggacctgggcagcctgcagcccctgcccccaggcttcaagtag

SEQ ID NO: 89010 - DNA, 2370 bp, Artificial Sequence
  derived and/or modified sequence
atgaagaaggccagccgctctgtgggctctgtgcccaaggtgtctgccatcagcaagacccagacagctgagaagatcaagccagagaacagcagcagcgccagcactggaggcaagctggtgaagccaggcacagctgccagcctgagcaagaccaagagcagtgatgacctgctggccggcatggccggcggcgtgacagtgaccaacggggtgaagggcaagaagagcacctgccccagcgctgcccccagcgccagcgccccagccatgaccaccgtggagaacaagagcaagatcagcactggaacagccagcagcaccaagaggagcaccagcacaggcaacaaggagagcagcagcacccgggagcggctgcgggagaggacccggctgaaccagagcaagaagctgcccagcgctggccagggcgccaatgacatggccctggccaagaggagccgcagcaggacagccacagaatgtgatgtgaggatgagcaagagcaagagtgacaaccagatcagtgacagagctgccctggaggccaaggtgaaggacctgctgaccctggccaagaccaaggatgtggagatcctgcacctgagaaatgagctgcgggacatgagggcccagctgggcatcaatgaagaccacagtgaaggagatgagaagtctgagaaggagaccatcatggcccaccagcccacagatgtggagagcaccctgctgcagctgcaggagcagaacacagccatccgggaggagctgaaccagctgaagaatgaaaataggatgctgaaggaccggctgaatgccctgggcttcagcctggagcagaggctggacaacagcgagaagctgtttggctaccagagcctgagccctgagatcaccccagacaaccagagtgatggcggcggcaccctgaccagctctgtggagggcagcgcccctggctctgtggaggacctgctgagccaggatgagaacaccctgatggaccaccagcacagcaacagcatggacaacctggacagcgagtgcagcgaggtgtaccagcccctgaccagcagtgatgatgccctggatgcccccagcagcagcgagagcgagggcatccccagcattgaaagaagcaggaagggcagcagtggaaatgccagcgaggtgtctgtggcctgcctgacagagcgcatccaccagatggaggagaaccagcacagcaccagcgaggagctgcaggccaccctgcaggagctggccgacctgcagcagatcacccaggagctgaacagtgaaaatgaaaggctgggggaggagaaggtgatcctgatggagagcctgtgccagcagagcgacaagctggagcacttcagccggcagatcgagtacttccgcagcctgctggatgagcaccacatctcctatgtgattgatgaagatgtgaagagcggccgctacatggagctggagcagcgctacatggacctggccgagaatgccaggtttgagcgggagcagctgctgggcgtgcagcagcacctgagcaacaccctgaagatggccgagcaggacaacaaggaggcccaggagatgattggagccctgaaggagaggagccaccacatggagcgcatcatcgagagcgagcagaagggcaaggccgccctggccgccaccctggaggagtacaaggccaccgtggccagtgaccagatcgagatgaaccggctgaaggcccagctggagaatgagaagcagaaggtggccgagctgtacagcatccacaacagcggggacaagagtgacatccaggacctgctggagagcgtgcggctggacaaggagaaggccgagaccctggccagcagcctgcaggaggacctggcccacaccagaaatgatgccaaccggctgcaggatgccatcgccaaggtggaggatgagtaccgggccttccaggaggaggccaagaagcagatcgaggacctgaacatgaccctggagaagctgcggagtgacctggatgagaaggagacagagaggagtgacatgaaggagaccatctttgagctggaggatgaggtggagcagcacagagctgtgaagctgcatgacaacctgatcatcagtgacctggagaacacagtgaagaagctgcaggaccagaagcatgacatggagcgggagatcaagaccctgcaccggcggctgcgggaggagagcgctgagtggaggcagttccaggccgacctgcagacagctgtggtgattgccaatgacatcaagtctgaggcccaggaggagattggagacctgaagaggcggctgcacgaggcccaggagaagaatgagaagctgacctag

SEQ ID NO: 89011 - DNA, 3237 bp, Artificial Sequence
  derived and/or modified sequence
atgaagaaggccagccgctctgtgggctctgtgcccaaggtgtctgccatcagcaagacccagacagctgagaagatcaagccagagaacagcagcagcgccagcactggaggcaagctggtgaagccaggcacagctgccagcctgagcaagaccaagagcagtgatgacctgctggccggcatggccggcggcgtgacagtgaccaacggggtgaagggcaagaagagcacctgccccagcgctgcccccagcgccagcgccccagccatgaccaccgtggagaacaagagcaagatcagcactggaacagccagcagcaccaagaggagcaccagcacaggcaacaaggagagcagcagcacccgggagcggctgcgggagaggacccggctgaaccagagcaagaagctgcccagcgctggccagggcgccaatgacatggccctggccaagaggagccgcagcaggacagccacagaatgtgatgtgaggatgagcaagagcaagagtgacaaccagatcagtgacagagctgccctggaggccaaggtgaaggacctgctgaccctggccaagaccaaggatgtggagatcctgcacctgagaaatgagctgcgggacatgagggcccagctgggcatcaatgaagaccacagtgaaggagatgagaagtctgagaaggagaccatcatggcccaccagcccacagatgtggagagcaccctgctgcagctgcaggagcagaacacagccatccgggaggagctgaaccagctgaagaatgaaaataggatgctgaaggaccggctgaatgccctgggcttcagcctggagcagaggctggacaacagcgagaagctgtttggctaccagagcctgagccctgagatcaccccagacaaccagagtgatggcggcggcaccctgaccagctctgtggagggcagcgcccctggctctgtggaggacctgctgagccaggatgagaacaccctgatggaccaccagcacagcaacagcatggacaacctggacagcgagtgcagcgaggtgtaccagcccctgaccagcagtgatgatgccctggatgcccccagcagcagcgagagcgagggcatccccagcattgaaagaagcaggaagggcagcagtggaaatgccagcgaggtgtctgtggcctgcctgacagagcgcatccaccagatggaggagaaccagcacagcaccagcgaggagctgcaggccaccctgcaggagctggccgacctgcagcagatcacccaggagctgaacagtgaaaatgaaaggctgggggaggagaaggtgatcctgatggagagcctgtgccagcagagcgacaagctggagcacttcagccggcagatcgagtacttccgcagcctgctggatgagcaccacatctcctatgtgattgatgaagatgtgaagagcggccgctacatggagctggagcagcgctacatggacctggccgagaatgccaggtttgagcgggagcagctgctgggcgtgcagcagcacctgagcaacaccctgaagatggccgagcaggacaacaaggaggcccaggagatgattggagccctgaaggagaggagccaccacatggagcgcatcatcgagagcgagcagaagggcaaggccgccctggccgccaccctggaggagtacaaggccaccgtggccagtgaccagatcgagatgaaccggctgaaggcccagctggagaatgagaagcagaaggtggccgagctgtacagcatccacaacagcggggacaagagtgacatccaggacctgctggagagcgtgcggctggacaaggagaaggccgagaccctggccagcagcctgcaggaggacctggcccacaccagaaatgatgccaaccggctgcaggatgccatcgccaaggtggaggatgagtaccgggccttccaggaggaggccaagaagcagatcgaggacctgaacatgaccctggagaagctgcggagtgacctggatgagaaggagacagagaggagtgacatgaaggagaccatctttgagctggaggatgaggtggagcagcacagagctgtgaagctgcatgacaacctgatcatcagtgacctggagaacacagtgaagaagctgcaggaccagaagcatgacatggagcgggagatcaagaccctgcaccggcggctgcgggaggagagcgctgagtggaggcagttccaggccgacctgcagacagctgtggtgattgccaatgacatcaagtctgaggcccaggaggagattggagacctgaagaggcggctgcacgaggcccaggagaagaatgagaagctgaccaaggagctggaggagatcaagagcaggaagcaggaggaggagcggggccgggtgtacaactacatgaatgctgtggagcgggacctggccgccctgcggcagggcatgggcctgagcagaagaagcagcaccagcagcgagcccacccccaccgtgaagaccctcatcaagagctttgacagcgccagccaggtgcccaacccagctgctgctgccatccccaggacccccctgagccccagccccatgaagaccccacctgctgctgctgtgagccccatgcagaggcacagcatcagcggccccatcagcaccagcaagcccctgacagccctgagtgacaagaggcccaactacggggagatccctgtgcaggagcacctgctgcggaccagcagcgccagcaggcctgccagcctgccccgggtgcctgccatggagagcgccaagaccctgtctgtgtccagaagaagcagcgaggaggtgaagagggacatcagcgcccaggagggcgccagccctgccagcctgatggccatgggcaccaccagcccccagctgagcctgagcagcagccccacagcctctgtgacccccaccaccaggagccgcatccgggaggagaggaaggaccccctgagcgccctggcccgggagtatggaggcagcaagagaaatgccctgctgaagtggtgccagaagaagacagagggctaccagaggaggaacttcatgctggccttccaggccgctgagagcgtgggcatcaagagcaccctggacatcaatgagatggtgaggacagagaggccagactggcagaatgtgatgctgtatgtgacagccatctacaagtactttgagacctag

SEQ ID NO: 89012 - DNA, 2820 bp, Artificial Sequence
  derived and/or modified sequence
gtgcccgaggccgtgcggtggggctacttcatccccgagcagagccaattcgcttgcaaatgcattactaaaaggcagcctcggatgaaaaaggccagcagaagcgtgggatcggtgcccaaggtgtccgctattagtaagacccagactgccgagaagatcaaaccagagaactctagtagcgctagtaccgggggcaagctagtcaagcctggaacagcagctagtttaagcaagacaaaatccagcgacgacctactggcgggaatggccggcggcgtgaccgtgacaaatggtgtgaagggtaaaaagtctacctgcccatcagctgctccctccgccagcgcgcctgccatgaccacagttgagaataaatctaagatcagcactggtacggcaagcagcacgaagagatcgacatcaacaggaaacaaggaatcctcaagcacaagggaacgactccgcgagcgcacaagactgaatcagtccaagaaactcccatcggccgggcaaggcgccaacgatatggccctcgccaaaaggtctcggtcgcgcacagcaactgaatgcgatgtaagaatgagtaagagtaaatccgacaaccagatttctgacagagctgcactggaggctaaagtgaaggatctgcttactctcgcaaaaaccaaggatgtggagattctgcacctgcgcaacgagcttagagacatgagagctcagctcggaataaatgaggaccattccgagggggatgagaagtcggaaaaggagacaataatggcccaccagcccactgatgtcgaatccacgctcctgcagctgcaagagcagaacaccgcaatccgagaggagctaaaccagctaaaaaatgaaaatcgcatgctgaaggataggctgaatgctttagggttctctctcgagcagagactggataacagcgaaaaattattcgggtaccaaagcctctctcctgaaataactccagataatcagtccgatggaggaggcacactgacttcttccgtggaggggtcagctcccggaagtgtggaggacctgctgtctcaggatgagaacacacttatggatcaccagcattccaatagcatggataatctggactcggagtgtagcgaggtgtatcagccccttacctcttctgacgatgccctcgatgccccaagctcaagtgagtctgaaggaatccccagcatcgagcggtcaagaaaaggcagtagcgggaatgcgagcgaagtgagcgtagcatgtttgaccgaaagaatccaccaaatggaggagaaccaacactccacatcggaggagctccaggcgacactccaggaacttgcggatctgcaacaaattacacaggaactcaacagcgaaaatgagcgcctgggggaagagaaagtgatcctcatggaaagtctgtgccagcagagcgacaagttggagcacttttcccggcagattgaatactttagatctctactcgacgagcatcacatctcctatgtcattgatgaggatgtgaagtcaggccgatacatggagcttgaacagcgctatatggacctggcagagaacgccaggtttgagcgcgagcagctcctgggagtgcaacaacatctgtcaaatactttaaagatggccgagcaggacaacaaggaggcccaggagatgatcggagccctgaaggaacgatcccatcatatggaaagaattatcgaatcagagcaaaaagggaaggctgccctggcagccactctggaggaatataaagctaccgtggcgagtgatcaaattgagatgaataggctcaaggctcaattggaaaacgaaaagcagaaagtggctgagctctatagtatccataacagtggtgataagtccgatatccaggacctgttggaaagcgttcgattggacaaggaaaaagcagagacactcgcatcatctcttcaggaagatctagcacataccagaaatgatgccaatcggttgcaggatgcgattgccaaagttgaggatgaatacagggccttccaggaggaagctaagaagcagatagaggaccttaatatgactcttgagaagctgagatctgacctggacgagaaggaaaccgagaggagtgatatgaaggagactatcttcgagctggaagatgaagtggaacagcaccgagccgtcaaactgcacgataacctgatcatctcagatctcgaaaacaccgtgaaaaaactccaggatcaaaagcatgacatggaacgagaaataaagaccttgcacaggagactcagagaggagtctgctgaatggcggcagtttcaagcggacttgcaaaccgccgtcgttatcgctaacgatattaagtccgaggcacaggaagagatcggtgacctgaagcggcggctccacgaagcccaagagaaaaacgaaaagctcactaaagaactcgaagagattaaaagccggaaacaggaggaggaacggggccgagtgtataattatatgaatgccgttgagcgcgatctggctgcgttaagacagggcatgggcctgtcacggaggagtagtactagctcagaaccgactcccacagtgaaaactcttatcaaaagctttgattcagccagccaggtaccgaacccagccgccgcagctatccctagaaccccgctgtccccatcccctatgaaaactccacctgcagctgccgtctcgcctatgcagatggagagttcctctgttgcacatgctggcatgcaatggcgcgatctggggagcctccagcccctgcctccaggattcaagtag

SEQ ID NO: 89013 - DNA, 2370 bp, Artificial Sequence
  derived and/or modified sequence
atgaagaaggccagccggagcgtgggcagcgtgcccaaggtgagcgctattagcaagactcagactgcagaaaagatcaagcctgagaattcctcgtcagcctcgaccggggggaagttggtgaaaccgggcactgctgcatcactgtcgaagacaaagagtagcgacgacctccttgcgggcatggcgggcggcgtgacagtgacaaatggggtcaagggcaagaaatcaacctgtccctcagctgccccgtcagcgagcgctccagcgatgacgaccgtcgaaaataaaagcaagatatccactggcaccgctagctctactaagagatccacgtctaccggcaacaaggagtcctcctctacacgagagaggcttagagaacgaacacgcctgaaccagtccaagaagctgccttccgccggacagggggccaacgacatggcgttggctaaaaggagccggtcgcgtaccgccaccgagtgcgacgtgaggatgagcaaaagcaaaagcgataaccagatcagtgaccgtgcagccctcgaagcgaaagttaaggatctcctgactttggccaaaaccaaagacgtggaaatcctacaccttagaaacgagttaagagacatgcgggcccaattgggtattaatgaggatcatagcgaaggtgacgagaagagcgaaaaggagactattatggcccatcagcccactgatgtcgagagtaccctgctccagctgcaagaacagaacacggcaatcagagaggagctaaaccagctaaagaacgaaaatcgcatgctgaaagaccggttaaacgctctgggattctctctggaacagaggctggataactcagagaagctgttcggctaccaatcacttagtcccgagataactcccgataatcagagcgacggggggggcactctgacctctagtgtcgagggctctgcgcccgggagtgtggaagatcttttgagccaggatgagaatacgctgatggaccatcagcactcaaatagcatggataacctggactcagagtgttccgaggtttatcagcccttgacatctagtgatgatgccttggacgccccatcatcctccgagagcgaaggtataccctctattgaacggtcaaggaagggctcatctggcaatgccagtgaggtgagcgtggcttgccttacagaacgaatccaccagatggaagagaatcagcactctaccagtgaagagctgcaggcgactctgcaagaactcgctgatctgcagcagattacccaggagcttaattcagaaaacgaacgcctgggcgaagagaaagttattttaatggagagcttatgccagcagtccgacaaacttgagcattttagcaggcagatcgagtattttcgcagcttactggatgagcatcacattagctacgtgatagacgaggatgtcaaatccgggcgctacatggaattggagcagaggtacatggatttagctgaaaacgcccggttcgagagggaacaactccttggtgtgcagcagcacctaagtaacactctcaagatggctgagcaggacaataaagaagcccaggagatgatcggtgcccttaaggagcgcagccatcatatggagagaatcatcgagtcagagcagaaaggcaaggcagccttagcagcaactctcgaagagtacaaggcaaccgtggccagcgatcagatcgagatgaatagattgaaggcgcaactggagaatgaaaaacagaaggtggccgaattgtatagcattcataacagcggagacaaatcagacattcaggatcttctggagtctgtgcgattggacaaggagaaagcggagacattagcctccagcctgcaggaagatctcgcacatacaaggaatgatgctaatcgactgcaggacgcaattgccaaggtcgaggatgagtatagagctttccaggaagaagcaaagaagcagatcgaagacttgaacatgaccctggagaagctgaggtctgacctcgatgaaaaagaaactgagcgctcagatatgaaggaaactatctttgaactggaggacgaggttgagcagcatcgggccgtgaaactacacgataatctgatcatcagcgacctggaaaacaccgtgaagaagctccaggaccagaaacacgatatggaaagggaaatcaagactcttcaccgtcggctgcgagaggaatctgctgagtggcggcaattccaggctgatctacagaccgccgtggtgatcgcaaatgacattaagtccgaggcccaggaggagattggggatctgaagcgcaggctgcacgaagcccaggagaagaacgaaaaattaacttag

SEQ ID NO: 89014 - DNA, 3237 bp, Artificial Sequence
  derived and/or modified sequence
atgaagaaggccagccggagcgtgggcagcgtgcccaaggtgagcgccattagcaagactcagacagcagagaagattaagcccgagaactcctcatctgcgtcgaccgggggcaaactggtcaaacccggaacagcagcttcactgtccaagaccaagagttctgatgacctcctggctggtatggctggaggcgtgaccgtcaccaacggcgtaaaggggaaaaaatccacctgcccaagcgcagctccatctgcttctgcccccgcaatgaccaccgtggagaataagtctaaaatttcaaccggaaccgcctccagtacaaaaaggtcaacctcgaccggaaacaaggagtcaagctccacaagagagcgtctgagagagaggacccgattgaaccagagcaagaaactgccctctgctggtcaaggcgccaatgatatggcattggctaaaaggtctcgtagtaggacagccaccgaatgcgacgtgcggatgagcaaaagtaagagcgataaccagattagcgaccgcgcagccttggaggcaaaggtcaaagacctcctgactttggccaaaacaaaagacgtggaaatccttcaccttaggaatgagctcagagacatgcgtgcgcagctcgggataaatgaggatcatagtgaaggagacgaaaaatctgaaaaggagactatcatggcacatcagccaactgacgtggagtctacactcctccagttgcaggaacagaatactgccattcgcgaggagctgaatcagttaaaaaacgaaaatcgcatgcttaaagaccggctgaatgcactgggctttagtttggaacagcgcctggataattcagagaagctctttggatatcagtcgctttcccccgaaattactcccgataaccagtctgacggggggggcaccttgacttcctctgttgagggtagtgcaccgggatctgtagaggacctactaagccaagatgagaacacgctgatggaccaccagcactctaatagcatggataatctcgactcagaatgttctgaggtataccagcccctcacctcctctgacgatgccctagatgcgccttccagttctgagagcgagggcatcccaagcattgaaagatctcgaaagggcagctctggaaatgccagtgaagtcagcgtcgcttgtctgacagaacggatacaccagatggaggagaaccagcattcgacatctgaagaactgcaggcaaccttgcaggagctggcagatttgcagcaaatcacacaggagttaaattccgaaaatgagcggctgggagaggaaaaagtcatcctgatggaaagcctgtgtcagcagtctgacaagctggaacattttagccgccaaattgaatatttccggagcctcctcgacgagcaccatataagttacgtaatagatgaggatgtgaaatctggacggtatatggagctcgaacaacgctacatggacctcgctgagaacgcaaggtttgagcgcgagcaactgctgggcgtgcagcaacacctcagcaatacactaaagatggccgagcaggacaacaaggaggcccaagagatgattggtgccctgaaggaaagatcacaccacatggagagaatcatcgagtccgaacagaaagggaaggctgcactggctgcgactctggaggagtacaaagccaccgtagcctcggaccagattgaaatgaatcggttaaaagctcaacttgagaatgagaaacagaaggtagcggaattgtattctattcataactctggagacaagtccgatatccaggatctccttgaatcggtgcgccttgacaaagaaaaggccgaaacgctcgcctcgtcgcttcaagaagacttggcacacactcgcaacgacgccaacagactgcaggatgccattgccaaggtggaagacgagtaccgagcatttcaggaggaggccaagaagcaaattgaggatctgaatatgacattggagaaacttagaagtgacctggacgaaaaagagactgagagatccgacatgaaagagacaattttcgaattggaggacgaagtggagcagcatagggcagtaaagctgcacgataatctcatcatctctgatctcgagaatacagtcaagaaactgcaagatcagaagcatgacatggagagagaaatcaaaaccttgcacagacggttgcgagaggaaagcgctgagtggcgtcaattccaggccgacctgcaaactgcagtcgtaattgcgaatgacattaaaagtgaggctcaagaggagattggagatctcaaacggaggctgcatgaagctcaggagaagaacgagaagctgaccaaagaacttgaagagattaaatcccgcaagcaggaggaggaacgcgggcgggtctataactatatgaacgcagtcgaacgcgacttggcagcacttcgccagggcatggggctcagtaggcgctcttcaacatctagtgaacctacgcctaccgtgaaaaccctgatcaaaagttttgattctgcctcacaggttcctaaccctgcagctgccgcaatccctcgcactcccctgagcccttctcctatgaagacccccccagccgcggccgtgtcccctatgcagcgccatagtataagcggaccaatctcaacctcaaagcccctgacagccttaagtgacaagagacctaactatggagagattccggtacaggaacacctgcttaggacaagcagtgcctctcgaccagcgtcccttcctcgcgtgcctgcaatggagtccgcaaagacgttgtcagtaagtagaagaagcagcgaggaagtaaagcgggatatctcagcccaggagggtgcatctccagcaagtctgatggccatggggacgacctcaccacagctgagcctaagcagcagccccactgcatcagtaaccccaacgacacgatcacgcatcagagaggaacgcaaggatccactttcggctctggccagggaatacgggggcagtaaaaggaatgctttgttgaagtggtgccagaagaagactgaaggatatcagcgccgaaacttcatgttagctttccaggcagcggagagcgtgggtatcaagagcaccctcgacattaacgagatggtgagaaccgagcggcctgactggcagaacgtgatgctatacgtaacagccatttataagtactttgaaacgtag

SEQ ID NO: 89015 - DNA, 2820 bp, Artificial Sequence
  derived and/or modified sequence
gtccccgaagccgtgcgatggggctatttcatacctgaacagtctcagttcgcctgtaagtgcatcacaaagcgccagccccgaatgaaaaaagcgtcccgtagtgtggggtctgtcccaaaggttagcgccatttccaaaacccaaaccgctgaaaaaatcaaacctgagaattccagctcagcaagcaccggagggaaattagttaagcctggtaccgccgctagcctgagcaaaaccaaatcttctgacgacctccttgctggcatggccggaggggtgacggttactaacggtgtcaaagggaagaagtctacctgcccgtcggccgctccatcagcttctgcacctgccatgaccaccgtcgaaaataagtcaaagatcagcactgggacagctagttcaaccaagcgtagcaccagcaccggaaacaaggagagttcatcaacacgggagcgtctccgagaaaggacacgcctgaaccaaagcaaaaagctgcctagcgctggtcagggcgcaaacgacatggcactagccaagagatcgcggtcgcgaacagcaacagagtgtgacgtgcgaatgagtaaaagcaagtccgacaaccaaatctctgacagggccgctctcgaagctaaggtgaaagacctgctcactttggcgaaaacaaaggacgtcgaaatccttcacctgagaaatgagcttcgcgatatgagagcacagctgggtataaatgaggatcatagtgagggcgacgaaaaaagcgagaaggagaccatcatggcacaccagcctaccgacgtcgagtccacattgctgcagctccaggaacagaacactgccatccgagaagagctcaaccaactgaagaatgagaacaggatgcttaaagaccgccttaatgcgctggggttctcattggagcagaggctggacaacagcgaaaagctgttcggttatcagtcgctgtcacccgaaatcactcctgataatcagagtgacggcggaggaacgctgaccagctccgtagagggaagtgccccaggttctgtggaggatctgctgagccaggacgagaacacactgatggatcatcagcatagcaactcgatggacaatctggattccgagtgttccgaggtttaccaaccattgacctcttccgatgatgcactggatgcccctagctcctctgagtccgaagggattccctccatagaaagatctcggaagggcagcagcggcaacgcttcagaagtaagcgtcgcctgcctgacagagcgaatccatcagatggaggaaaatcagcacagcacatccgaagaactacaggcgaccttgcaagagctagccgacctgcagcaaattactcaggagcttaattccgaaaatgagcggctgggagaggaaaaggtcatcctgatggaaagtctgtgccagcagtccgacaagctggagcacttcagtcggcagatcgaatacttccgaagccttctggacgaacatcatatatcttacgtgattgatgaagacgttaagtcaggacgctacatggagttggaacaaagatatatggaccttgccgagaatgctcgctttgagcgcgagcagctcttgggggttcagcagcatctcagtaatactctgaagatggcagaacaggacaataaggaggctcaagaaatgatcggcgctctcaaggaacgcagccatcatatggaaagaattatcgagagtgagcagaagggtaaagctgccctggccgcaacactggaggaatacaaagcgactgtggcctccgaccagatcgagatgaatcgcctgaaggctcaacttgagaacgaaaagcagaaggtcgccgagctgtacagtattcacaattcaggggataaaagtgatattcaagatctcctggaaagcgtcagactcgataaggaaaaggccgagactttagcttctagtctgcaggaggacctggctcacaccagaaatgatgcaaacagactccaggacgccatcgctaaagtggaagatgaataccgcgctttccaagaagaggccaaaaaacaaatcgaggatctgaacatgacactcgagaagctcaggtcagacttggacgaaaaggaaactgagagaagcgacatgaaagaaacaatcttcgagttagaagatgaggtagagcagcacagagctgtaaagctacatgataacctcattatttccgacctggagaacactgtgaaaaagttgcaggaccagaaacacgacatggaacgcgaaattaagactctacacaggagactgagggaggagtccgctgagtggagacagttccaggcagacctgcaaaccgccgtggtgattgccaacgacatcaagtccgaagcacaggaagaaattggggacctcaagcgccgactgcatgaggctcaggaaaaaaacgagaaactaaccaaggagttggaagagattaaaagtaggaaacaggaagaggagcgtggccgtgtctacaattacatgaacgctgttgaacgggaccttgctgccctgagacagggcatgggactgtcacggaggtcttcaaccagttccgagcctacacctacggtgaaaaccttgatcaagagtttcgatagtgctagccaggtaccaaatccagccgctgccgctatcccccgtactcctttgagtccatccccaatgaaaactccacctgcggcagccgtctccccaatgcagatggagtcatcctccgtggcccacgctggtatgcaatggagagatctcggatccctgcagcctcttccaccaggtttcaaatag

SEQ ID NO: 89016 - DNA, 2370 bp, Artificial Sequence
  derived and/or modified sequence
atgaaaaaggcaagtcgatctgtgggaagcgtccctaaagtttctgctatttccaaaacacagacagcagaaaagatcaagcctgagaattcttcatcagcttccacaggcggaaagttggtcaaacccggtacagccgctagcctgtccaaaacgaaaagtagtgacgatctccttgctggcatggctggcggtgtgacagtaacaaacggggttaagggtaaaaaaagcacttgtccgtctgcagccccttccgcctcagccccagccatgactacggtggagaataagagcaagatctccacagggacagcgagttcaaccaagaggagcacctcaaccggaaacaaagagagtagctctacccgcgaacgtctccgcgaacgaacacgcttaaatcagtctaaaaagctacctagtgctgggcagggggctaatgacatggctctggccaagcgcagtcggagccgtacagccactgaatgtgatgtgagaatgagcaagagcaagagcgacaaccagattagcgatagagctgcacttgaagccaaagtgaaggacctcctaacccttgccaagactaaggacgtagagatactgcacctgagaaacgagttgagagatatgcgtgcccagctgggcattaacgaagatcactccgagggggatgagaagagcgagaaggaaaccataatggcacaccaaccaaccgatgttgagagtaccttactgcaattgcaagagcagaacacagccattagagaagagctcaaccaactcaaaaatgagaataggatgttaaaggatcggttgaatgccttgggcttcagtctggaacagcgcctcgataattccgagaagctttttggctaccagtcgcttagcccagaaattacccctgacaatcagtccgatgggggaggcacactgacatcctcagtggaaggcagtgccccagggagcgttgaagatcttctatcccaagatgagaacaccctcatggaccaccaacactcaaactccatggataaccttgactccgagtgttccgaggtttatcagcctttgaccagcagcgatgatgcgctcgacgctccatcctcctctgaatcggaggggattcccagtattgagaggtctcgtaaaggatctagcggtaacgcctctgaggtctccgtcgcctgcctaactgagcgcattcaccaaatggaagagaaccagcattctacttctgaggagctgcaagccacactgcaggagctggcagaccttcagcagatcacccaagagttgaatagcgagaatgagagactgggggaggaaaaagtgatcctcatggagtccctctgccagcagtcagacaagctcgagcatttctccagacagatcgagtattttcggtctctgctggatgagcaccacatctcttatgtgatcgacgaagatgttaagagcggcaggtatatggaactggagcaacggtacatggacttggcagaaaatgctcgattcgaacgagaacagctactgggggtgcagcaacacctcagtaacacattgaaaatggcggaacaggataacaaagaggcgcaggaaatgatcggggcactcaaggaacgaagtcatcacatggagagaatcatagagtctgaacaaaaaggtaaagctgctctcgctgcaaccctggaagagtacaaagcaacggtggcatccgaccagattgagatgaacaggctgaaggcgcaactggaaaatgaaaagcagaaggtggctgagctgtactctatacataactctggcgacaaatccgatatccaggatctgttagagagtgtcagacttgacaaggaaaaggcggagacattagcatcctccctgcaagaagacttagcacatactcggaatgatgcaaatcgcctgcaggatgctattgctaaagtggaagacgaatatcgggcttttcaagaggaagcaaaaaaacagatcgaagaccttaacatgacgctggaaaagctgcggtcggatctcgatgaaaaagaaaccgaacggtctgacatgaaggaaacaattttcgagctggaagatgaggtcgaacagcaccgagcagtgaaactgcatgataatttgatcatttctgacctcgaaaatacagtgaaaaagttgcaggatcaaaagcacgacatggaaagggaaatcaaaacacttcaccgcagacttcgggaggagtcagccgagtggaggcagttccaggccgatctgcagactgcagtcgtgattgcaaacgacatcaagtccgaggcccaggaggaaattggggacctgaaaaggcgcctgcacgaagcacaagagaaaaacgagaagcttacctag

SEQ ID NO: 89017 - DNA, 3237 bp, Artificial Sequence
  derived and/or modified sequence
atgaagaaggcatctcgatcagtggggtctgtaccaaaagtttccgcaattagcaaaacgcagaccgccgagaagataaagcccgagaactcctcctcggccagtaccggaggaaaactggtgaagccgggaactgcggcttccctgtcaaagacgaaatcctcggacgacctacttgccggaatggccggtggagtgaccgtgactaatggcgtgaagggaaaaaaaagcacttgcccgagcgccgcacccagcgccagcgcccctgcaatgaccaccgtcgagaacaagtcaaagattagtacggggaccgcctcatccaccaaacggagcaccagcacgggaaacaaggaatccagcagcactcgtgagcggctgcgcgaaagaacacgactaaatcagagcaagaagctgcccagtgccggtcagggggctaatgacatggctctggccaaaagatctagatcacggaccgctacggagtgtgacgtcaggatgtccaaaagtaaatccgacaaccagatctccgacagggccgctctggaggccaaggtcaaggatttgctaactctcgcaaaaactaaggatgttgaaatcttacatctcagaaacgaattaagggacatgagggcacaattgggaattaacgaggaccattccgagggggacgagaagagcgagaaagagacgatcatggcacaccagcccaccgacgttgagtcaacactactgcagctgcaggagcagaacactgcgatccgggaggaactgaatcagttgaagaacgagaataggatgctgaaggaccgcttgaatgcacttggcttttctttagagcagaggctggacaatagtgaaaagctattcggataccaatcactgtcgcccgagattactcctgacaaccagagtgatggcggtggaaccctgacatcctcagtggagggctcagcgccagggagtgtggaggacctactgagccaggatgagaatacgctcatggatcatcaacactcaaactcgatggacaatctcgactccgagtgcagcgaagtgtaccagccacttacctcctccgatgacgcactcgacgccccttcctctagcgaatctgagggaatacccagcatcgagcgtagccggaaaggttcatccgggaacgctagtgaagtgtcagtggcatgcctgaccgagaggattcaccagatggaggaaaatcagcactcaacctctgaggagttgcaagctaccttgcaggagttggccgacctgcagcagatcactcaggagctgaactccgaaaacgaaagactgggcgaggaaaaggtgattttaatggagtctttgtgtcagcagagcgacaagttggaacacttcagtagacaaatcgagtactttcggagtcttctcgacgagcaccatatctcttatgtaattgatgaagacgtgaagtcaggaagatacatggagctggaacaaagatatatggatcttgccgagaatgcaagatttgagcgggaacaactactcggcgtgcagcaacatctctcaaacaccttgaagatggctgaacaggataacaaggaagcacaggaaatgatcggggctctcaaggagcgtagccaccacatggagcgcattatcgagagtgagcaaaaggggaaagctgctctggctgctacccttgaggaatacaaggccaccgtggcttcagaccagatcgaaatgaatcgtctgaaggcacagctggaaaatgagaaacaaaaggtggccgagctctattctatccataactcgggagataagagcgatatccaagacctcctggagtctgtcaggttggataaggagaaggctgagacattggcatcttctttacaggaagacctggcccacaccagaaatgatgctaaccggttacaggacgcgatcgcgaaggtcgaagacgaatacagggcttttcaggaggaagccaaaaagcagattgaggacctaaatatgacgctggaaaaactcagaagtgatttggatgaaaaagagaccgaacggtccgatatgaaggaaaccatcttcgagcttgaggatgaggtggagcagcaccgcgctgtaaaattacacgacaacctgataatctccgacttggaaaacactgttaaaaagttgcaagaccagaagcacgacatggaacgggagatcaagactttgcaccggaggcttagagaggagagtgccgaatggcggcagttccaggccgatctgcagaccgccgttgtaatcgcaaacgatattaagtcggaagcacaagaggagatcggagatctgaagcgtaggctccatgaagcccaggaaaagaacgaaaaactcactaaagaactggaagaaattaagagcaggaaacaggaggaggaacgaggcagggtctataactacatgaacgcagtggaaagagatctggcggcactgcggcaagggatgggcctgtctagaagatcatcaacaagctctgagccaacccccacagtgaaaactttaatcaagtctttcgattccgcgtcccaggtgccaaatccagcggctgccgcaatcccaagaaccccattatcaccttcccctatgaagacgcctcctgctgctgcagtcagcccaatgcagcggcattccatttccgggcctatcagcaccagtaagccacttactgccctgtcagataaacggccaaactacggtgagatccccgtccaggagcaccttctccgcacaagtagcgcgtcgaggcccgcaagcctcccacgggtgcctgcaatggaatccgcaaaaaccctttctgtttcaagaagaagctcagaggaggtcaaacgcgacattagcgcccaagagggcgcatctccagcttcactgatggctatggggacaaccagccctcagctctcactgtcttcatctcccacagcttccgtgacaccgacaactcgtagccgcattcgcgaggaaaggaaggatcctctatctgctctcgccagggaatatggtgggagtaaacggaacgcacttttaaaatggtgtcaaaagaagacagagggataccaacgccgtaatttcatgctcgcatttcaggctgcggagtctgttggaattaaatcgaccctagacatcaatgagatggttaggacagagcggcctgactggcaaaacgtgatgctgtatgtcaccgcaatctacaaatatttcgaaacgtag

SEQ ID NO: 89018 - DNA, 3043 bp, Artificial Sequence
  derived and/or modified sequence
ggccaagggcggggcccgcgagggaggccgggcggcccggcaagcggcgctgcggggtaggctgctttcctgaggccggactcaacgggtctcggctgagccaccgggtgagctcaccgcccagcccaaaccaggagattgcgagggagcgatgcggtgcagcgcgtgttcttggggaagatcccgactaagccattttccagtggcacctcttccatcatgagttcctgaggcagtccgatggggctactttattccagaacaatcacaatttgcttgtaaatgcatcacgaagaggcagcccagaatgaagaaagcaagcaggagtgttggctcagtgcctaaagtgtctgcaataagtaaaacgcaaacagcagaaaaaattaaacctgaaaacagctcttcagcatctacgggaggcaaacttgtaaaacctggaacagcagcatcattgtcaaagaccaagagcagtgatgaccttttagctggaatggccggaggggtaacggtgactaatggtgttaaaggaaagaaaagcacctgcccatctgcagcaccttcagcatctgcccctgccatgaccaccgtggagaacaaatccaagattagcacaggcacagcttcttcaaccaagcggagcacttctacaggtaataaagaatccagttctactagagaaagattacgtgaacgtacccgattaaaccagagcaaaaaactaccttctgcaggtcagggagctaatgacatggcattggccaaacgttcccgcagtcgaactgctacagaatgtgacgttcgtatgagcaagtctaagtcagacaatcagatcagtgacagagctgctttggaggccaaagtgaaggatcttctcacgctggcaaaaaccaaagacgtagaaattttacatttgagaaatgaactgcgagacatgcgtgcccagctgggcattaatgaggatcattctgagggtgatgaaaaatctgagaaggaaactattatggctcaccagccgactgatgtggagtccactttattgcagttgcaggaacagaatactgccatccgtgaagaactcaaccagctgaaaaatgaaaacagaatgttaaaggacaggttgaatgcattgggcttttccctagagcagaggttagacaattctgaaaaactgtttggctatcagtccctgagcccagaaatcacccctgataaccagagcgatggaggaggaactctgacttcttcagtggaaggctctgcccctggctcagtggaggatctcttgagtcaggatgaaaatacactaatggaccatcagcacagtaactccatggacaatttagacagtgagtgcagtgaggtctaccagcccctcacatcgagcgatgatgcgctggatgcaccatcctcctcagagtcggaaggcatccccagcatagagcgctcccggaaggggagcagcgggaatgccagtgaagtgtccgtggcttgcctgactgaacggatacaccagatggaagagaaccaacacagtacaagtgaggaactccaggcaaccctgcaagagctagctgatttacagcagattacccaggaactgaatagtgaaaacgaaaggcttggagaagagaaggttattctgatggagtctttatgtcagcagagcgataagttggaacactttagtcgacagattgaatacttccgctctcttctagatgagcatcacatttcttatgtcatagatgaagatgtaaaaagtgggcgctatatggaattagagcaacgttacatggacctcgctgagaatgcccgttttgaacgggagcagcttcttggtgtccagcagcatttaagcaatactttgaaaatggcagaacaagacaataaggaagctcaagaaatgataggggcactcaaagaacgcagtcaccatatggagcgaattattgagtctgagcagaaaggaaaagcagccttggcagccacgttagaggaatacaaagccacagtggccagtgaccagatagagatgaatcgcctgaaggctcagctggagaatgaaaagcagaaagtggcagagctgtattctatccataactctggagacaaatctgatattcaggacctcctggagagtgtcaggctggacaaagaaaaagcagagactttggctagtagcttgcaggaagatctggctcatacccgaaatgatgccaatcgattacaggatgccattgctaaggtagaggatgaataccgagccttccaagaagaagctaagaaacaaattgaagatttgaatatgacgttagaaaaattaagatcagacctggatgaaaaagaaacagaaaggagtgacatgaaagaaaccatctttgaacttgaagatgaagtagaacaacatcgtgctgtgaaacttcatgacaacctcattatttctgatctagagaatacagttaaaaaactccaggaccaaaagcacgacatggaaagagaaataaagacactccacagaagacttcgggaagaatctgcggaatggcggcagtttcaggctgatctccagactgcagtagtcattgcaaatgacattaaatctgaagcccaagaggagattggtgatctaaagcgccggttacatgaggctcaagaaaaaaatgagaaactcacaaaagaattggaggaaataaagtcacgcaagcaagaggaggagcgaggccgggtatacaattacatgaatgccgttgagagagatttggcagccttaaggcagggaatgggactgagtagaaggtcctcgacttcctcagagccaactcctacagtaaaaaccctcatcaagtcctttgacagtgcatctcaagtaccaaaccctgctgcagctgcaattcctcgaacgcccctgagcccaagtcctatgaaaacccctcctgcagcagctgtgtcccctatgcagatggagtctagttctgtcgcccacgctggaatgcagtggcgtgaccttggctcactgcaacctctgcctcctgggttcaagtga

SEQ ID NO: 89019 - DNA, 2565 bp, Artificial Sequence
  derived and/or modified sequence
aagggcggggcccgcgagggaggccgggcggcccggcaagcggcgctgcggggtaggctgctttcctgaggccggactcaacgggtctcggctgagccaccgggtgagctcaccgcccagcccaaaccaggagattgcgagggagcgatgcggtgcagcgcgatttgcttgtaaatgcatcacgaagaggcagcccagaatgaagaaagcaagcaggagtgttggctcagtgcctaaagtgtctgcaataagtaaaacgcaaacagcagaaaaaattaaacctgaaaacagctcttcagcatctacgggaggcaaacttgtaaaacctggaacagcagcatcattgtcaaagaccaagagcagtgatgaccttttagctggaatggccggaggggtaacggtgactaatggtgttaaaggaaagaaaagcacctgcccatctgcagcaccttcagcatctgcccctgccatgaccaccgtggagaacaaatccaagattagcacaggcacagcttcttcaaccaagcggagcacttctacaggtaataaagaatccagttctactagagaaagattacgtgaacgtacccgattaaaccagagcaaaaaactaccttctgcaggtcagggagctaatgacatggcattggccaaacgttcccgcagtcgaactgctacagaatgtgacgttcgtatgagcaagtctaagtcagacaatcagatcagtgacagagctgctttggaggccaaagtgaaggatcttctcacgctggcaaaaaccaaagacgtagaaattttacatttgagaaatgaactgcgagacatgcgtgcccagctgggcattaatgaggatcattctgagggtgatgaaaaatctgagaaggaaactattatggctcaccagccgactgatgtggagtccactttattgcagttgcaggaacagaatactgccatccgtgaagaactcaaccagctgaaaaatgaaaacagaatgttaaaggacaggttgaatgcattgggcttttccctagagcagaggttagacaattctgaaaaactgtttggctatcagtccctgagcccagaaatcacccctgataaccagagcgatggaggaggaactctgacttcttcagtggaaggctctgcccctggctcagtggaggatctcttgagtcaggatgaaaatacactaatggaccatcagcacagtaactccatggacaatttagacagtgagtgcagtgaggtctaccagcccctcacatcgagcgatgatgcgctggatgcaccatcctcctcagagtcggaaggcatccccagcatagagcgctcccggaaggggagcagcgggaatgccagtgaagtgtccgtggcttgcctgactgaacggatacaccagatggaagagaaccaacacagtacaagtgaggaactccaggcaaccctgcaagagctagctgatttacagcagattacccaggaactgaatagtgaaaacgaaaggcttggagaagagaaggttattctgatggagtctttatgtcagcagagcgataagttggaacactttagtcgacagattgaatacttccgctctcttctagatgagcatcacatttcttatgtcatagatgaagatgtaaaaagtgggcgctatatggaattagagcaacgttacatggacctcgctgagaatgcccgttttgaacgggagcagcttcttggtgtccagcagcatttaagcaatactttgaaaatggcagaacaagacaataaggaagctcaagaaatgataggggcactcaaagaacgcagtcaccatatggagcgaattattgagtctgagcagaaaggaaaagcagccttggcagccacgttagaggaatacaaagccacagtggccagtgaccagatagagatgaatcgcctgaaggctcagctggagaatgaaaagcagaaagtggcagagctgtattctatccataactctggagacaaatctgatattcaggacctcctggagagtgtcaggctggacaaagaaaaagcagagactttggctagtagcttgcaggaagatctggctcatacccgaaatgatgccaatcgattacaggatgccattgctaaggtagaggatgaataccgagccttccaagaagaagctaagaaacaaattgaagatttgaatatgacgttagaaaaattaagatcagacctggatgaaaaagaaacagaaaggagtgacatgaaagaaaccatctttgaacttgaagatgaagtagaacaacatcgtgctgtgaaacttcatgacaacctcattatttctgatctagagaatacagttaaaaaactccaggaccaaaagcacgacatggaaagagaaataaagacactccacagaagacttcgggaagaatctgcggaatggcggcagtttcaggctgatctccagactgcagtagtcattgcaaatgacattaaatctgaagcccaagaggagattggtgatctaaagcgccggttacatgaggctcaagaaaaaaatgagaaactcac

SEQ ID NO: 89020 - DNA, 3525 bp, Artificial Sequence
  derived and/or modified sequence
tttcctgaggccggactcaacgggtctcggctgagccaccgggtgagctcaccgcccagcccaaaccaggagattgcgagggagcgatgcggtgcagcgcgatttgcttgtaaatgcatcacgaagaggcagcccagaatgaagaaagcaagcaggagtgttggctcagtgcctaaagtgtctgcaataagtaaaacgcaaacagcagaaaaaattaaacctgaaaacagctcttcagcatctacgggaggcaaacttgtaaaacctggaacagcagcatcattgtcaaagaccaagagcagtgatgaccttttagctggaatggccggaggggtaacggtgactaatggtgttaaaggaaagaaaagcacctgcccatctgcagcaccttcagcatctgcccctgccatgaccaccgtggagaacaaatccaagattagcacaggcacagcttcttcaaccaagcggagcacttctacaggtaataaagaatccagttctactagagaaagattacgtgaacgtacccgattaaaccagagcaaaaaactaccttctgcaggtcagggagctaatgacatggcattggccaaacgttcccgcagtcgaactgctacagaatgtgacgttcgtatgagcaagtctaagtcagacaatcagatcagtgacagagctgctttggaggccaaagtgaaggatcttctcacgctggcaaaaaccaaagacgtagaaattttacatttgagaaatgaactgcgagacatgcgtgcccagctgggcattaatgaggatcattctgagggtgatgaaaaatctgagaaggaaactattatggctcaccagccgactgatgtggagtccactttattgcagttgcaggaacagaatactgccatccgtgaagaactcaaccagctgaaaaatgaaaacagaatgttaaaggacaggttgaatgcattgggcttttccctagagcagaggttagacaattctgaaaaactgtttggctatcagtccctgagcccagaaatcacccctgataaccagagcgatggaggaggaactctgacttcttcagtggaaggctctgcccctggctcagtggaggatctcttgagtcaggatgaaaatacactaatggaccatcagcacagtaactccatggacaatttagacagtgagtgcagtgaggtctaccagcccctcacatcgagcgatgatgcgctggatgcaccatcctcctcagagtcggaaggcatccccagcatagagcgctcccggaaggggagcagcgggaatgccagtgaagtgtccgtggcttgcctgactgaacggatacaccagatggaagagaaccaacacagtacaagtgaggaactccaggcaaccctgcaagagctagctgatttacagcagattacccaggaactgaatagtgaaaacgaaaggcttggagaagagaaggttattctgatggagtctttatgtcagcagagcgataagttggaacactttagtcgacagattgaatacttccgctctcttctagatgagcatcacatttcttatgtcatagatgaagatgtaaaaagtgggcgctatatggaattagagcaacgttacatggacctcgctgagaatgcccgttttgaacgggagcagcttcttggtgtccagcagcatttaagcaatactttgaaaatggcagaacaagacaataaggaagctcaagaaatgataggggcactcaaagaacgcagtcaccatatggagcgaattattgagtctgagcagaaaggaaaagcagccttggcagccacgttagaggaatacaaagccacagtggccagtgaccagatagagatgaatcgcctgaaggctcagctggagaatgaaaagcagaaagtggcagagctgtattctatccataactctggagacaaatctgatattcaggacctcctggagagtgtcaggctggacaaagaaaaagcagagactttggctagtagcttgcaggaagatctggctcatacccgaaatgatgccaatcgattacaggatgccattgctaaggtagaggatgaataccgagccttccaagaagaagctaagaaacaaattgaagatttgaatatgacgttagaaaaattaagatcagacctggatgaaaaagaaacagaaaggagtgacatgaaagaaaccatctttgaacttgaagatgaagtagaacaacatcgtgctgtgaaacttcatgacaacctcattatttctgatctagagaatacagttaaaaaactccaggaccaaaagcacgacatggaaagagaaataaagacactccacagaagacttcgggaagaatctgcggaatggcggcagtttcaggctgatctccagactgcagtagtcattgcaaatgacattaaatctgaagcccaagaggagattggtgatctaaagcgccggttacatgaggctcaagaaaaaaatgagaaactcacaaaagaattggaggaaataaagtcacgcaagcaagaggaggagcgaggccgggtatacaattacatgaatgccgttgagagagatttggcagccttaaggcagggaatgggactgagtagaaggtcctcgacttcctcagagccaactcctacagtaaaaaccctcatcaagtcctttgacagtgcatctcaagtaccaaaccctgctgcagctgcaattcctcgaacgcccctgagcccaagtcctatgaaaacccctcctgcagcagctgtgtcccctatgcagagacattccataagtggaccaatctcaacatccaaacccctgacagccctgtcagataagagaccaaactatggggaaatccctgttcaagagcatctgttaagaacatcttcagccagccggcctgcttccctgccaagagtgcctgcgatggaaagtgccaagaccctctcagtgtctcgacgaagtagtgaagaagtgaaacgggacatttctgcacaggagggagcgtcgccagcctctctgatggctatgggaaccacgtctccacagctttccctgtcctcttctccaacggcatctgtgactcccaccacccgaagccgaataagagaagaaaggaaagaccctctctcagcattggccagagaatatggaggatcaaagaggaacgccttgctgaagtggtgtcagaagaaaacagaaggctatcagagaaggaacttcatgctggctttccaggcagctgaaagtgtcggcatcaaatccacactggacattaatgaaatggtacggactgaacgacccgactggcagaacgtgatgctgtatgtgacggcgatctacaagtactttgagacctgagcatgccgggaggagccgccccaatagcgggggtacccctccacagcgaccgagcgacaccgacgccattagctacgcacccctgtaaagcttccagcaactctgggctgccccacagcgtgtgagcctccagctcggggcttccgtatt

SEQ ID NO: 89021 - protein, 625 aa, Artificial Sequence
  derived and/or modified sequence
MAGIRVTKVDWQRSRNGAAHHTQEYPCPELVVRRGQSFSLTLELSRALDCEEILIFTMETGPRASEALHTKAVFQTSELERGEGWTAAREAQMEKTLTVSLASPPSAVIGRYLLSIRLSSHRKHSNRRLGEFVLLFNPWCAEDDVFLASEEERQEYVLSDSGIIFRGVEKHIRAQGWNYGQFEEDILNICLSILDRSPGHQNNPATDVSCRHNPIYVTRVISAMVNSNNDRGVVQGQWQGKYGGGTSPLHWRGSVAILQKWLKGRYKPVKYGQCWVFAGVLCTVLRCLGIATRVVSNFNSAHDTDQNLSVDKYVDSFGRTLEDLTEDSMWNFHVWNESWFARQDLGPSYNGWQVLDATPQEESEGVFRCGPASVTAIREGDVHLAHDGPFVFAEVNADYITWLWHEDESRERVYSNTKKIGRCISTKAVGSDSRVDITDLYKYPEGSRKERQVYSKAVNRLFGVEASGRRIWIRRAGGRCLWRDDLLEPATKPSIAGKFKVLEPPMLGHDLRLALCLANLTSRAQRVRVNLSGATILYTRKPVAEILHESHAVRLGPQEEKRIPITISYSKYKEDLTEDKKILLAAMCLVTKGEKLLVEKDITLEDFITIKRAYPGASGEGLSPV

SEQ ID NO: 89022 - DNA, 1878 bp, Artificial Sequence
  derived and/or modified sequence
atggccggcatcagagtgaccaaggtggactggcagagaagcagaaacggcgccgcccaccacacccaggagtacccctgccccgagctggtggtgagaagaggccagagcttcagcctgaccctggagctgagcagagccctggactgcgaggagatcctgatcttcaccatggagaccggccccagagccagcgaggccctgcacaccaaggccgtgttccagaccagcgagctggagagaggcgagggctggaccgccgccagagaggcccagatggagaagaccctgaccgtgagcctggccagcccccccagcgccgtgatcggcagatacctgctgagcatcagactgagcagccacagaaagcacagcaacagaagactgggcgagttcgtgctgctgttcaacccctggtgcgccgaggacgacgtgttcctggccagcgaggaggagagacaggagtacgtgctgagcgacagcggcatcatcttcagaggcgtggagaagcacatcagagcccagggctggaactacggccagttcgaggaggacatcctgaacatctgcctgagcatcctggacagaagccccggccaccagaacaaccccgccaccgacgtgagctgcagacacaaccccatctacgtgaccagagtgatcagcgccatggtgaacagcaacaacgacagaggcgtggtgcagggccagtggcagggcaagtacggcggcggcaccagccccctgcactggagaggcagcgtggccatcctgcagaagtggctgaagggcagatacaagcccgtgaagtacggccagtgctgggtgttcgccggcgtgctgtgcaccgtgctgagatgcctgggcatcgccaccagagtggtgagcaacttcaacagcgcccacgacaccgaccagaacctgagcgtggacaagtacgtggacagcttcggcagaaccctggaggacctgaccgaggacagcatgtggaacttccacgtgtggaacgagagctggttcgccagacaggacctgggccccagctacaacggctggcaggtgctggacgccaccccccaggaggagagcgagggcgtgttcagatgcggccccgccagcgtgaccgccatcagagagggcgacgtgcacctggcccacgacggccccttcgtgttcgccgaggtgaacgccgactacatcacctggctgtggcacgaggacgagagcagagagagagtgtacagcaacaccaagaagatcggcagatgcatcagcaccaaggccgtgggcagcgacagcagagtggacatcaccgacctgtacaagtaccccgagggcagcagaaaggagagacaggtgtacagcaaggccgtgaacagactgttcggcgtggaggccagcggcagaagaatctggatcagaagagccggcggcagatgcctgtggagagacgacctgctggagcccgccaccaagcccagcatcgccggcaagttcaaggtgctggagccccccatgctgggccacgacctgagactggccctgtgcctggccaacctgaccagcagagcccagagagtgagagtgaacctgagcggcgccaccatcctgtacaccagaaagcccgtggccgagatcctgcacgagagccacgccgtgagactgggcccccaggaggagaagagaatccccatcaccatcagctacagcaagtacaaggaggacctgaccgaggacaagaagatcctgctggccgccatgtgcctggtgaccaagggcgagaagctgctggtggagaaggacatcaccctggaggacttcatcaccatcaagagagcctaccccggcgccagcggcgagggcctgagccccgtgtag

SEQ ID NO: 89023 - DNA, 1878 bp, Artificial Sequence
  derived and/or modified sequence
atggctggcattagggtgacaaaggtggactggcagcgcagccggaatggcgcggcccaccacacgcaggagtatccatgcccagaacttgtggtgcgcaggggacaaagcttctcccttaccctggagttatcgagggcactggattgtgaggagattctgatcttcacaatggagactggaccacgggctagtgaggctctccacactaaggccgttttccaaacctctgagctagagagaggggaggggtggaccgcggctagggaagctcagatggagaagacactgactgtaagcctggcgtctcctcccagtgcggtgatcggacgctacctgctgtcaatcagactcagttcacatcggaagcactctaacagacgactgggagagttcgtgcttctctttaacccatggtgcgcggaagatgacgtcttcctggcaagcgaggaagagcggcaggagtatgtgttgtcagattccggcatcatattccgcggcgtcgaaaagcacattagggcacaggggtggaattatggacagtttgaggaagacatcctgaacatctgtcttagtatcttagaccggagccccggccaccagaataatcccgccactgacgtgtcttgtcgccacaatccaatctacgtcacacgggtgatttccgccatggtgaactctaataatgacaggggcgttgtgcaaggccagtggcagggaaaatacggaggcgggacgagccccctgcattggcgaggcagcgtcgcgattctgcagaaatggctaaaaggcagatacaagcccgtcaagtacggccagtgctgggtgttcgccggtgtcttgtgcaccgtcttaagatgtctcgggattgctaccagagtggtgtcgaatttcaactctgcccatgatacagaccaaaacctctcagtggataaatatgttgactctttcggcagaacactcgaggacttgaccgaggactccatgtggaactttcatgtctggaacgagtcttggtttgcccgccaggatcttgggccgtcctacaacggctggcaggtcctggacgctacacctcaggaggagagcgagggggtgttccggtgcggccccgcgtccgtgaccgccatcagagaaggggatgtccatctcgcccacgatggtcctttcgttttcgctgaggttaatgccgattacattacatggctttggcacgaagatgagtctcgggaacgggtgtatagcaacactaagaaaatagggcgttgtatcagcactaaagcggtgggctcagactcacgtgttgatatcactgatctctacaaataccccgaagggagccggaaggagagacaagtgtactccaaggccgttaataggctgttcggtgtagaagccagtggtcgcagaatttggattaggagggctggaggcaggtgtttgtggagagacgatttactcgaacctgcaactaaacccagcatcgctggaaagttcaaggtgctggaaccccccatgctgggtcacgacctgaggctggcactgtgcctggcgaaccttacttctcgagctcagagggtccgcgtcaatctgtcaggtgcgacaatcctttacacaaggaagcccgtggctgaaattctgcatgagagtcacgccgtccgcctggggcctcaggaggagaagcgaattccaatcaccatatcctattctaagtacaaagaagaccttactgaggataaaaaaattctgttggccgcaatgtgcctggtcacaaagggcgagaagctcctcgtagaaaaagatatcacgctggaagatttcattacaattaagagggcttatcccggggccagtggcgagggactcagtccagtgtag

SEQ ID NO: 89024 - DNA, 1878 bp, Artificial Sequence
  derived and/or modified sequence
atggccggcatccgggtgaccaaggtggactggcagaggagcagaaatggagctgcccaccacacccaggagtacccctgcccagagctggtggtgagaagaggccagagcttcagcctgaccctggagctgagccgggccctggactgtgaggagatcctgatcttcaccatggagaccggcccccgggccagcgaggccctgcacaccaaggctgtgttccagaccagcgagctggagcggggggagggctggacagctgcccgggaggcccagatggagaagaccctgactgtgtccctggccagcccccccagcgctgtgattggccgctacctgctgagcatccggctgagcagccacaggaagcacagcaacagaaggctgggggagtttgtgctgctcttcaacccctggtgtgccgaggatgatgtgttcctggccagcgaggaggagcggcaggagtatgtgctgagtgacagcggcatcatcttccggggcgtggagaagcacatccgggcccagggctggaactacggccagtttgaggaggacatcctgaacatctgcctgagcatcctggacaggagccctggccaccagaacaacccagccacagatgtgtcctgccgccacaaccccatctacgtgaccagggtcatcagcgccatggtgaacagcaacaatgaccggggcgtggtgcagggccagtggcagggcaagtatggaggcggcaccagccccctgcactggaggggctctgtggccatcctgcagaagtggctgaagggccgctacaagcctgtgaagtatggccagtgctgggtgtttgctggggtgctgtgcaccgtgctgcgctgcctgggcatcgccaccagggtggtgagcaacttcaacagcgcccatgacacagaccagaacctgtctgtggacaagtatgtggacagctttggaagaaccctggaggacctgacagaggacagcatgtggaacttccacgtgtggaatgaatcctggtttgcccggcaggacctgggccccagctacaacggctggcaggtgctggatgccaccccccaggaggagagcgagggcgtcttccgctgtggccctgcctctgtgacagccatccgggagggagatgtgcacctggcccatgatggcccctttgtgtttgctgaggtgaatgctgactacatcacctggctgtggcatgaagatgagagccgggagcgggtgtacagcaacaccaagaagattggccgctgcatcagcaccaaggctgtgggcagtgacagccgggtggacatcacagacctgtacaagtacccagagggcagcaggaaggagcggcaggtgtacagcaaggctgtgaacagactctttggagtggaggccagcggccgccgcatctggatccggcgggccggcggccgctgcctgtggagagatgacctgctggagcccgccaccaagcccagcattgctgggaagttcaaggtgctggagccccccatgctgggccatgacctgcggctggccctgtgcctggccaacctgaccagccgggcccagagggtgcgggtgaacctgagcggggccaccatcctgtacaccaggaagcctgtggccgagatcctgcacgagagccatgctgtgcggctgggcccccaggaggagaagaggatccccatcaccatctcctacagcaagtacaaggaggacctgacagaggacaagaagatcctgctggccgccatgtgcctggtgaccaagggggagaagctgctggtggagaaggacatcaccctggaggacttcatcaccatcaagagggcctacccaggggccagcggggagggcctgagccctgtgtag

SEQ ID NO: 89025 - DNA, 1878 bp, Artificial Sequence
  derived and/or modified sequence
atggccggcatccgggtgaccaaggtggactggcagcggagccggaacggcgctgcccaccatacacaagaatacccatgtcccgagctggtcgttcgccgggggcagtctttttcccttaccttggaattgtctagagcccttgactgcgaggaaatcctgatctttacaatggaaacaggaccacgtgctagcgaagctttacacactaaggccgtatttcaaactagcgaactggagaggggagagggctggactgctgccagagaagcccagatggaaaagaccttgaccgtctctttggctagcccaccctcagcagtgatagggcgttacctcctttccatcagactttcctcccacagaaagcatagcaacagaagattgggcgagttcgtgttgctgttcaacccgtggtgcgcagaggacgatgtttttctagccagtgaggaggagcgccaggagtacgtgctgagcgacagcgggataatattccgcggcgtggaaaaacatattagagctcaaggatggaactatggccagtttgaagaagatattctcaatatttgcttgagcatcctggatagatctcctggacaccaaaacaatcccgctacagatgttagctgccggcacaaccccatctacgtaacaagagtaataagtgctatggtgaactccaataatgaccgaggcgtcgtgcagggacaatggcagggtaaatatggcggaggcacatcacctctacactggcgtggctctgtcgccattctgcaaaagtggctgaaggggcgctacaagcctgtcaaatacggacaatgttgggtgtttgctggagttctatgcaccgtactccgctgcttaggcatcgctacgagagtggtgtcaaatttcaattcagcgcacgacaccgaccaaaacctctccgtcgataagtatgtggactcatttggcaggactctcgaagatctaactgaggattcaatgtggaattttcatgtttggaacgaatcatggtttgcacgacaagacttgggcccatcgtacaacggatggcaagtactggacgctaccccccaggaagagagtgagggtgtttttcggtgtggacctgcttcggtcactgctattcgggagggcgatgttcacctggcccacgatggcccgttcgtgttcgctgaggtcaatgcagattacatcacctggctttggcacgaggacgaaagtcgtgaaagagtatactctaacaccaagaaaattgggcggtgcatttctaccaaggcagtcggctccgactcccgtgttgacatcacggacctctataaatatccggagggatccaggaaggagcgccaggtgtattcgaaggccgtcaacaggctgtttggggttgaggcttcgggtcgccgcatctggattagacgggctgggggccgatgcctgtggcgtgacgaccttctcgaaccagcaactaaaccaagcattgctggaaagttcaaggttcttgaaccacctatgctgggtcacgatctcaggttagccctttgtttagccaacttaacatcgagagctcagagggtgcgcgtgaatctgtcgggagctactatcttgtacacacgtaagccagtggccgagattttacacgagtcgcacgccgtgcgcctaggcccacaagaagagaaacgtatcccaattactatctcttacagcaagtacaaagaggacctgacagaggacaagaaaatcctattggccgctatgtgtctcgtgacaaagggtgaaaagttactggttgagaaggatatcaccttggaggacttcatcaccattaaacgggcctaccctggggcctctggggaagggctgtcacctgtgtag

SEQ ID NO: 89026 - DNA, 1878 bp, Artificial Sequence
  derived and/or modified sequence
atggcaggtatccgcgtgactaaggtggattggcagcgatcacgtaacggcgctgctcatcatacacaggagtatccgtgtcccgagttagtggtccggagaggccagtcatttagtcttaccctggagctgtcacgcgctctggattgcgaggagattctgatctttaccatggaaacaggcccacgggcatccgaggctctacacacgaaggccgtgtttcaaacaagcgagttggaaaggggtgaaggctggactgcagctcgcgaagcccaaatggagaagacgctgaccgtctctctggccagccccccttccgcggtgatcggccgatatctgctgtctatccggctgagttcccatagaaagcacagtaacagacggctgggggaattcgtgttgttatttaatccgtggtgtgccgaggatgatgtgtttctggcttccgaggaggaaagacaggagtatgtgctgtccgattccggaattattttccgcggtgtggagaaacacatccgggctcaggggtggaattatggacagttcgaggaagacattctgaatatctgtttgtctatcctagaccgcagccctggccaccaaaacaatccggctaccgacgtgagctgccgtcacaaccctatatatgtgacacgcgtaattagcgccatggtcaactctaacaacgacaggggagtggtccagggacagtggcagggaaaatatgggggtggcacatctcctctccactggcgcggaagtgtggctattctgcagaaatggttgaaaggtagatacaaacctgttaaatatgggcagtgttgggtattcgccggtgtgctctgcaccgtactgcggtgcctgggaattgctacacgggttgtttccaactttaactctgcccacgacacggaccagaatctctccgtggataaatatgtggatagtttcggacggaccctcgaggatctgacagaagatagcatgtggaacttccacgtgtggaacgaaagttggtttgcacggcaggatcttggcccaagttataatggctggcaggtactagatgcgacgcctcaagaggagtccgaaggggtctttcgttgcggccctgcctcagtgaccgctataagagagggcgatgttcatttagcacacgacggccctttcgtgttcgccgaagtcaatgcagattatattacctggttatggcacgaggacgagtctagggagagagtgtactccaacacgaagaagatagggcgatgcatcagcacgaaagccgttggaagcgattcacgagtcgacattaccgatctctataagtatccagagggctccagaaaggagagacaggtgtactcaaaagcggtaaaccgcttatttggagtggaggctagcggaaggcgcatttggatcagacgagcgggtggacggtgtctgtggcgggatgacttactcgaacccgcaactaaacctagcatcgccggtaaatttaaggttctcgagcctcctatgcttggacatgatttgaggctcgccctgtgtctcgccaatctcactagtcgcgcacagcgggtgcgcgtaaatctctccggagccacgattctgtatacccgcaaacctgtcgcagagatcctgcacgaaagtcatgcagtgcgcctggggcctcaggaggagaagcggatcccaataactatctcatactccaaatacaaggaagacttgaccgaggacaaaaaaatattactggcagccatgtgtctggtcactaagggtgaaaaactgctcgtggagaaggacatcactttggaggacttcataaccataaaacgcgcataccctggtgcctctggcgagggcttatctcctgtctag

SEQ ID NO: 89027 - DNA, 2158 bp, Artificial Sequence
  derived and/or modified sequence
actgtcctgacggtgcacacactgctgtgtggaggaacagaggagtccagctggccttcacatggcagggatcagagtcaccaaggtggactggcagcggtcgaggaatggcgctgcccaccacacccaggagtacccctgccctgagctggtggttcgcaggggccagtcgttcagcctcacgctggagctgagcagagccctggactgtgaggagatcctcatcttcacgatggagacaggaccccgggcttctgaggccctccacaccaaagctgtgttccagacatcggagctggagcggggtgagggctggacagcagcaagggaggctcagatggagaaaactctgaccgtcagtctcgccagccctcccagtgctgtcattggccgctacctgctgagcatcaggctttcctctcaccgcaaacacagcaaccggaggctgggcgagtttgttctccttttcaacccatggtgtgcagaggacgatgtgtttctggcctcagaggaggagagacaggagtacgtgctcagcgacagcggcatcatcttccgaggcgtggagaagcacatacgagcccagggctggaactacgggcagtttgaggaggacatcctgaacatctgcctctccatcctggatcgaagccccggtcaccaaaacaacccagccaccgacgtgtcctgccgccacaaccccatctacgtcaccagggtcatcagtgccatggtgaacagcaacaacgaccgaggtgtggtgcaaggacagtggcagggcaagtacggcggcggcaccagcccgctgcactggcgcggcagcgtggccattctgcagaagtggctcaagggcaggtacaagccagtcaagtacggccagtgctgggtcttcgccggagtcctgtgcacagtcctcaggtgcttggggatagccacacgggtcgtgtccaacttcaactcagcccacgacacagaccagaacctgagtgtggacaaatacgtggactccttcgggcggaccctggaggacctgacagaagacagcatgtggaatttccatgtctggaatgagagctggtttgcccggcaggacctaggcccctcttacaatggctggcaggttctggatgccaccccccaggaggagagtgaaggtgtgttccggtgcggcccagcctcagtcaccgccatccgcgagggtgatgtgcacctggctcacgatggccccttcgtgtttgcggaggtcaacgccgactacatcacctggctgtggcacgaggatgagagccgggagcgtgtatactcaaacacgaagaagattgggagatgcatcagcaccaaggcggtgggcagtgactcccgcgtggacatcactgacctctacaagtatccggaagggtcccggaaagagaggcaggtgtacagcaaggcggtgaacaggctgttcggcgtggaagcctctggaaggagaatctggatccgcagggctgggggtcgctgtctctggcgtgacgacctcctggagcctgccaccaagcccagcatcgctggcaagttcaaggtgctagagcctcccatgctgggccacgacctgagactggccctgtgcttggccaacctcacctcccgggcccagcgggtgagggtcaacctgagcggtgccaccatcctctatacccgcaagccagtggcagagatcctgcatgaatcccacgccgtgaggctggggccgcaagaagagaagagaatcccaattacaatatcttactctaagtataaagaagacctgacagaggacaagaagatcctgttggctgccatgtgccttgtcaccaaaggagagaagcttctggtggagaaggacattactctagaggacttcatcaccatcaagcgtgcctaccctggagcctcaggagagggcctcagtccagtttgacatcaccccctccaaaagtggcccaaggcagctgcaggtggaccttgtaagccctcacttcccggacatcaagggctttgtgatcgtccatgtggccactgccaagtgatggatcatgagggactgagaggggtggatttggcccctgtcctcctcctgcccattctttgtctcttccacatgggagccaggaggcctcagttaatcctgcctcaacct

SEQ ID NO: 89028 - DNA, 375 bp, Artificial Sequence
  derived and/or modified sequence
atgtggaagggctgcttaaccctttataccggaagggggggcgaactgcagaagattggggagttctgtatggtgtacagcgaagtgccaaactttagtgagcccaacccggactatcggggccagcagaataaaggagcgcagagcgagcagaaaaataattcaatgaattctaacatgggaactgggacttttggaccggtcggaaatggcgtgcacaccgggccagagtccagagaacaccagttctcgcacgccggccgaagcaacggccgtggtctcattaacccacagctgcagggaactgccagtaaccaaacagtgatgactaccatttctaacggacgggatccgcggagagccttcaagcgctag

SEQ ID NO: 89029 - DNA, 375 bp, Artificial Sequence
  derived and/or modified sequence
atgtggaaaggatgtttgacactgtataccggacgcggtggcgaactgcagaaaattggggagttctgtatggtttatagcgaggtgccaaacttcagcgagccaaatcccgattaccgcggccagcagaataagggggcccagagcgaacagaaaaataactctatgaacagtaatatgggcactgggacatttggccctgtgggcaacggtgtccataccggacccgagagccgggaacaccagtttagtcatgccgggcggagtaacggccgggggctcattaatccccagttgcaaggaactgcgtccaatcagacagtcatgaccacaatcagtaacggtagggaccctagacgagcttttaagaggtag

SEQ ID NO: 89030 - DNA, 375 bp, Artificial Sequence
  derived and/or modified sequence
atgtggaagggctgcctgaccctgtacacaggccggggcggggagctgcagaagattggagagttctgcatggtgtacagcgaggtgcccaacttcagcgagcccaacccagactaccggggccagcagaacaagggggcccagagcgagcagaagaacaacagcatgaacagcaacatgggcaccggcacctttggacctgtgggcaatggagtgcacacaggccctgagagccgggagcaccagttcagccacgccggccgcagcaatggccggggcctcatcaacccccagctgcagggcacagccagcaaccagacagtgatgaccaccatcagcaatggccgggacccccggcgggccttcaagaggtag

SEQ ID NO: 89031 - DNA, 375 bp, Artificial Sequence
  derived and/or modified sequence
atgtggaagggctgcctgaccctgtacaccggccggggcggcgagcttcaaaaaattggggaattttgcatggtgtatagtgaggtgccaaacttttctgagccaaaccccgattacagggggcagcagaacaagggcgcccagtcagaacagaagaataattcaatgaacagtaacatgggaacgggtacattcggtccagtgggcaatggtgttcatacagggcctgaatccagagagcatcagttctcgcacgccggtagatcaaacggaaggggtctgattaatccccagctacagggaaccgcaagcaatcagaccgtcatgaccacgatcagcaatggaagggatccacgcagagccttcaagcgatag

SEQ ID NO: 89032 - DNA, 375 bp, Artificial Sequence
  derived and/or modified sequence
atgtggaagggctgcctgaccctgtacaccggccggggcggcgagttacagaagattggcgagttttgcatggtgtattctgaggtcccaaacttttccgaacccaacccagactaccgggggcagcaaaacaagggggcacagtctgagcagaaaaacaacagcatgaacagcaacatgggtactggcacctttggtcccgtgggaaacggcgtccacactggaccagagtccagggagcaccagtttagtcacgcagggcgctcaaacggtcggggccttatcaatccacagctgcaggggaccgcctcaaaccagacagtgatgacgacaattagcaatggccgagaccccagacgagccttcaagcggtag

SEQ ID NO: 89033 - DNA, 375 bp, Artificial Sequence
  derived and/or modified sequence
atgtggaaaggatgtctgaccctctatactgggcgaggtggcgaactgcagaagattggcgagttctgcatggtgtatagcgaggtgcctaacttttctgaaccaaacccagactaccgcggtcaacagaacaagggcgctcagtctgagcagaagaataacagcatgaactccaatatggggactggaactttcgggccagttggcaatggggttcacaccggccctgagtcaagggaacatcaattcagtcacgccggtagaagcaatgggcgaggcttgataaacccacagcttcagggcaccgccagcaatcagaccgtgatgacgaccatctctaatggaagagacccccgacgcgcttttaagagatag

SEQ ID NO: 89034 - DNA, 375 bp, Artificial Sequence
  derived and/or modified sequence
atgtggaagggctgcctgactttatatactgggagaggtggggaactgcagaaaattggtgagttctgcatggtgtatagtgaggttccaaacttctctgaacccaaccccgattacagaggacagcagaataagggggcacagagtgaacagaaaaacaatagcatgaactccaacatgggaacaggaacatttggccctgtgggcaacggggttcatactggcccagagtctcgtgagcatcagtttagtcacgccggaaggtctaatgggagaggcttaattaacccccaactgcaaggtacggcctcgaatcagaccgtgatgaccactatcagcaacggaagagatcctcgaagggcatttaagagatag

SEQ ID NO: 89035 - DNA, 375 bp, Artificial Sequence
  derived and/or modified sequence
atgtggaagggctgcctgaccctgtacaccggcagaggcggcgagctgcagaagatcggcgagttctgcatggtgtacagcgaggtgcccaacttcagcgagcccaaccccgactacagaggccagcagaacaagggcgcccagagcgagcagaagaacaacagcatgaacagcaacatgggcaccggcaccttcggccccgtgggcaacggcgtgcacaccggccccgagagcagagagcaccagttcagccacgccggcagaagcaacggcagaggcctgatcaacccccagctgcagggcaccgccagcaaccagaccgtgatgaccaccatcagcaacggcagagaccccagaagagccttcaagagatag

SEQ ID NO: 89036 - DNA, 222 bp, Artificial Sequence
  derived and/or modified sequence
atggctgagaaagccaaacagatctatgaggaatttatccaaacggaagcaccaaaagaagtaaatatcgatcattttactaaagatattacaatgaaaaatcttgtcgaaccatctctctcatcgtttgacatggctcagaaaagaatacacgccctgatggagaaggacagtctccctaggttcgtgcggtccgaattctaccaggagttgattaagtag

SEQ ID NO: 89037 - DNA, 222 bp, Artificial Sequence
  derived and/or modified sequence
atggccgagaaggccaagcagatctatgaggagttcatccagacagaggcccccaaggaggtgaacatcgaccacttcaccaaggacatcaccatgaagaacctggtggagcccagcctgagcagctttgacatggcccagaagagaattcatgccctgatggagaaggacagcctgcccaggtttgtgcgctctgagttctaccaggagctgatcaagtag

SEQ ID NO: 89038 - DNA, 222 bp, Artificial Sequence
  derived and/or modified sequence
atggccgagaaggccaagcagatctacgaggagttcatccagaccgaggccccgaaggaggtgaacatagaccactttaccaaggatattactatgaagaaccttgtcgagccctccctgtcgtcatttgacatggcgcagaagcgcatccatgccttaatggaaaaggattcactgccaaggttcgtgagaagtgaattctatcaggagttgataaagtag

SEQ ID NO: 89039 - DNA, 222 bp, Artificial Sequence
  derived and/or modified sequence
atggcggagaaggcgaagcaaatctacgaggaatttatccaaaccgaggcccctaaagaggtgaatatcgatcacttcaccaaagacatcaccatgaaaaacctcgtggaaccgtctctgagctcctttgacatggcgcagaaacgcatacatgccctgatggagaaggattcactacctagatttgtgaggagcgagttctaccaggaactcattaagtag

SEQ ID NO: 89040 - DNA, 222 bp, Artificial Sequence
  derived and/or modified sequence
atggccgagaaggccaagcagatctacgaggagttcatccagaccgaggcccccaaggaggtgaacatcgaccacttcaccaaggacatcaccatgaagaacctggtggagcccagcctgagcagcttcgacatggcccagaagagaatccacgccctgatggagaaggacagcctgcccagattcgtgagaagcgagttctaccaggagctgatcaagtag

SEQ ID NO: 89041 - protein, 601 aa, Artificial Sequence
  derived and/or modified sequence
MWLFFGITGLLTAALSGHPSPAPPDQLNTSSAESELWEPGERLPVRLTNGSSSCSGTVEVRLEASWEPACGALWDSRAAEAVCRALGCGGAEAASQLAPPTPELPPPPAAGNTSVAANATLAGAPALLCSGAEWRLCEVVEHACRSDGRRARVTCAENRALRLVDGGGACAGRVEMLEHGEWGSVCDDTWDLEDAHVVCRQLGCGWAVQALPGLHFTPGRGPIHRDQVNCSGAEAYLWDCPGLPGQHYCGHKEDAGAVCSEHQSWRLTGGADRCEGQVEVHFRGVWNTVCDSEWYPSEAKVLCQSLGCGTAVERPKGLPHSLSGRMYYSCNGEELTLSNCSWRFNNSNLCSQSLAARVLCSASRSLHNLSTPEVPASVQTVTIESSVTVKIENKESRELMLLIPSIVLGILLLGSLIFIAFILLRIKGKYVFMLPIQVQAPPPEDSDSGSDSDYEHYDFSAQPPVALTTFYNSQRHRVTDEEVQQSRFQMPPLEEGLEELHASHIPTANPGHCITDPPSLGPQYHPRSNSESSTSSGEDYCNSPKSKLPPWNPQVFSSERSSFLEQPPNLELAGTQPAFSGSPSPQPDSTDNDDYDDISAA

SEQ ID NO: 89042 - DNA, 1806 bp, Artificial Sequence
  derived and/or modified sequence
atgtggctgtttttcggcataaccggtctcctgaccgccgcacttagcggacatccttcgcctgccccacccgaccaattgaacacttctagtgccgaatcagaactctgggagccgggagagaggctcccagtgcgcctgaccaatggtagttcaagttgcagtggaaccgtcgaggtgagattggaagctagttgggagcccgcgtgtggcgccctgtgggactctcgagccgcagaggctgtgtgtcgcgcgctgggctgtggtggcgctgaagctgcctcccagcttgcccctcccacacccgagctgcccccgccccccgctgctggtaacacttcggtggcagctaacgcaacactcgcaggggcgcccgcactcctttgctccggcgctgaatggaggctgtgtgaagttgtggaacacgcctgccgctcagacggtcgaagggcgcgcgtcacctgcgccgaaaacagagccttacggttggtggatggtgggggggcctgtgcaggtagggtggagatgctggaacacggcgagtgggggtctgtgtgtgacgacacctgggatctggaagacgcacacgttgtatgtcgccagctcgggtgtggctgggcagttcaggccctcccaggtctccatttcacaccaggtcgtggtccaattcatagggatcaggttaactgcagcggggccgaggcttacctttgggactgtcctggcctgcccggacaacactattgtggccataaggaggatgctggcgcggtatgctcagagcaccaatcatggcgtctgacaggtggcgcagataggtgcgagggacaagtcgaggtccatttcagaggtgtctggaacaccgtttgcgacagcgaatggtacccgtccgaagcgaaagttctctgtcagagcctgggatgcggcacagcagttgagagacccaagggccttccccacagtctgtctggaagaatgtattacagctgcaacggcgaagagcttactttgtccaattgctcctggcgcttcaataatagtaatctctgttcccagtccttagcagctagagttctgtgctcagccagcagatcattgcataatctgagtactccggaggttcccgcaagtgtgcaaaccgtgactattgaaagtagcgtaaccgttaagatcgaaaataaggaatccagagagctgatgctcctaatccctagcattgtgctgggtatcctccttctaggtagcctgatattcattgccttcattctccttcgaattaaaggcaagtacgtgttcatgctccctattcaagttcaggccccacctcctgaagactcggatagtggcagtgattcggattatgaacattacgactttagcgcacagcccccggtcgccctgacaacattctacaattcccaacggcacagggtgaccgatgaggaagtgcaacaatctaggttccagatgccaccattggaagaggggctggaagagttgcatgcctcccacatcccgaccgcaaatcccggccactgcatcacagaccccccctctctggggccacaataccatcccagaagtaattctgaaagttctacatcatctggcgaggactattgcaattctcctaaatctaaactgccaccttggaacccccaagtcttttcatcagagcgcagctcattccttgaacagccaccaaacctggagctggccggcacgcagcccgccttcagcggctccccctcaccacagcccgattccacggataatgatgattacgacgatatttctgcggcctag

SEQ ID NO: 89043 - DNA, 1806 bp, Artificial Sequence
  derived and/or modified sequence
atgtggctgttcttcggcatcaccggcctgctgacagctgccctgagcggccaccccagccctgcccccccagaccagctgaacaccagcagcgctgagagcgagctgtgggagcctggagagcggctgcctgtgcggctgaccaacggcagcagcagctgcagcggcaccgtggaggtgcggctggaggcctcctgggagcccgcctgtggggccctgtgggacagcagagctgctgaggccgtgtgccgggccctgggctgcggcggcgctgaggccgccagccagctggccccacccaccccagagctgcccccacctcctgctgctggcaacacctctgtggccgccaatgccaccctggccggggccccagccctgctgtgcagcggggctgagtggaggctgtgtgaggtggtggagcacgcctgccgcagtgatggaagaagagcccgggtgacctgtgctgaaaatagagccctgcggctggtggatggcggcggggcctgtgccggccgggtggagatgctggagcacggggagtggggctctgtgtgtgatgacacctgggacctggaggatgcccacgtggtgtgccggcagctgggctgcggctgggccgtgcaggccctgcccggcctgcacttcaccccaggccggggccccatccaccgggaccaggtgaactgcagcggggctgaggcctacctgtgggactgccccggcctgcccggccagcactactgcggccacaaggaggatgctggagctgtgtgcagcgagcaccagagctggaggctgaccggcggcgctgacagatgtgagggccaggtggaggtgcacttccggggcgtgtggaacacagtgtgtgacagcgagtggtaccccagcgaggccaaggtgctgtgccagagcctgggctgcggcacagctgtggagcggcccaagggcctgccccacagcctgagcggccgcatgtactacagctgcaatggagaggagctgaccctgagcaactgctcctggaggttcaacaacagcaacctgtgcagccagagcctggccgcccgggtgctgtgcagcgccagccgcagcctgcacaacctgagcaccccagaggtgcctgcctctgtgcagacagtgaccatcgagagctctgtgacagtgaagattgagaacaaggagagccgggagctgatgctgctgatccccagcatcgtgctgggcatcctgctgctgggcagcctcatcttcatcgccttcatcctgctgcgcatcaagggcaagtatgtgttcatgctgcccatccaggtgcaggcccctcctcctgaggacagcgacagcggcagtgacagcgactatgagcactatgacttcagcgcccagccccctgtggccctgaccaccttctacaacagccagaggcaccgggtgacagatgaggaggtgcagcagagccgcttccagatgccacccctggaggagggcctggaggagctgcacgccagccacatccccacagccaaccctggccactgcatcacagatcctcccagcctgggcccccagtaccaccccaggagcaacagcgagagcagcaccagcagcggggaggactactgcaacagccccaagagcaagctgcccccctggaacccccaggtgttcagcagcgagaggagcagcttcctggagcagccccccaacctggagctggccggcacccagcctgccttcagcggcagccccagcccccagcctgacagcacagacaatgatgattatgatgacatctctgctgcctag

SEQ ID NO: 89044 - DNA, 1806 bp, Artificial Sequence
  derived and/or modified sequence
atgtggctgttcttcggcatcaccggcctgctgaccgccgccctgtccgggcaccctagccccgccccccctgatcaacttaatacttcaagcgccgagtccgagctgtgggagcctggagaaagactgcccgtgagactgacgaacggctcctcttcttgctccggcacagtggaagtgcggctggaagcctcctgggaacctgcctgcggtgccctgtgggattcaagggcagctgaggcagtttgcagggcattgggctgcggcggggccgaggccgcctcacagcttgcccctccaactccggagctgcccccaccaccagcagcaggaaatacatctgttgcagcaaatgccacattggctggcgctcccgcgttgctgtgcagtggagccgagtggagactatgtgaagttgtcgagcatgcttgtcggtccgacggcagaagggcaagagtgacatgtgccgaaaatcgagccctacggctggtcgacggcggaggggcctgcgccggacgagtcgaaatgctggagcatggtgagtgggggtccgtgtgcgacgacacatgggacctggaagatgcccacgtggtgtgtcgacagttaggctgcgggtgggcggtccaggccctgcccggccttcatttcaccccggggcgcgggcccatacatcgcgaccaggtcaactgcagcggggcggaggcctacctctgggactgcccaggcttacccggccagcactactgcggacataaagaagacgcaggggcagtatgctctgagcatcaaagctggcgactcaccggcggggctgatagatgtgagggacaggtcgaagtccatttccgtggggtgtggaacacagtatgcgacagcgaatggtacccgtcagaagctaaagtgctctgtcagtcattgggatgtggcaccgccgtggagcgtcctaagggactcccacatagcttaagcggacgcatgtattactcgtgcaatggcgaagaactgaccttgagtaattgctcctggcgtttcaacaacagcaacttgtgctcccagtctctggcggcccgcgtgctttgctcggcctcaagaagtctgcataatcttagtacccctgaggttccagcttccgttcaaactgtgacaattgagtcgtctgtgaccgtgaagatcgaaaataaagagagcagggaacttatgctgctgattccatcgatcgtgctaggcatcctgcttctcggaagcctcatatttattgcgtttatcttgctccgcataaagggaaaatacgtattcatgctgcctatccaggttcaggctccaccacccgaggatagtgactctgggagcgatagtgactatgagcattacgatttttcagctcagcctcccgttgccctgactaccttttataacagccagcgccacagggtcacagatgaggaagttcaacagtcccggttccagatgccgcccctcgaggaggggctcgaagaactgcatgcctctcacatcccaactgcaaatcccggccattgtataacagaccctcccagtcttggccctcagtaccatcctcgttctaatagcgaaagctcaacgtcatcaggggaagactactgtaactcccctaaatccaagctgcctccatggaatccacaagtgttctcgagtgagcgcagcagcttcctggagcaacctcctaatctcgagctggctgggacacaacctgcctttagcggctccccctccccacagccagactccaccgacaatgatgactatgacgatatcagtgctgcttag

SEQ ID NO: 89045 - DNA, 1806 bp, Artificial Sequence
  derived and/or modified sequence
atgtggcttttcttcggtatcactggacttctgaccgcagcactgtcgggtcatcccagtcctgctccacctgaccagctgaatacttcctccgcggaatccgagttgtgggagcctggagaacgtctgcccgtcagactcacgaacggttcatccagctgtagcggcaccgtcgaggtgcgcctcgaggcttcctgggaacccgcatgcggagcactgtgggactccagagccgcagaggccgtctgtcgggctctgggatgtggaggggcagaggcggcaagccaactagcgcctccaacccccgaactccctccgcctccagctgcagggaatacatcagtcgctgctaatgccaccctcgcaggggctcctgccctgctctgcagcggggcagaatggcgactgtgcgaggtggtggagcacgcctgtaggtctgacggccgtagggccagggtaacctgcgccgagaatagggcactgcgattggtggacggcggtggcgcatgcgctggcagagtcgagatgctggagcatggcgagtggggtagtgtgtgtgacgatacatgggacttggaagatgcgcacgtggtatgcaggcagctggggtgcgggtgggcggttcaagcactaccaggccttcacttcaccccaggccgaggccctatacatcgggatcaagtgaactgtagcggtgctgaagcatatctctgggactgtccaggcctgcctgggcaacactactgcggacataaagaagatgctggtgctgtgtgcagtgagcaccagtcatggcgactgaccggaggcgcagatcgctgcgagggacaagtggaagtgcacttccgcggagtgtggaatactgtgtgtgattccgagtggtacccaagcgaggcgaaggtcctgtgccaaagtctggggtgtggcacagcagtggaacgaccgaagggtcttccgcactctcttagcggacggatgtattatagttgcaacggcgaggagctcacactcagcaattgtagttggagattcaataattctaacctgtgtagtcagagtttagctgctagggtcctgtgttcagctagtcgttccttacataacttgtcaacgcccgaagtgccagcctcagtccagactgtcacaatcgagtctagtgtgaccgtaaaaattgagaataaagagagccgagagctgatgttgttgataccaagcattgtgcttgggatccttcttctgggtagcctgatttttatcgcttttatcttgctcaggattaagggcaaatatgtgtttatgctgcctatccaggtgcaggccccacctccggaagattctgatagcggcagtgattccgactatgagcactacgacttcagtgctcagccgccagtggcactgacgacattttataattcccaacggcacagagtgaccgatgaggaggtgcagcagagccgattccaaatgccacctttggaagagggcctggaagaactccacgccagccatattcctaccgcgaatcctggtcactgtatcaccgatccgccttcactgggtcctcagtaccaccctcggtccaattcagagagtagcactagcagtggcgaagattactgtaattctcccaaatccaagctacccccatggaatccacaagtgttttcatccgaacgaagcagcttcctggagcagccaccaaacctggagctggcgggtacacagcctgccttttctgggtcaccgtcaccacagccagactccacggacaatgacgactacgacgacatcagcgcagcatag

SEQ ID NO: 89046 - DNA, 1809 bp, Artificial Sequence
  derived and/or modified sequence
atgtggctcttcttcgggatcactggattgctgacggcagccctctcaggtcatccatctccagccccacctgaccagctcaacaccagcagtgcagagagtgagctctgggagccaggggagcggcttccggtccgtctgacaaacgggagcagcagctgcagcgggacggtggaggtgcggctcgaggcgtcctgggagcccgcgtgcggggcgctctgggacagccgcgccgccgaggccgtgtgccgagcactgggctgcggcggggcggaggccgcctctcagctcgccccgccgacccctgagctgccgcccccgcctgcagccgggaacaccagcgtagcagctaatgccactctggccggggcgcccgccctcctgtgcagcggcgccgagtggcggctctgcgaggtggtggagcacgcgtgccgcagcgacgggaggcgggcccgtgtcacctgtgcagagaaccgcgcgctgcgcctggtggacggtggcggcgcctgcgccggccgcgtggagatgctggagcatggcgagtggggatcagtgtgcgatgacacttgggacctggaggacgcccacgtggtgtgcaggcaactgggctgcggctgggcagtccaggccctgcccggcttgcacttcacgcccggccgcgggcctatccaccgggaccaggtgaactgctcgggggccgaagcttacctgtgggactgcccggggctgccaggacagcactactgcggccacaaagaggacgcgggcgcggtgtgctcagagcaccagtcctggcgcctgacagggggcgctgaccgctgcgaggggcaggtggaggtacacttccgaggggtctggaacacagtgtgtgacagtgagtggtacccatcggaggccaaggtgctctgccagtccttgggctgtggaactgcggttgagaggcccaaggggctgccccactccttgtccggcaggatgtactactcatgcaatggggaggagctcaccctctccaactgctcctggcggttcaacaactccaacctctgcagccagtcgctggcagccagggtcctctgctcagcttcccggagtttgcacaatctgtccactcccgaagtccctgcaagtgttcagacagtcactatagaatcttctgtgacagtgaaaatagagaacaaggaatctcgggagctaatgctcctcatcccctccatcgttctgggaattctcctccttggctccctcatcttcatagccttcatcctcttgagaattaaaggaaaatatgttttcatgctgcccatccaggtccaggccccgccccctgaggactcagactctggctcggactcagactatgagcactatgacttcagcgcccagcctcctgtggccctgaccaccttctacaattcccagcggcatcgggtcacagatgaggaggtccagcaaagcaggttccagatgccacccttggaggaaggacttgaagagttgcatgcctcccacatcccaactgccaaccctggacactgcattacagacccgccatccctgggccctcagtatcacccgaggagcaacagtgagtcgagcacctcttcaggggaggattactgcaatagtcccaaaagcaagctgcctccatggaacccccaggtgttttcttcagagaggagttccttcctggagcagcccccaaacttggagctggccggcacccagccagccttttcagggtcccccagccctcagcctgactccaccgacaacgatgactacgatgacatcagcgcagcctaggcc

SEQ ID NO: 89047 - DNA, 1806 bp, Artificial Sequence
  derived and/or modified sequence
atgtggctgttcttcggcatcaccggcctgctgaccgccgccctgagcggccaccccagccccgccccccccgaccagctgaacaccagcagcgccgagagcgagctgtgggagcccggcgagagactgcccgtgagactgaccaacggcagcagcagctgcagcggcaccgtggaggtgagactggaggccagctgggagcccgcctgcggcgccctgtgggacagcagagccgccgaggccgtgtgcagagccctgggctgcggcggcgccgaggccgccagccagctggccccccccacccccgagctgccccccccccccgccgccggcaacaccagcgtggccgccaacgccaccctggccggcgcccccgccctgctgtgcagcggcgccgagtggagactgtgcgaggtggtggagcacgcctgcagaagcgacggcagaagagccagagtgacctgcgccgagaacagagccctgagactggtggacggcggcggcgcctgcgccggcagagtggagatgctggagcacggcgagtggggcagcgtgtgcgacgacacctgggacctggaggacgcccacgtggtgtgcagacagctgggctgcggctgggccgtgcaggccctgcccggcctgcacttcacccccggcagaggccccatccacagagaccaggtgaactgcagcggcgccgaggcctacctgtgggactgccccggcctgcccggccagcactactgcggccacaaggaggacgccggcgccgtgtgcagcgagcaccagagctggagactgaccggcggcgccgacagatgcgagggccaggtggaggtgcacttcagaggcgtgtggaacaccgtgtgcgacagcgagtggtaccccagcgaggccaaggtgctgtgccagagcctgggctgcggcaccgccgtggagagacccaagggcctgccccacagcctgagcggcagaatgtactacagctgcaacggcgaggagctgaccctgagcaactgcagctggagattcaacaacagcaacctgtgcagccagagcctggccgccagagtgctgtgcagcgccagcagaagcctgcacaacctgagcacccccgaggtgcccgccagcgtgcagaccgtgaccatcgagagcagcgtgaccgtgaagatcgagaacaaggagagcagagagctgatgctgctgatccccagcatcgtgctgggcatcctgctgctgggcagcctgatcttcatcgccttcatcctgctgagaatcaagggcaagtacgtgttcatgctgcccatccaggtgcaggcccccccccccgaggacagcgacagcggcagcgacagcgactacgagcactacgacttcagcgcccagccccccgtggccctgaccaccttctacaacagccagagacacagagtgaccgacgaggaggtgcagcagagcagattccagatgccccccctggaggagggcctggaggagctgcacgccagccacatccccaccgccaaccccggccactgcatcaccgacccccccagcctgggcccccagtaccaccccagaagcaacagcgagagcagcaccagcagcggcgaggactactgcaacagccccaagagcaagctgcccccctggaacccccaggtgttcagcagcgagagaagcagcttcctggagcagccccccaacctggagctggccggcacccagcccgccttcagcggcagccccagcccccagcccgacagcaccgacaacgacgactacgacgacatcagcgccgcctag

SEQ ID NO: 89048 - protein, 592 aa, Artificial Sequence
  derived and/or modified sequence
MWLFFGITGLLTAALSGHPSPAPPDQLNTSSAESELWEPGERLPVRLTNGSSSCSGTVEVRLEASWEPACGALWDSRAAEAVCRALGCGGAEAASQLAPPTPELPPPPAAGNTSVAANATLAGAPALLCSGAEWRLCEVVEHACRSDGRRARVTCAENRALRLVDGGGACAGRVEMLEHGEWGSVCDDTWDLEDAHVVCRQLGCGWAVQALPGLHFTPGRGPIHRDQVNCSGAEAYLWDCPGLPGQHYCGHKEDAGAVCSEHQSWRLTGGADRCEGQVEVHFRGVWNTVCDSEWYPSEAKVLCQSLGCGTAVERPKGLPHSLSGRMYYSCNGEELTLSNCSWRFNNSNLCSQSLAARVLCSASRSLHNLSTPEVPASVQTVTIESSVTVKIENKESRELMLLIPSIVLGILLLGSLIFIAFILLRIKGKYALPVMVNHQHLPTTIPAGSNSYQPVPITIPKEDSQRHRVTDEEVQQSRFQMPPLEEGLEELHASHIPTANPGHCITDPPSLGPQYHPRSNSESSTSSGEDYCNSPKSKLPPWNPQVFSSERSSFLEQPPNLELAGTQPAFSGSPSPQPDSTDNDDYDDISAA

SEQ ID NO: 89049 - DNA, 1779 bp, Artificial Sequence
  derived and/or modified sequence
atgtggctgttcttcggcatcacagggctcctcaccgccgctctttccggtcatcctagcccagcaccacccgaccagctaaatacttcctcggctgagagcgagctttgggaaccaggagaaagattgccggtccgccttaccaatgggagcagtagctgcagtggtacggtggaagtgcgccttgaagcctcctgggagccagcctgtggagcgctgtgggattcaagggcagcagaggccgtgtgtagagccctgggatgcggtggcgccgaggcggcgtcgcaactggcccccccgaccccagagcttcccccccctccagctgctggcaatacttccgtcgctgccaatgcgaccctggcgggcgcacctgcccttctgtgctccggggctgagtggaggctctgtgaagtcgtggagcacgcctgcaggtcagatggacgaagagccagagtgacttgtgctgagaacagggccctgaggttggtggatggggggggggcctgcgccggaagagtcgagatgctcgagcatggcgaatgggggtccgtctgcgacgacacttgggacctagaggacgctcatgtggtgtgcagacagctcggctgtggctgggctgtgcaggctttgcctggattgcacttcactcctggcaggggccccattcaccgcgaccaagtaaactgtagtggagccgaggcctatctatgggattgtccagggcttcccgggcagcactactgcggtcacaaggaagacgcaggcgcagtgtgcagtgaacaccaatcttggcggctcacgggcggtgctgatcgatgtgagggacaggtcgaggtgcatttccgcggtgtatggaacaccgtctgtgatagcgaatggtacccctctgaggccaaggtgttgtgccagtctctgggctgcggcaccgcggtcgagagaccaaaaggccttcctcattccctcagtggaagaatgtactacagctgcaacggggaagagttaaccctgagtaattgttcttggaggttcaacaactctaacttgtgttcccaaagtcttgccgccagagtattatgttccgcctcacgaagtcttcacaatctttccaccccagaggttccggccagtgtccagaccgtcaccattgaatcctccgtgaccgtaaaaattgagaataaagagtcgagggaacttatgttgctcatccccagcatcgtgctgggcattctcctgctcgggagcttgatcttcatcgcctttatccttctgcgaattaaggggaagtatgcactgcccgtgatggtaaatcaccagcatctacctactactattccggccggaagtaattcttaccagcctgtgcctattacaatacctaaagaggattcccagcgccacagggtgaccgacgaagaggtgcagcagtcccgatttcaaatgccaccactcgaggagggtctggaggagctgcatgcctcccacattccaacagcaaaccccggtcattgcattacagacccgccatcacttggcccccagtaccaccctcggagcaatagtgagagcagcacttcttccggggaagattattgcaacagcccaaaaagtaagttgccaccttggaatccacaggtgtttagctctgagcgttcatcatttctcgagcagccaccaaatctggaactggcgggaacccagcccgccttctccgggagtccatctccccagcccgacagcaccgataacgatgactatgacgacatttcagcagcctag

SEQ ID NO: 89050 - DNA, 1779 bp, Artificial Sequence
  derived and/or modified sequence
atgtggctgttcttcggcatcaccggcctgctgacagctgccctgagcggccaccccagccctgcccccccagaccagctgaacaccagcagcgctgagagcgagctgtgggagcctggagagcggctgcctgtgcggctgaccaacggcagcagcagctgcagcggcaccgtggaggtgcggctggaggcctcctgggagcccgcctgtggggccctgtgggacagcagagctgctgaggccgtgtgccgggccctgggctgcggcggcgctgaggccgccagccagctggccccacccaccccagagctgcccccacctcctgctgctggcaacacctctgtggccgccaatgccaccctggccggggccccagccctgctgtgcagcggggctgagtggaggctgtgtgaggtggtggagcacgcctgccgcagtgatggaagaagagcccgggtgacctgtgctgaaaatagagccctgcggctggtggatggcggcggggcctgtgccggccgggtggagatgctggagcacggggagtggggctctgtgtgtgatgacacctgggacctggaggatgcccacgtggtgtgccggcagctgggctgcggctgggccgtgcaggccctgcccggcctgcacttcaccccaggccggggccccatccaccgggaccaggtgaactgcagcggggctgaggcctacctgtgggactgccccggcctgcccggccagcactactgcggccacaaggaggatgctggagctgtgtgcagcgagcaccagagctggaggctgaccggcggcgctgacagatgtgagggccaggtggaggtgcacttccggggcgtgtggaacacagtgtgtgacagcgagtggtaccccagcgaggccaaggtgctgtgccagagcctgggctgcggcacagctgtggagcggcccaagggcctgccccacagcctgagcggccgcatgtactacagctgcaatggagaggagctgaccctgagcaactgctcctggaggttcaacaacagcaacctgtgcagccagagcctggccgcccgggtgctgtgcagcgccagccgcagcctgcacaacctgagcaccccagaggtgcctgcctctgtgcagacagtgaccatcgagagctctgtgacagtgaagattgagaacaaggagagccgggagctgatgctgctgatccccagcatcgtgctgggcatcctgctgctgggcagcctcatcttcatcgccttcatcctgctgcgcatcaagggcaagtatgccctgcctgtgatggtgaaccaccagcacctgcccaccaccatcccagctggcagcaacagctaccagcctgtgcccatcaccatccccaaggaggacagccagaggcaccgggtgacagatgaggaggtgcagcagagccgcttccagatgccacccctggaggagggcctggaggagctgcacgccagccacatccccacagccaaccctggccactgcatcacagacccccccagcctgggcccccagtaccaccccaggagcaacagcgagagcagcaccagcagtggagaggactactgcaacagccccaagagcaagctgcccccctggaacccccaggtgttcagcagcgagaggagcagcttcctggagcagccccccaacctggagctggccggcacccagcctgccttcagcggcagccccagcccccagcctgacagcacagacaatgatgattatgatgacatctctgctgcctag

SEQ ID NO: 89051 - DNA, 1779 bp, Artificial Sequence
  derived and/or modified sequence
atgtggctgttcttcggcatcaccggcctgctgaccgccgccctgtctgggcatccttccccagcacctcctgaccagctcaacacttccagcgcagaatccgaactgtgggagcccggcgagagactgccagttaggctcaccaacggcagcagctcttgtagcggcactgtcgaggttcgcttggaagcatcttgggaacccgcgtgcggggccctgtgggattcacgagctgccgaggctgtgtgccgcgctctggggtgcggcggagctgaggcagctagccagctagcccctcctacacctgagctaccccccccacctgccgctgggaacacctctgtggcggctaatgccacactggccggggcccctgccctgttatgttctggtgctgagtggaggttatgcgaggtcgtagagcacgcctgccgcagcgatgggcgcagggccagagtgacatgtgccgagaacagggccttgagattagtcgatggcggaggggcctgcgccgggcgggtggaaatgcttgaacatggtgagtggggttctgtgtgcgacgacacatgggacctggaggatgcgcacgtagtttgtcgccagctgggatgtggatgggcagttcaggccctgccaggcttgcactttactccaggccggggaccaattcatagagaccaggtgaactgtagcggagcagaggcctatctgtgggactgtccgggcctaccgggacagcattactgcgggcataaggaggacgcaggagctgtgtgttccgagcatcagagctggagattgaccggcggggctgatcgctgtgaaggacaggttgaagtccatttcaggggagtgtggaacacggtgtgcgactctgaatggtatccttctgaggcaaaggttctgtgtcaatctctcgggtgcgggactgcagtggagcggcccaagggactgcctcactcactttccggtcgcatgtattattcctgcaatggcgaggagctaacgctctcaaactgtagttggaggtttaacaacagtaatctgtgttcccagagccttgccgccagggtgttgtgttctgcttccaggtccttacataatctctctacacctgaagtgcccgcatccgttcagaccgtaacgatcgaaagcagtgttacggtcaaaatcgagaataaggagtcacgcgaactgatgctgctaatcccctcaatcgtcctgggaatcctgctgctgggttccttgatctttatcgcattcattctgctgaggattaagggcaaatacgccctgcctgtgatggtcaatcaccaacacctgccaactactatcccagcgggtagtaatagttatcagccagttccaattacaatccctaaggaggactcgcaacggcatcgagtaaccgacgaggaggttcagcagagtagatttcaaatgcctcccttggaagaggggttagaagagttgcacgcctcccatatcccgaccgcaaacccagggcactgcataaccgacccgccctccctggggccccaataccatccaagaagcaactctgaatctagtacctctagcggggaagattattgcaatagcccaaaatctaagcttcccccatggaacccccaggttttttctagcgaacgatccagtttcctcgagcaacctccaaacttagaactcgcggggacacagccagcgttcagcggatcaccgtccccccagccggacagcacagacaacgacgactatgacgatatttcagctgcctag

SEQ ID NO: 89052 - DNA, 1779 bp, Artificial Sequence
  derived and/or modified sequence
atgtggctatttttcggtattactggtttactcactgcggcactgtctgggcaccccagccccgcaccacctgaccaactcaatacatcttcggccgagtctgaattatgggaacccggagagaggctcccggtgcggttgaccaacggtagctcaagttgctccggcaccgtagaggtaaggctggaggcgtcatgggagcccgcttgtggagcgttgtgggattcgagggctgccgaggccgtgtgcagggctctgggttgtggcggtgctgaggccgcttcacagcttgctccgccaactccagagctgccacctcctccagccgctggtaacaccagcgtcgccgctaatgcgacgcttgctggtgccccagcactcctctgtagcggcgctgaatggcggctgtgcgaggttgttgagcatgcttgcagatctgatggacgcagagctcgagtcacatgtgccgaaaatcgggcattacgattagtggacggcggtggagcgtgtgccggacgagtcgagatgctggaacacggggagtgggggagcgtgtgcgacgatacatgggacctggaagacgcccacgtcgtatgtaggcagctgggctgcggctgggcagtgcaagctcttccaggactacattttacaccagggcgagggccaattcatcgcgaccaggtgaattgtagcggagccgaggcatatctgtgggactgtccgggactcccaggtcaacattactgcggtcataaggaagatgcaggcgctgtgtgctccgaacaccagagctggcggctgaccggcggagctgaccggtgcgaaggacaggtggaggttcactttcggggagtgtggaataccgtttgcgactctgaatggtaccccagcgaggcgaaggtattgtgccaaagtcttggctgcggaacggcagtggagcggcctaagggactgcctcattctctgagtgggaggatgtactactcttgtaacggagaggaactgaccctgtccaactgtagctggcgcttcaacaatagtaatctctgcagtcagagtttggctgcccgagtgttgtgctccgcatcaaggtcattacataacctgagcaccccggaggtgcctgcatctgtacagacggtcactattgagtccagcgttaccgtcaagatcgagaacaaggagagccgggagctgatgctgctaatcccgtccatagtcctgggtatcctcctgctcgggagcttaatcttcatcgcattcattctacttcgaataaagggaaaatatgccctgccggtgatggtcaaccatcagcatctgcctacaaccatccctgctggctccaacagctaccagccagtaccaattactattcctaaagaagatagccagaggcaccgtgtcacggacgaggaagttcagcaatcgaggtttcaaatgcccccactagaggagggcctagaggagttgcacgcctctcacattcctaccgccaaccctgggcattgtattacagaccccccatccctagggccacaataccaccctcgatctaactctgagtcttcaacgtcaagtggcgaagactactgtaattccccaaagtcgaagttgccaccctggaacccccaggtgttttcctccgagcgctctagttttctcgagcagcctcctaaccttgagctggccggaacacagccagccttttccggcagccccagtccccagcctgactctaccgataatgacgactatgacgatatcagcgcagcatag

SEQ ID NO: 89053 - DNA, 1782 bp, Artificial Sequence
  derived and/or modified sequence
atgtggctcttcttcgggatcactggattgctgacggcagccctctcaggtcatccatctccagccccacctgaccagctcaacaccagcagtgcagagagtgagctctgggagccaggggagcggcttccggtccgtctgacaaacgggagcagcagctgcagcgggacggtggaggtgcggctcgaggcgtcctgggagcccgcgtgcggggcgctctgggacagccgcgccgccgaggccgtgtgccgagcactgggctgcggcggggcggaggccgcctctcagctcgccccgccgacccctgagctgccgcccccgcctgcagccgggaacaccagcgtagcagctaatgccactctggccggggcgcccgccctcctgtgcagcggcgccgagtggcggctctgcgaggtggtggagcacgcgtgccgcagcgacgggaggcgggcccgtgtcacctgtgcagagaaccgcgcgctgcgcctggtggacggtggcggcgcctgcgccggccgcgtggagatgctggagcatggcgagtggggatcagtgtgcgatgacacttgggacctggaggacgcccacgtggtgtgcaggcaactgggctgcggctgggcagtccaggccctgcccggcttgcacttcacgcccggccgcgggcctatccaccgggaccaggtgaactgctcgggggccgaagcttacctgtgggactgcccggggctgccaggacagcactactgcggccacaaagaggacgcgggcgcggtgtgctcagagcaccagtcctggcgcctgacagggggcgctgaccgctgcgaggggcaggtggaggtacacttccgaggggtctggaacacagtgtgtgacagtgagtggtacccatcggaggccaaggtgctctgccagtccttgggctgtggaactgcggttgagaggcccaaggggctgccccactccttgtccggcaggatgtactactcatgcaatggggaggagctcaccctctccaactgctcctggcggttcaacaactccaacctctgcagccagtcgctggcagccagggtcctctgctcagcttcccggagtttgcacaatctgtccactcccgaagtccctgcaagtgttcagacagtcactatagaatcttctgtgacagtgaaaatagagaacaaggaatctcgggagctaatgctcctcatcccctccatcgttctgggaattctcctccttggctccctcatcttcatagccttcatcctcttgagaattaaaggaaaatatgccctccccgtaatggtgaaccaccagcacctacccaccaccatcccggcagggagcaatagctatcaaccggtccccatcaccatccccaaagaagattcccagcggcatcgggtcacagatgaggaggtccagcaaagcaggttccagatgccacccttggaggaaggacttgaagagttgcatgcctcccacatcccaactgccaaccctggacactgcattacagacccgccatccctgggccctcagtatcacccgaggagcaacagtgagtcgagcacctcttcaggggaggattactgcaatagtcccaaaagcaagctgcctccatggaacccccaggtgttttcttcagagaggagttccttcctggagcagcccccaaacttggagctggccggcacccagccagccttttcagggtcccccagccctcagcctgactccaccgacaacgatgactacgatgacatcagcgcagcctaggcc

SEQ ID NO: 89054 - DNA, 1779 bp, Artificial Sequence
  derived and/or modified sequence
atgtggctgttcttcggcatcaccggcctgctgaccgccgccctgagcggccaccccagccccgccccccccgaccagctgaacaccagcagcgccgagagcgagctgtgggagcccggcgagagactgcccgtgagactgaccaacggcagcagcagctgcagcggcaccgtggaggtgagactggaggccagctgggagcccgcctgcggcgccctgtgggacagcagagccgccgaggccgtgtgcagagccctgggctgcggcggcgccgaggccgccagccagctggccccccccacccccgagctgccccccccccccgccgccggcaacaccagcgtggccgccaacgccaccctggccggcgcccccgccctgctgtgcagcggcgccgagtggagactgtgcgaggtggtggagcacgcctgcagaagcgacggcagaagagccagagtgacctgcgccgagaacagagccctgagactggtggacggcggcggcgcctgcgccggcagagtggagatgctggagcacggcgagtggggcagcgtgtgcgacgacacctgggacctggaggacgcccacgtggtgtgcagacagctgggctgcggctgggccgtgcaggccctgcccggcctgcacttcacccccggcagaggccccatccacagagaccaggtgaactgcagcggcgccgaggcctacctgtgggactgccccggcctgcccggccagcactactgcggccacaaggaggacgccggcgccgtgtgcagcgagcaccagagctggagactgaccggcggcgccgacagatgcgagggccaggtggaggtgcacttcagaggcgtgtggaacaccgtgtgcgacagcgagtggtaccccagcgaggccaaggtgctgtgccagagcctgggctgcggcaccgccgtggagagacccaagggcctgccccacagcctgagcggcagaatgtactacagctgcaacggcgaggagctgaccctgagcaactgcagctggagattcaacaacagcaacctgtgcagccagagcctggccgccagagtgctgtgcagcgccagcagaagcctgcacaacctgagcacccccgaggtgcccgccagcgtgcagaccgtgaccatcgagagcagcgtgaccgtgaagatcgagaacaaggagagcagagagctgatgctgctgatccccagcatcgtgctgggcatcctgctgctgggcagcctgatcttcatcgccttcatcctgctgagaatcaagggcaagtacgccctgcccgtgatggtgaaccaccagcacctgcccaccaccatccccgccggcagcaacagctaccagcccgtgcccatcaccatccccaaggaggacagccagagacacagagtgaccgacgaggaggtgcagcagagcagattccagatgccccccctggaggagggcctggaggagctgcacgccagccacatccccaccgccaaccccggccactgcatcaccgacccccccagcctgggcccccagtaccaccccagaagcaacagcgagagcagcaccagcagcggcgaggactactgcaacagccccaagagcaagctgcccccctggaacccccaggtgttcagcagcgagagaagcagcttcctggagcagccccccaacctggagctggccggcacccagcccgccttcagcggcagccccagcccccagcccgacagcaccgacaacgacgactacgacgacatcagcgccgcctag

SEQ ID NO: 89055 - protein, 339 aa, Artificial Sequence
  derived and/or modified sequence
MVSKSRWKLLAMLALVLVVMVWYSISREDRYIELFYFPIPEKKEPCLQGEAESKASKLFGKLSPLCSYSRDQPIFLRLEDYFWVKTPSAYELPYGTKGSEDLLLRVLAITSSSIPKNIQSLRCRRCVVVGNGHRLRNSSLGDAINKYDVVIRLNNAPVAGYEGDVGSKTTMRLFYPESAHFDPKVENNPDTLLVLVAFKAMDFHWIETILSDKKRVRKGFWKQPPLIWDVNPKQIRILNPFFMEIAADKLLSLPMQQPRKIKQKPTTGLLAITLALHLCDLVHIAGFGYPDAYNKKQTIHYYEQITLKSMAGSGHNVSQEALAIKRMLEMGAIKNLTSF

SEQ ID NO: 89056 - protein, 333 aa, Artificial Sequence
  derived and/or modified sequence
MVSKSRWKLLAMLALVLVVMVWYSISREDRYIELFYFPIPEKKEPCLQGEAESKASKLFGNYSRDQPIFLRLEDYFWVKTPSAYELPYGTKGSEDLLLRVLAITSSSIPKNIQSLRCRRCVVVGNGHRLRNSSLGDAINKYDVVIRLNNAPVAGYEGDVGSKTTMRLFYPESAHFDPKVENNPDTLLVLVAFKAMDFHWIETILSDKKRVRKGFWKQPPLIWDVNPKQIRILNPFFMEIAADKLLSLPMQQPRKIKQKPTTGLLAITLALHLCDLVHIAGFGYPDAYNKKQTIHYYEQITLKSMAGSGHNVSQEALAIKRMLEMGAIKNLTSF

SEQ ID NO: 89057 - DNA, 1020 bp, Artificial Sequence
  derived and/or modified sequence
atggtgtccaaaagcaggtggaagctgttggcaatgttggctctcgtgctcgtagttatggtctggtatagcatctccagagaggataggtatatcgaactcttctattttcccattcctgaaaaaaaggagccctgtctgcagggagaggcagagtccaaggccagcaaacttttcgggaaactgtcccctctgtgctcctactcaagggaccaaccaatatttctccgactggaagactacttctgggtcaaaacacccagcgcttatgagctgccatatggtactaagggctccgaggatctgttgcttagggttcttgcaatcacatcttcctcaatccccaagaacatacagtcactaaggtgcagacggtgtgttgtagtggggaacggacaccgcttgcgcaacagcagtctgggggatgccatcaataaatacgacgtcgttattcgcctgaataatgcccctgttgcaggatatgagggtgatgtggggtcaaagactactatgaggctcttttatcctgagtcagcgcattttgaccctaaagttgagaacaatcctgatacgcttcttgtcttggttgctttcaaagcaatggatttccattggatcgaaaccatactgagtgataaaaaaagagtccgcaagggtttctggaaacagcctccattgatctgggatgttaatcctaaacagatacgaattctaaaccccttcttcatggaaatagctgctgacaaactgctaagtctgcccatgcagcagcctcgcaagattaaacagaaaccaacgaccgggctcttggctattaccctcgctcttcatctgtgtgatctggtgcacattgcagggtttggataccccgatgcctacaacaagaagcagaccatacactattatgaacagatcaccttaaagagcatggcgggatctggacacaacgtttctcaggaagctcttgccattaaacgtatgctggaaatgggagctattaagaacctgacctcattttag

SEQ ID NO: 89058 - DNA, 1002 bp, Artificial Sequence
  derived and/or modified sequence
atggtctcgaagagccgctggaaactcctggcgatgctggctctcgtcctggtcgtgatggtctggtattcaatttccagagaggatcgatacatcgaacttttttacttccccattcccgagaaaaaggagccctgcctacagggcgaggctgagtcaaaggccagtaagttgtttggcaactacagtagagatcagcccatcttcctccggctggaggactacttctgggtaaaaaccccaagcgcatatgaactgccatacggcacaaagggatctgaggacctccttctcagagttctcgccattacctctagcagcatccccaaaaacattcagtccctaagatgcaggcggtgtgtggtggtcggtaatggtcaccgcctgaggaatagcagtctaggtgacgccataaataagtacgatgttgtgatccgattgaacaacgctccggtcgctgggtatgagggcgatgtgggatctaaaaccacaatgaggctgttttatcccgagagcgcccactttgacccgaaagtggaaaacaatcctgacactttactggtactagtcgccttcaaagccatggacttccattggatcgaaactatcctgagcgacaaaaaacgcgttaggaaggggttctggaaacagccacctttaatctgggatgtgaatcccaagcagatacgaatcctgaatccctttttcatggagattgccgctgacaagctcttaagtttaccgatgcaacagccgaggaaaatcaaacagaagcccaccaccggtctactcgcgataactctcgccctccacctttgcgatctggtgcatattgcaggctttggatatcccgatgcttacaataaaaagcagacaatccactattatgagcagatcaccttaaaaagtatggccggatcagggcacaacgtctcacaggaggcattggccatcaagcggatgctggagatgggagccattaaaaacctcacaagtttctag

SEQ ID NO: 89059 - DNA, 1002 bp, Artificial Sequence
  derived and/or modified sequence
atggtgtccaaaagccgttggaaactgctcgccatgctcgctctagtgttagtggtgatggtctggtacagcattagccgcgaggacagatatattgagctgttctattttccaattccggaaaagaaggagccttgccttcaaggagaagcagaaagtaaggcaagtaagctgtttggtaactattctcgggaccaacccatctttctgaggctagaagattacttttgggtgaagaccccctccgcttacgagttaccgtatggaacaaaggggagcgaggacctgctgctccgtgtcctggccattacctcttcatctattcccaagaacattcaatctcttcgctgtcggaggtgcgtggtagtgggcaatgggcaccgtctaagaaacagcagtctaggggatgcgatcaacaaatacgatgtggtgatcagactcaataatgccccagttgctggttacgaaggcgatgttggctccaagacgacaatgcgcctcttttacccagagagtgcacactttgaccccaaggttgagaacaaccccgacacactacttgtgctcgtcgccttcaaagcaatggactttcactggattgagacaatcctgtccgacaagaagcgagtgcggaaaggtttctggaaacagcctcctctgatctgggacgtgaatcctaaacaaatcagaatcctgaacccatttttcatggagatcgccgctgataaactgctatccctaccaatgcagcagccaagaaaaattaaacaaaaaccgactacgggtctccttgctattacccttgctttgcacctctgcgacttagttcatattgcaggattcggctaccccgacgcctacaacaagaaacagacgattcactactacgaacagataacactgaaaagtatggccggatccgggcataatgtctcacaggaggccctcgctataaaaaggatgctcgaaatgggcgctatcaagaacctgactagtttctag

SEQ ID NO: 89060 - DNA, 1002 bp, Artificial Sequence
  derived and/or modified sequence
atggtgagtaagtctaggtggaagttattggccatgttagcgctcgtattggtcgtcatggtatggtattcaatctccagggaggacagatacatcgaacttttctatttcccaataccagaaaagaaggagccttgcttacaaggtgaggccgaatccaaggccagcaaactttttggtaattattctcgggatcagccgatctttctgcgtctggaggactatttctgggtgaaaacaccttctgcctatgagctgccatacggtactaagggctctgaagacctcctgttgagggtgctcgccattacaagctcaagcatcccgaagaacatccagtccttaagatgcaggcgatgcgtggtagttgggaatggccaccggctccgaaacagctccctgggagatgcaattaacaagtacgacgtggtgatccggctaaacaacgcgcctgttgccggttacgagggggacgtgggtagcaaaacaacaatgaggctattctaccctgagagcgcacatttcgatcctaaagtagagaacaatcccgacactctcttggtgttggtggcttttaaagccatggatttccattggattgagaccattctctcagataaaaaacgtgtgcggaagggtttctggaagcagccacccctcatctgggacgtcaatcccaagcagatccggattttgaatccattcttcatggagatcgctgcagacaaactcctgtctctcccaatgcagcagccacgtaaaatcaagcagaaacccaccactggacttctcgccatcacgctggctcttcatctgtgtgacctggtgcatattgccggtttcggatacccagacgcatacaataagaagcagacaatccactactatgaacaaatcaccctgaagagtatggcaggctctggccataatgtgagccaggaagcactcgctatcaagcgtatgctggaaatgggcgctatcaagaatttgacatctttctag

SEQ ID NO: 89061 - DNA, 1002 bp, Artificial Sequence
  derived and/or modified sequence
atggtctctaagagtaggtggaagctccttgctatgttggctctggtgctggtagtcatggtttggtatagtatatcacgcgaggaccggtacatcgagctcttctactttccaatccccgagaagaaagaaccgtgcctccagggggaagctgaaagcaaggcgagcaagctgtttgggaattactctagggaccaacctatttttctccggctcgaagactacttctgggtaaagactccttccgcttacgagcttccatacgggaccaagggaagcgaagatctgctattaagggtcctggcgatcacatccagctccatccctaagaacattcagtccctgagatgccggaggtgtgtcgttgtggggaacggtcacagactacgcaactcatcattaggtgacgccatcaacaagtacgatgtggtaataaggctaaataacgcgcctgtggcgggatacgagggtgatgtgggatccaaaacaactatgaggctgttctaccctgagtctgcccactttgatcccaaagttgagaataaccccgacacgctactggtgctcgtcgctttcaaggcgatggacttccactggattgagactattctctccgataaaaagcgagtgagaaaggggttctggaaacaacccccactgatctgggacgttaacccaaagcagattcggattttgaatccctttttcatggagatcgctgcggacaagctcctgagcctgccaatgcaacaacccaggaaaatcaaacaaaagcctactactggtctactcgccattacattggccctgcatctttgcgacctggtgcacatcgccggattcggctatcctgacgcttacaacaaaaaacagaccattcactactatgaacaaatcacgttaaagagtatggcaggatccgggcataacgtgagtcaggaagcattggccatcaagcgcatgttagagatgggggctattaaaaacctcacgtcattttag

SEQ ID NO: 89062 - DNA, 1020 bp, Artificial Sequence
  derived and/or modified sequence
atggtatcaaaatccagatggaaattgctagccatgctcgcgcttgttctggtggtaatggtgtggtactcaatcagtcgagaggatcggtatatcgagctgttctacttccccattcccgagaaaaaggagccctgtctacaaggcgaggccgaatccaaggccagcaaactgtttggcaaactgtcaccactatgtagttactcacgggatcagcctatctttctgagattggaagattacttttgggtcaaaaccccctctgcctacgagctcccgtacggcaccaaaggctctgaagacttgctgcttcgagttctggccattacatcctccagcatccccaagaacatccagtcactgcgctgcagacggtgtgttgtggtgggtaacggacacaggttgcgtaacagcagcctgggcgacgccatcaacaaatacgacgtcgtcattcgactgaacaatgcccccgtggccgggtatgaaggtgatgtgggatcaaaaacaaccatgcgtctgttttacccggaaagtgcacatttcgatcctaaggtggaaaacaatcccgacaccctattggttctggtcgcgtttaaagctatggactttcactggatagagacgatactatccgataaaaagcgcgtgagaaaaggtttctggaagcaacctcctctcatctgggacgtcaacccaaagcagatacgcatcctgaaccccttttttatggaaatagccgccgacaagcttctatcgctccctatgcagcaaccccggaagattaaacagaaacctaccactgggttacttgccatcacgctcgctcttcacttgtgtgatctggtccacatagctggtttcggctaccctgacgcatataataaaaaacagaccattcattactatgagcagattacactaaaatccatggccggctccggacacaacgttagtcaagaggcgttggcgatcaagcgtatgctggagatgggcgccatcaagaatctgacttctttctag

SEQ ID NO: 89063 - DNA, 1002 bp, Artificial Sequence
  derived and/or modified sequence
atggtttccaagagccggtggaagttacttgcgatgctcgcactcgtcctggtggtcatggtgtggtactctattagtcgggaagatcgatatatcgaactcttctatttcccaattccagaaaaaaaggaaccgtgcctgcagggtgaagccgaatctaaggccagtaagctctttgggaactactcccgggaccaacccattttcctgagactcgaagattatttttgggtaaagacaccgagcgcctatgaactcccctatgggactaagggaagtgaggatctgctgctgcgagttcttgcaatcactagcagttctattcctaaaaacattcagtcactccgatgtcgacgctgtgtggttgtaggaaatggacaccgcctgcgaaacagctcattaggcgacgctatcaataagtatgatgtggtcattaggctaaataacgcacccgtggctgggtacgagggagacgtaggctccaagaccacaatgaggctgttttatcccgagagcgcccattttgatcccaaggtggaaaataatcccgataccctcctggtgttggtggctttcaaagcgatggattttcactggattgagaccatcctttcagataagaaaagagtgaggaaaggcttctggaagcagccacccctgatatgggacgtgaaccccaagcaaatccggatcctgaatcccttttttatggagattgccgctgacaagctcctctccctgccaatgcagcagccgagaaaaataaagcagaagccaacaactgggctccttgctattacacttgctttacatttatgcgacctggttcatatcgcgggttttggttacccagacgcttacaataaaaagcaaactatacactactacgaacagatcacactaaagtctatggcaggctctggtcataacgtgtcacaagaggctctggccatcaaaagaatgcttgagatgggcgccatcaagaacctgacatcattttag

SEQ ID NO: 89064 - DNA, 1002 bp, Artificial Sequence
  derived and/or modified sequence
atggtatcgaagtcacgctggaagttattagcgatgctggcactcgttttggtggtcatggtgtggtattcaatttccagggaggaccggtacattgaactcttctatttccccattcctgaaaaaaaagagccctgcctccagggcgaagccgagagtaaagccagcaaactctttggaaactatagcagagaccaacccatttttcttagattggaggactacttctgggtcaagaccccaagcgcttacgaactgccatacgggacgaaaggaagcgaggacttgctcctccgtgttctggcaattacctcctctagtattcccaagaacatacagagcttgcggtgcaggagatgtgttgtcgttggaaatggccaccgtttgcggaattccagccttggcgatgccatcaacaagtatgacgtggtaatccgactaaacaacgcccccgttgcaggatacgaaggagacgtggggagtaagactactatgaggttgttctaccctgaaagtgcacatttcgaccccaaggtcgagaacaaccctgatactctcctcgtcttagtagctttcaaagccatggatttccactggatcgaaacgatcttgtctgataaaaagagagtgagaaaaggcttctggaagcagcccccccttatttgggacgttaacccaaagcagattaggatcctgaaccctttcttcatggagattgccgcagataaattgctctcactgcccatgcagcagcctcgtaagattaagcaaaagcctactactggcctgttggccataaccctggccttacacctgtgtgacctagtccacatcgcaggattcggctaccctgacgcctacaacaagaaacagacaatacactattatgagcagataacattaaagtctatggcgggtagcggacacaatgttagtcaggaggccctcgcgattaaacgaatgcttgagatgggcgcgatcaaaaacctcacttctttttag

SEQ ID NO: 89065 - DNA, 1002 bp, Artificial Sequence
  derived and/or modified sequence
atggtgtcaaaaagtagatggaaactgctggctatgctggccttagtgctggtggttatggtgtggtatagtatatcacgagaggaccggtatatcgaactattctattttccaatccccgaaaaaaaggaaccatgcttacagggcgaagctgaaagcaaggcaagcaaactgtttggtaattacagcagagatcagccaatttttctcagactggaagattatttctgggtcaaaactcccagcgcctatgagctcccttatggcacaaaggggagcgaagaccttctgttgcgagtgctggcaatcacatcctcatccattcccaagaacattcagtccttaagatgcagacggtgcgtggtggttggcaacggccatcgcctccggaactcctcgttgggggatgctatcaataagtacgacgttgtcataaggctaaataatgccccagtggccggctatgaaggcgacgtcggcagcaagacgaccatgcggcttttttaccctgaatctgcccactttgaccctaaggtagagaacaatcccgacactctcctcgtgctggtggcttttaaggccatggacttccattggattgagaccattttgagcgacaagaaacgcgtgcgaaagggcttctggaagcaaccaccactgatctgggatgtcaaccccaagcagattcgcatattgaaccccttctttatggagattgccgctgacaagctgctttcccttccaatgcagcagcctcgcaagattaaacaaaaaccaacaaccggactcttagctatcacgcttgccctgcatctgtgcgatctcgtgcacattgccggttttgggtaccccgacgcttacaacaagaaacagacaattcactattacgagcagattacactgaaaagcatggctgggtcaggtcacaacgtctcacaggaagccctcgcaattaagcggatgttagaaatgggggctattaaaaacctgacaagcttctag

SEQ ID NO: 89066 - DNA, 1002 bp, Artificial Sequence
  derived and/or modified sequence
atggtatcgaaatcgcgatggaagttgctcgccatgctggccctggtcctcgttgtgatggtatggtatagcatttcaagagaagatcgatatatagaacttttctacttccctattccagagaaaaaagagccttgtctccagggagaggctgagtcgaaggcgagtaaattgttcggcaattatagtcgggaccagccaatattcttgcgtctcgaagattatttttgggtaaagacaccaagcgcatacgagcttccttatggcactaaaggaagtgaggatcttctcctcagggtgttggccattactagctcttccatccctaagaatatacagagtctgcgttgccgtcgctgcgtggtggttggcaatggccatcgccttcgcaatagctcattaggagacgccatcaacaaatatgatgttgtgatcagacttaacaacgctcccgtggccggctacgaaggtgatgtgggatcaaagacaacaatgcgcctgttttatcccgaatccgctcactttgatcctaaggttgagaataacccagatactctcctagtgttggtcgccttcaaagcgatggactttcattggatcgagactattctcagcgataaaaaaagagttcgcaagggattttggaaacagccacctctgatctgggacgtcaaccctaagcagatacgaattctgaacccctttttcatggaaattgccgctgacaagctgctatccctgccaatgcaacaacctagaaagataaaacagaagccaacaaccggtcttttagctattactctggcactccacttatgtgacctggtacacattgctggttttggctaccccgacgcttacaataagaaacagacaatccattactacgaacagatcactctcaaaagcatggccggcagcgggcacaacgttagccaggaggctctagccatcaagcggatgctggagatgggtgcaataaagaatttaactagcttctag

SEQ ID NO: 89067 - DNA, 1812 bp, Artificial Sequence
  derived and/or modified sequence
ctgcaggcggactcgcccgctcccaggccggacccgcgcccgggacagggacccggccgagtcgagccgtcgcgccagcgctgcgccgccggtcggtgcgcctagcggatcggagctgcgcgcggaaccgtgctgccccgccccgctccacccgtgagggtggcccgaggcagccgggatgacagctctccccaggaatcctgctgcctgctgagaaacatggtcagcaagtcccgctggaagctcctggccatgttggctctggtcctggtcgtcatggtgtggtattccatctcccgggaagacaggtacatcgagcttttttattttcccatcccagagaagaaggagccgtgcctccagggtgaggcagagagcaaggcctctaagctctttggcaactactcccgggatcagcccatcttcctgcggcttgaggattatttctgggtcaagacgccatctgcttacgagctgccctatgggaccaaggggagtgaggatctgctcctccgggtgctagccatcaccagctcctccatccccaagaacatccagagcctcaggtgccgccgctgtgtggtcgtggggaacgggcaccggctgcggaacagctcactgggagatgccatcaacaagtacgatgtggtcatcagattgaacaatgccccagtggctggctatgagggtgacgtgggctccaagaccaccatgcgtctcttctaccctgaatctgcccacttcgaccccaaagtagaaaacaacccagacacactcctcgtcctggtagctttcaaggcaatggacttccactggattgagaccatcctgagtgataagaagcgggtgcgaaagggtttctggaaacagcctcccctcatctgggatgtcaatcctaaacagattcggattctcaaccccttcttcatggagattgcagctgacaaactgctgagcctgccaatgcaacagccacggaagattaagcagaagcccaccacgggcctgttggccatcacgctggccctccacctctgtgacttggtgcacattgccggctttggctacccagacgcctacaacaagaagcagaccattcactactatgagcagatcacgctcaagtccatggcggggtcaggccataatgtctcccaagaggccctggccattaagcggatgctggagatgggagctatcaagaacctcacgtccttctgacctgggcaagagctgtagcctgtcggttgcctactctgctgtctgggtgacccccatgcgtggctgtgggggtggctggtgccagtatgacccacttggactcaccccctcttggggagggagttctgggcctggccaggtctgagatgaggccatgcccctggctgctcttatggagccgagatccagtcagggtgggggcgctggagccgtgggagcccggccagggcagggggctcgttgctgtggcaccccctctctgccagcaccaagagattatttaatgggctatttaattaaggggtaggaaggtgctgtgggctggtcccacacatccaggaaagaggccagtagagaattctgcccactttttataaaaacttacagcgatggccccaccaaggcctagacacggcactggcctcccaggagggcaggggcattgggaatgggtgggtgccctccagagaggggctgctacctcccagcaggcatgggaagagcactggtgtgggggttccaccgagaaggggacctcatctagaaaagaggttacaaacctaccattaaactatttttcctaaaacggaa

SEQ ID NO: 89068 - DNA, 1020 bp, Artificial Sequence
  derived and/or modified sequence
atggtatcaaaatccagatggaaattgctagccatgctcgcgcttgttctggtggtaatggtgtggtactcaatcagtcgagaggatcggtatatcgagctgttctacttccccattcccgagaaaaaggagccctgtctacaaggcgaggccgaatccaaggccagcaaactgtttggcaaactgtcaccactatgtagttactcacgggatcagcctatctttctgagattggaagattacttttgggtcaaaaccccctctgcctacgagctcccgtacggcaccaaaggctctgaagacctcctgctgagggtgctcgctattacgagttcatcgattccaaagaacatccagtcgttacggtgtaggcgttgtgtcgtagtaggtaacgggcaccgcttgcgaaactcatccctgggcgatgctataaataaatacgacgttgtgatcagactgaacaatgcacctgttgccggttacgagggagatgtaggatcaaaaacaactatgaggctgttttacccggaatccgctcatttcgatcctaaggttgagaacaatccagatactctgctggtcctggtcgcttttaaggcgatggacttccattggattgagacaattctgtccgataagaagagagtccgcaagggcttttggaaacagccacccctgatttgggacgtgaaccccaagcagattagaatcctgaacccttttttcatggaaattgccgccgacaagttactgagcctcccaatgcaacaacctcgaaaaatcaagcaaaaacccaccaccggactcttggccatcacgctggcgcttcacttatgtgatctcgtgcacattgccgggttcggctaccccgatgcatataataagaaacagactattcactactacgaacaaatcactttaaagagcatggcaggctccggccacaacgtttcccaagaggccctcgccatcaaacggatgttagaaatgggcgccatcaagaatctaacctcattttag

SEQ ID NO: 89069 - DNA, 1002 bp, Artificial Sequence
  derived and/or modified sequence
atggtaagcaaaagtcgatggaagctcctagccatgttagccttggtcctggtcgtgatggtgtggtattccatctctagagaagatagatacatcgagcttttctacttcccaattccagaaaaaaaagagccatgcctccagggggaagcagagtcaaaagcatccaagttgttcggcaattattctcgggaccaaccaatattcctgagattggaagattacttctgggttaaaacaccatccgcatacgaacttccttacggaacgaaaggaagtgaagaccttctccttagagttttggccatcaccagtagctccatccccaaaaacatccagtctctccgttgcaggcgatgtgtggtcgttggaaatggccaccgcctgaggaatagttcacttggagatgcaattaataagtacgacgtagtcataaggctcaataatgctccagttgcgggctacgaaggggacgtggggtccaaaacgacaatgcgcctcttttatccagaatctgcccattttgaccctaaagtagagaataacccagataccctcctagtcttggtcgccttcaaagcaatggatttccactggattgagacaatactttccgacaagaagagagtcaggaagggattctggaagcagccaccactcatatgggacgtaaatccaaaacaaatccgtatactcaatccgttttttatggagattgctgccgacaaactgctctcactacctatgcaacaacctaggaaaataaaacagaagccaacaactggtctactggccatcaccctcgctctgcacctttgcgacctcgtccatatcgccggcttcgggtaccctgatgcttataataagaaacagaccatccattactatgagcaaatcaccctgaagagtatggccggatcgggacataatgtaagccaggaggcccttgccattaaacgcatgctggagatgggagccataaagaacctcacttctttctag

SEQ ID NO: 89070 - DNA, 1002 bp, Artificial Sequence
  derived and/or modified sequence
atggtatccaaaagtcggtggaagttactcgcaatgctagcattagttttagtggtcatggtgtggtatagcataagccgggaagacagatatatcgaactcttctatttccccataccagagaaaaaggagccatgtttacagggagaggcagaatcaaaggctagtaaacttttcgggaattactctcgtgaccaaccaattttccttagactagaggattatttctgggttaagactccttccgcctacgaactgccctacggcacgaaggggagtgaagacctcttgttacgggtgctcgcaatcacatcctcaagcattccaaagaacatacaatccctcaggtgtcggcgttgcgtcgtcgttgggaacggtcatagattaaggaactcttcactaggggatgccatcaacaagtatgatgtagttattcgactgaacaacgccccagtcgcaggatacgagggagatgttggctcgaagaccaccatgcgcttgttttatcccgagagtgctcatttcgaccccaaagtggagaacaatccagatactctgttagtcctggtcgctttcaaggcaatggatttccactggatagaaaccatcctctccgataagaaacgtgtccggaaaggcttttggaagcagccacctctcatttgggacgtcaatccaaagcaaattagaattttgaatccatttttcatggagattgcggctgataaacttctctctctacctatgcagcagcctcgcaagataaagcagaaaccgacaaccggcctacttgctatcacactcgccctccacctgtgtgacctcgtgcacatcgccgggtttgggtacccagacgcctataataaaaagcagacgatccactattatgagcagatcactctgaagagtatggcaggtagcggacataacgtatcacaggaagcacttgcgattaagagaatgctggagatgggtgcaataaaaaatttaactagcttttag

SEQ ID NO: 89071 - DNA, 1002 bp, Artificial Sequence
  derived and/or modified sequence
atggtctccaagtcccgctggaagctcctcgcaatgctggcgttagtgctcgtagtaatggtgtggtacagtatcagccgcgaagaccggtacattgaacttttttactttccaataccagagaaaaaggaaccctgccttcaaggggaagctgaaagcaaggcgtctaaacttttcggcaactacagccgcgaccagcccatttttttaaggcttgaagattacttttgggtgaaaactccatcagcatatgaactgccatatgggaccaaggggtctgaggacctgttacttagggtccttgcaataacaagctcctccatccctaaaaacattcagtccttacgctgccggagatgtgttgtcgtgggcaatgggcaccgtttaagaaattcatctctcggggatgcgattaacaagtacgatgtggtgataagactcaataacgctccagtagctgggtacgagggagatgtgggatctaagacaacgatgcggctgttctaccctgagagtgcgcactttgaccccaaagtggaaaataacccggatacactgttggtcctggtagctttcaaagcaatggacttccactggatcgagaccattttgagtgacaagaagcgcgtgcgcaaaggtttctggaaacaaccccctcttatatgggatgttaatccaaagcagatcagaattttgaaccccttctttatggagatcgctgctgacaaactactgtctctaccgatgcaacagccccgcaaaattaaacagaagccaacaacaggcttgcttgctataactctggctctccatctctgcgacctagttcacattgccggattcggatatcctgatgcatataataagaaacagaccatccactattacgaacagattacgctgaagagtatggcgggttcaggacataatgtttctcaggaagctttggctatcaaacgcatgctggagatgggcgcgatcaagaatcttacctcattttag

SEQ ID NO: 89072 - DNA, 1002 bp, Artificial Sequence
  derived and/or modified sequence
atggtttcaaaaagccgatggaagcttctcgccatgttagctctggtcttggtggtgatggtctggtattcaatctcgagagaagatcggtacatagagctgttttatttcccaatccccgagaagaaggaaccatgcttgcagggagaagctgagtcaaaggcctcaaagctgtttggcaactactcaagagatcagccaatctttttacgactggaagactacttttgggttaaaacacccagtgcatacgaattgccgtacggaacgaaaggttcagaggatttgctgttgcgtgtgttagccattacttctagtagtattcccaagaacattcaatcattgaggtgcagaagatgtgttgtggtgggaaatgggcaccgactaagaaattcatcactgggtgacgcaattaataagtacgacgtcgtgatccggctcaataatgccccagtggccggctatgagggagatgttggtagcaagaccaccatgcgactgttttaccctgagtccgcgcacttcgatccgaaagtggaaaacaatcccgacaccctcctcgtactggtggcctttaaagctatggacttccactggattgagactattctcagcgataaaaaaagagttcgcaagggattttggaaacagccacctctgatctgggacgtcaaccctaagcagatacgaattctgaacccctttttcatggaaattgccgctgacaagctgctatccctgccaatgcaacaacctagaaagataaaacagaagccaacaaccggtcttttagctattactctggcactccacttatgtgacctggtacacattgctggttttggctaccccgacgcttacaataagaaacagacaatccattactacgaacagatcactttgaaatctatggctgggtcaggacacaatgtgagtcaggaagcacttgcgattaaaagaatgcttgagatgggagccattaagaacctcacaagtttttag

SEQ ID NO: 89073 - DNA, 1967 bp, Artificial Sequence
  derived and/or modified sequence
cagaaggagatggtgagaagaaccacaccagagaggctggagtaggccagcctggcttgggaccgagtcccgagtccctggctggaccctcggttttcccttccgtggcagggctcacctggatccttaatgccgcccttggaggagttaggaggatcctggatgagaaaactcaccctcaggatgattgccccagggagcagcttcctgctttctggtggaagggaggggcagacagtgggtgtgtcctgctccagtgtctaggcaggagagtttgtgaagctgaccggacacctgtggctcttatttcctaggtggcccgaggcagccgggatgacagctctccccaggaatcctgctgcctgctgagaaacatggtcagcaagtcccgctggaagctcctggccatgttggctctggtcctggtcgtcatggtgtggtattccatctcccgggaagacaggtacatcgagcttttttattttcccatcccagagaagaaggagccgtgcctccagggtgaggcagagagcaaggcctctaagctctttggcaactactcccgggatcagcccatcttcctgcggcttgaggattatttctgggtcaagacgccatctgcttacgagctgccctatgggaccaaggggagtgaggatctgctcctccgggtgctagccatcaccagctcctccatccccaagaacatccagagcctcaggtgccgccgctgtgtggtcgtggggaacgggcaccggctgcggaacagctcactgggagatgccatcaacaagtacgatgtggtcatcagattgaacaatgccccagtggctggctatgagggtgacgtgggctccaagaccaccatgcgtctcttctaccctgaatctgcccacttcgaccccaaagtagaaaacaacccagacacactcctcgtcctggtagctttcaaggcaatggacttccactggattgagaccatcctgagtgataagaagcgggtgcgaaagggtttctggaaacagcctcccctcatctgggatgtcaatcctaaacagattcggattctcaaccccttcttcatggagattgcagctgacaaactgctgagcctgccaatgcaacagccacggaagattaagcagaagcccaccacgggcctgttggccatcacgctggccctccacctctgtgacttggtgcacattgccggctttggctacccagacgcctacaacaagaagcagaccattcactactatgagcagatcacgctcaagtccatggcggggtcaggccataatgtctcccaagaggccctggccattaagcggatgctggagatgggagctatcaagaacctcacgtccttctgacctgggcaagagctgtagcctgtcggttgcctactctgctgtctgggtgacccccatgcgtggctgtgggggtggctggtgccagtatgacccacttggactcaccccctcttggggagggagttctgggcctggccaggtctgagatgaggccatgcccctggctgctcttatggagccgagatccagtcagggtgggggcgctggagccgtgggagcccggccagggcagggggctcgttgctgtggcaccccctctctgccagcaccaagagattatttaatgggctatttaattaaggggtaggaaggtgctgtgggctggtcccacacatccaggaaagaggccagtagagaattctgcccactttttataaaaacttacagcgatggccccaccaaggcctagacacggcactggcctcccaggagggcaggggcattgggaatgggtgggtgccctccagagaggggctgctacctcccagcaggcatgggaagagcactggtgtgggggttccaccgagaaggggacctcatctagaaaagaggttacaaacctaccattaaactatttttcctaaaacggaa

SEQ ID NO: 89074 - DNA, 1919 bp, Artificial Sequence
  derived and/or modified sequence
cgcgggtcggggtggggctgccacagccctgcggagctgctttccggggtccctttccctggaccagattttcgcgggaagccggatcctctccgttcccttggagtgagcaagcgggacagttctgcggaaagtttccgcccccaatcccccagccctgcgcccggactgaagcggcggcccccacctccagcatcctcgagcgatggtttctcccacaactaccccggtcaggtccagcacttgggagctgactgtgctggaggtgacaggctttgcggggtccgcctgtgtgcaggagtcgcaaggtcgctgagcaggacccaaaggtggcccgaggcagccgggatgacagctctccccaggaatcctgctgcctgctgagaaacatggtcagcaagtcccgctggaagctcctggccatgttggctctggtcctggtcgtcatggtgtggtattccatctcccgggaagacaggtacatcgagcttttttattttcccatcccagagaagaaggagccgtgcctccagggtgaggcagagagcaaggcctctaagctctttggcaactactcccgggatcagcccatcttcctgcggcttgaggattatttctgggtcaagacgccatctgcttacgagctgccctatgggaccaaggggagtgaggatctgctcctccgggtgctagccatcaccagctcctccatccccaagaacatccagagcctcaggtgccgccgctgtgtggtcgtggggaacgggcaccggctgcggaacagctcactgggagatgccatcaacaagtacgatgtggtcatcagattgaacaatgccccagtggctggctatgagggtgacgtgggctccaagaccaccatgcgtctcttctaccctgaatctgcccacttcgaccccaaagtagaaaacaacccagacacactcctcgtcctggtagctttcaaggcaatggacttccactggattgagaccatcctgagtgataagaagcgggtgcgaaagggtttctggaaacagcctcccctcatctgggatgtcaatcctaaacagattcggattctcaaccccttcttcatggagattgcagctgacaaactgctgagcctgccaatgcaacagccacggaagattaagcagaagcccaccacgggcctgttggccatcacgctggccctccacctctgtgacttggtgcacattgccggctttggctacccagacgcctacaacaagaagcagaccattcactactatgagcagatcacgctcaagtccatggcggggtcaggccataatgtctcccaagaggccctggccattaagcggatgctggagatgggagctatcaagaacctcacgtccttctgacctgggcaagagctgtagcctgtcggttgcctactctgctgtctgggtgacccccatgcgtggctgtgggggtggctggtgccagtatgacccacttggactcaccccctcttggggagggagttctgggcctggccaggtctgagatgaggccatgcccctggctgctcttatggagccgagatccagtcagggtgggggcgctggagccgtgggagcccggccagggcagggggctcgttgctgtggcaccccctctctgccagcaccaagagattatttaatgggctatttaattaaggggtaggaaggtgctgtgggctggtcccacacatccaggaaagaggccagtagagaattctgcccactttttataaaaacttacagcgatggccccaccaaggcctagacacggcactggcctcccaggagggcaggggcattgggaatgggtgggtgccctccagagaggggctgctacctcccagcaggcatgggaagagcactggtgtgggggttccaccgaga

SEQ ID NO: 89075 - DNA, 1020 bp, Artificial Sequence
  derived and/or modified sequence
atggtgagcaagagcagatggaagctgctggccatgctggccctggtgctggtggtgatggtgtggtacagcatcagcagagaggacagatacatcgagctgttctacttccccatccccgagaagaaggagccctgcctgcagggcgaggccgagagcaaggccagcaagctgttcggcaagctgagccccctgtgcagctacagcagagaccagcccatcttcctgagactggaggactacttctgggtgaagacccccagcgcctacgagctgccctacggcaccaagggcagcgaggacctgctgctgagagtgctggccatcaccagcagcagcatccccaagaacatccagagcctgagatgcagaagatgcgtggtggtgggcaacggccacagactgagaaacagcagcctgggcgacgccatcaacaagtacgacgtggtgatcagactgaacaacgcccccgtggccggctacgagggcgacgtgggcagcaagaccaccatgagactgttctaccccgagagcgcccacttcgaccccaaggtggagaacaaccccgacaccctgctggtgctggtggccttcaaggccatggacttccactggatcgagaccatcctgagcgacaagaagagagtgagaaagggcttctggaagcagccccccctgatctgggacgtgaaccccaagcagatcagaatcctgaaccccttcttcatggagatcgccgccgacaagctgctgagcctgcccatgcagcagcccagaaagatcaagcagaagcccaccaccggcctgctggccatcaccctggccctgcacctgtgcgacctggtgcacatcgccggcttcggctaccccgacgcctacaacaagaagcagaccatccactactacgagcagatcaccctgaagagcatggccggcagcggccacaacgtgagccaggaggccctggccatcaagagaatgctggagatgggcgccatcaagaacctgaccagcttctag

SEQ ID NO: 89076 - DNA, 1002 bp, Artificial Sequence
  derived and/or modified sequence
atggtgagcaagagcagatggaagctgctggccatgctggccctggtgctggtggtgatggtgtggtacagcatcagcagagaggacagatacatcgagctgttctacttccccatccccgagaagaaggagccctgcctgcagggcgaggccgagagcaaggccagcaagctgttcggcaactacagcagagaccagcccatcttcctgagactggaggactacttctgggtgaagacccccagcgcctacgagctgccctacggcaccaagggcagcgaggacctgctgctgagagtgctggccatcaccagcagcagcatccccaagaacatccagagcctgagatgcagaagatgcgtggtggtgggcaacggccacagactgagaaacagcagcctgggcgacgccatcaacaagtacgacgtggtgatcagactgaacaacgcccccgtggccggctacgagggcgacgtgggcagcaagaccaccatgagactgttctaccccgagagcgcccacttcgaccccaaggtggagaacaaccccgacaccctgctggtgctggtggccttcaaggccatggacttccactggatcgagaccatcctgagcgacaagaagagagtgagaaagggcttctggaagcagccccccctgatctgggacgtgaaccccaagcagatcagaatcctgaaccccttcttcatggagatcgccgccgacaagctgctgagcctgcccatgcagcagcccagaaagatcaagcagaagcccaccaccggcctgctggccatcaccctggccctgcacctgtgcgacctggtgcacatcgccggcttcggctaccccgacgcctacaacaagaagcagaccatccactactacgagcagatcaccctgaagagcatggccggcagcggccacaacgtgagccaggaggccctggccatcaagagaatgctggagatgggcgccatcaagaacctgaccagcttctag

SEQ ID NO: 89077 - DNA, 1020 bp, Artificial Sequence
  derived and/or modified sequence
atggtctccaagtcccgctggaaactgctggcaatgctcgccttggtcttggttgtgatggtctggtattcaatttcacgggaggatcgctacatcgagctgttttactttccaatcccggagaagaaagaaccttgccttcaaggagaggccgaatcgaaggcgagcaagctgttcggtaagttatcgccactgtgctcgtactctcgggaccaacccattttcctcagactggaggattacttttgggtgaagaccccatctgcttatgagctaccgtacggaacgaaaggcagcgaggatctgttattaagagtcctcgccattacttcatcatcgattccaaagaatatccagtctcttcggtgtcggaggtgtgtagtcgtggggaacgggcatcgactgcgcaacagcagtcttggggacgcgatcaacaaatacgatgtggtgatccgtcttaacaatgctcccgttgcggggtatgagggcgacgtgggatccaagactacgatgagactgttttaccccgagtccgcacactttgaccccaaggtcgaaaacaacccagacaccctcctcgtgctcgtggcttttaaagccatggacttccattggatcgaaactattttgagcgacaaaaaacgcgtaagaaagggattttggaagcagcccccgctgatctgggacgtgaaccctaaacagattaggatcctgaacccttttttcatggagattgcagccgacaaactgttaagtctccccatgcagcagccaaggaagattaaacagaaacccactacaggactacttgcgattacccttgccttgcatctgtgcgatttagttcatatcgcagggtttgggtaccctgatgcctacaacaaaaagcagaccatccactattacgaacagatcacactgaaatcaatggctggaagtgggcacaatgtcagccaggaagccctggctatcaaacggatgctggagatgggcgctatcaaaaatcttacttctttctag

SEQ ID NO: 89078 - DNA, 1002 bp, Artificial Sequence
  derived and/or modified sequence
atggtgagtaaatcgcgttggaaacttctggctatgctggcactggtgttggtggtaatggtgtggtatagcatctcacgggaggataggtatatcgaactcttttactttcctatacctgaaaagaaggaaccctgtctccaaggggaagcagaaagcaaagcttcaaaactgtttggaaattatagccgcgaccaaccgatattcctccgtctggaggactacttctgggttaaaacacctagcgcatacgaacttccttacggaacgaagggatctgaagatctcttgctccgggtcttggccatcacttcttcgagtatccccaagaacatccagagtcttcgttgccgccgctgtgtggtggtgggaaatggacaccgccttcggaattccagcctcggcgatgctatcaataagtatgatgttgtgattcgtctgaacaatgctccggtcgccggttacgagggggacgtggggtccaagaccactatgaggttattctatccagagtcagcccattttgatcctaaggtcgagaacaatccggacactctcttagtgttggtcgctttcaaagctatggactttcattggatcgagactatactcagcgataagaaaagagttcggaaagggttttggaagcagccgcctctaatatgggatgtcaaccctaagcagatccgcatcttaaatcccttctttatggagatcgcagccgacaaactactgagcctgcccatgcagcagccccgcaaaatcaagcagaagccgacgacaggcctgcttgccataaccctcgctctccatctgtgtgacctggtgcacatcgctggctttggatatccagatgcatataacaagaagcagaccatccactactatgaacagattacactgaaatcaatggcaggaagtggacataatgtttcacaggaagccctcgctatcaagcgtatgttagaaatgggtgcgattaagaatctgacaagtttttag

SEQ ID NO: 89079 - DNA, 1802 bp, Artificial Sequence
  derived and/or modified sequence
ggactcgcccgctcccaggccggacccgcgcccgggacagggacccggccgagtcgagccgtcgcgccagcgctgcgccgccggtcggtgcgcctagcggatcggagctgcgcgcggaaccgtgctgccccgccccgctccacccgtgagggtggcccgaggcagccgggatgacagctctccccaggaatcctgctgcctgctgagaaacatggtcagcaagtcccgctggaagctcctggccatgttggctctggtcctggtcgtcatggtgtggtattccatctcccgggaagacaggtacatcgagcttttttattttcccatcccagagaagaaggagccgtgcctccagggtgaggcagagagcaaggcctctaagctctttggcaagctttcacctctgtgcagctactcccgggatcagcccatcttcctgcggcttgaggattatttctgggtcaagacgccatctgcttacgagctgccctatgggaccaaggggagtgaggatctgctcctccgggtgctagccatcaccagctcctccatccccaagaacatccagagcctcaggtgccgccgctgtgtggtcgtggggaacgggcaccggctgcggaacagctcactgggagatgccatcaacaagtacgatgtggtcatcagattgaacaatgccccagtggctggctatgagggtgacgtgggctccaagaccaccatgcgtctcttctaccctgaatctgcccacttcgaccccaaagtagaaaacaacccagacacactcctcgtcctggtagctttcaaggcaatggacttccactggattgagaccatcctgagtgataagaagcgggtgcgaaagggtttctggaaacagcctcccctcatctgggatgtcaatcctaaacagattcggattctcaaccccttcttcatggagattgcagctgacaaactgctgagcctgccaatgcaacagccacggaagattaagcagaagcccaccacgggcctgttggccatcacgctggccctccacctctgtgacttggtgcacattgccggctttggctacccagacgcctacaacaagaagcagaccattcactactatgagcagatcacgctcaagtccatggcggggtcaggccataatgtctcccaagaggccctggccattaagcggatgctggagatgggagctatcaagaacctcacgtccttctgacctgggcaagagctgtagcctgtcggttgcctactctgctgtctgggtgacccccatgcgtggctgtgggggtggctggtgccagtatgacccacttggactcaccccctcttggggagggagttctgggcctggccaggtctgagatgaggccatgcccctggctgctcttatggagccgagatccagtcagggtgggggcgctggagccgtgggagcccggccagggcagggggctcgttgctgtggcaccccctctctgccagcaccaagagattatttaatgggctatttaattaaggggtaggaaggtgctgtgggctggtcccacacatccaggaaagaggccagtagagaattctgcccactttttataaaaacttacagcgatggccccaccaaggcctagacacggcactggcctcccaggagggcaggggcattgggaatgggtgggtgccctccagagaggggctgctacctcccagcaggcatgggaagagcactggtgtgggggttccaccgagaaggggacctcatctagaaaagaggttacaaacctaccattaaa

SEQ ID NO: 89080 - DNA, 1002 bp, Artificial Sequence
  derived and/or modified sequence
atggtctccaagtcacggtggaagctgctggcaatgctcgctttagtgttggtagtgatggtttggtattccatcagtagggaagatcgctacattgagctgttctacttccctatccctgagaaaaaagagccatgcttacagggcgaggcagagtccaaagccagcaagctttttgggaactactctagagatcagcccatcttcctccggttggaggattatttttgggttaaaacaccttccgcctatgagttgccgtacggcaccaaggggagtgaggacctgctgctccgagttctggccataacttctagttcaatccccaagaacattcagagccttagatgccgtcgttgcgtagtggtgggaaacgggcacaggttgagaaactcctccctcggagacgccattaataagtacgacgtagttatcaggctgaataacgcccctgtggctggatatgagggcgacgtgggaagcaagaccacaatgcgactcttttacccggagagtgcccacttcgatcctaaagtggaaaacaatcccgacaccttgctggtgctggtggccttcaaggccatggactttcattggatcgaaaccatcttatcagacaaaaagcgcgtgaggaaggggttttggaaacaacccccgctgatatgggacgtgaatcccaaacaaattcgcatcctgaacccttttttcatggagatcgctgctgataaactgttgagcctgccgatgcagcaaccccgcaaaataaagcagaagcccactactggcctactcgccattaccctggctctccatctgtgtgacctcgtgcatatagctggattcgggtacccagacgcctacaacaagaaacagacaattcactactacgagcagattacgttgaaatccatggctggcagcggccacaacgtcagtcaggaggcactcgcaatcaaacgcatgctggaaatgggggcaatcaaaaatctgacctctttttag

SEQ ID NO: 89081 - DNA, 1002 bp, Artificial Sequence
  derived and/or modified sequence
atggtttcaaaaagtaggtggaagcttctagccatgctcgctttggtgttagtggtgatggtttggtactctattagtcgggaagatcgctacatcgagctgttttattttcccattccagagaagaaagagccgtgcctacagggtgaagccgaaagcaaggcctccaagttgttcggcaattactctcgtgaccaacccatcttcctacgccttgaggattacttctgggtgaagactccatcggcctacgagctgccatacggtaccaagggatctgaagacctgcttcttagagtcctcgccatcactagctcttccatcccaaagaatatccagtccctgcgttgtaggcgttgtgtcgtggtaggcaatgggcatcgtttgagaaactccagtctcggcgatgccatcaataagtacgacgtagtgatcaggctcaacaacgcgcccgtcgctggctatgaaggagatgtcgggtccaagactacgatgcggttgttctatcccgagtccgcgcacttcgaccctaaggtggaaaataaccccgacacactgctggtcttggtggcatttaaggctatggactttcactggatagagacaatactgtccgacaagaaacgcgtgcgcaaggggttctggaagcaaccacctctgatttgggacgtaaatcccaaacagatacgcatcttaaacccctttttcatggagatcgccgctgataagttgctgtctcttcccatgcagcagccgcgcaagatcaagcaaaaacctactacagggctcctggcaattacgcttgcattgcacctgtgtgatctcgtccacatcgccggctttggctatccagacgcctacaacaaaaagcaaactatccactactacgagcaaattactctgaaaagtatggccggaagtggtcacaacgtgagccaggaagcgttagctatcaaacggatgctggaaatgggagcgataaaaaacctgacttcattttag

SEQ ID NO: 89082 - DNA, 1002 bp, Artificial Sequence
  derived and/or modified sequence
atggtctcaaagtcgcggtggaagctccttgcgatgctcgctctcgtgctggttgtgatggtgtggtattccatctcaagggaggatcgctatattgagctcttttattttccgatcccagagaagaaagaaccttgtctgcagggcgaggcggagtcaaaagcttccaagttattcggcaactattctagggaccagccaatcttcctgcgcctcgaggactatttctgggtcaaaaccccttcagcctatgagctcccttacgggacaaagggaagcgaggacctcctgttgcgggtccttgcaatcactagttcttccatcccaaagaatattcaatccttgcggtgtaggagatgtgtggtggtggggaatgggcatcgtctgaggaacagtagcctcggggatgcaattaataaatacgacgttgttattagactaaataatgccccagttgccggatatgagggggatgttgggagtaaaacaactatgcgcttgttctaccctgagtcagcacacttcgaccctaaagtcgagaataatcccgacacacttctagtgctggtggcctttaaagctatggacttccactggattgagaccattttgtccgacaaaaagcgcgttcgaaaaggcttttggaagcagcccccattgatttgggacgtgaatcctaagcagatcaggattctgaaccctttctttatggaaattgccgcagataagctccttagcctgcccatgcaacaacccagaaagatcaagcagaaacctaccacaggactgcttgcgattacacttgctctccatctatgcgacctggtacacattgcgggttttgggtaccctgatgcctataacaagaaacagaccatccattactacgaacagatcacactaaaaagcatggctggcagcggacacaatgtgagccaggaggcccttgctattaagaggatgctcgagatgggagcaattaagaatctgacaagtttctag

SEQ ID NO: 89083 - DNA, 1020 bp, Artificial Sequence
  derived and/or modified sequence
atggtgtccaagagccgctggaagctgctggccatgctggccctggtgctggtggtgatggtgtggtacagcatcagccgggaggaccgctacatcgagctgttctacttccccatccctgagaagaaggagccctgcctgcagggcgaggccgagagcaaggccagcaagctgtttgggaagctgagccccctgtgcagctacagccgggaccagcccatcttcctgcggctggaggactacttctgggtgaagacccccagcgcctatgagctgccctacggcaccaagggcagcgaggacctgctgctgcgggtgctggccatcaccagcagcagcatccccaagaacatccagagcctgcgctgccgccgctgtgtggtggtgggcaatggccaccggctgaggaacagcagcctgggagatgccatcaacaagtatgatgtggtgatccggctgaacaatgcccctgtggccggctatgaaggagatgtgggcagcaagaccaccatgaggctcttctacccagagagcgcccactttgaccccaaggtggagaacaacccagacaccctgctggtgctggtggccttcaaggccatggacttccactggattgagaccatcctgagtgacaagaagagggtgaggaagggcttctggaagcagcccccactcatctgggatgtgaaccccaagcagatccgcatcctgaaccccttcttcatggagattgctgctgacaagctgctgagcctgcccatgcagcagcccaggaagatcaagcagaagcccaccaccggcctgctggccatcaccctggccctgcacctgtgtgacctggtgcacatcgccggcttcggctacccagatgcctacaacaagaagcagaccatccactactatgagcagatcaccctgaagtccatggccggcagcggccacaacgtgtcccaggaggccctggccatcaagaggatgctggagatgggcgccatcaagaacctgaccagcttctag

SEQ ID NO: 89084 - DNA, 1002 bp, Artificial Sequence
  derived and/or modified sequence
atggtgtccaagagccgctggaagctgctggccatgctggccctggtgctggtggtgatggtgtggtacagcatcagccgggaggaccgctacatcgagctgttctacttccccatccctgagaagaaggagccctgcctgcagggcgaggccgagagcaaggccagcaagctgtttggaaactacagccgggaccagcccatcttcctgcggctggaggactacttctgggtgaagacccccagcgcctatgagctgccctacggcaccaagggcagcgaggacctgctgctgcgggtgctggccatcaccagcagcagcatccccaagaacatccagagcctgcgctgccgccgctgtgtggtggtgggcaatggccaccggctgaggaacagcagcctgggagatgccatcaacaagtatgatgtggtgatccggctgaacaatgcccctgtggccggctatgaaggagatgtgggcagcaagaccaccatgaggctcttctacccagagagcgcccactttgaccccaaggtggagaacaacccagacaccctgctggtgctggtggccttcaaggccatggacttccactggattgagaccatcctgagtgacaagaagagggtgaggaagggcttctggaagcagcccccactcatctgggatgtgaaccccaagcagatccgcatcctgaaccccttcttcatggagattgctgctgacaagctgctgagcctgcccatgcagcagcccaggaagatcaagcagaagcccaccaccggcctgctggccatcaccctggccctgcacctgtgtgacctggtgcacatcgccggcttcggctacccagatgcctacaacaagaagcagaccatccactactatgagcagatcaccctgaagtccatggccggcagcggccacaacgtgtcccaggaggccctggccatcaagaggatgctggagatgggcgccatcaagaacctgaccagcttctag

SEQ ID NO: 89085 - DNA, 1020 bp, Artificial Sequence
  derived and/or modified sequence
atggtgagcaagagccggtggaagctgctggccatgctggccctggttctcgtcgtaatggtttggtattcaatcagcagagaagaccggtacatcgaactgttttactttcccatcccggagaagaaggaaccttgtctccagggggaggccgagagcaaggcatcgaaactgttcggaaagttgagcccactatgctcatactcccgggaccagccaatcttcttaagattggaggattatttctgggttaagacaccctctgcatacgagttaccttatggaacaaagggtagcgaggacctgttgctaagagtgttggcaataacatcgtctagtattcctaagaacatccagagtctgcgttgtagaaggtgcgtggtggtcggcaatgggcaccggttgcgcaattccagcctgggagacgccatcaacaaatacgatgtggtgatccgcttaaataacgcgcctgtggccggctatgaaggggacgtaggatctaagacaaccatgaggttgttctaccctgagagcgcccattttgacccgaaagtggagaataatcctgacacccttctggtgctggtcgctttcaaggccatggacttccactggatcgagaccattttatcagataaaaagagagtgcggaaggggttttggaaacagcctccgcttatatgggacgttaaccccaagcagattagaatactcaacccctttttcatggaaatcgcagccgacaagctgttatcactgcccatgcagcagcctcgcaaaattaagcagaagcctaccaccggcctgctagccattactctggcgctgcacctttgtgatctcgtgcatatcgcggggtttggctatccagatgcatacaataagaaacagaccatccattattacgagcagatcactttaaagtctatggctggcagcgggcataacgtttcacaagaagccctcgctattaagagaatgctggagatgggcgccattaaaaatttgacgtccttctag

SEQ ID NO: 89086 - DNA, 1002 bp, Artificial Sequence
  derived and/or modified sequence
atggtgagcaagagccggtggaagctgctggccatgctggccctggtgctggtcgtaatggtttggtattctatcagtcgggaggacagatacatcgaactgttctacttccccatccccgaaaagaaagagccctgtctccagggggaagccgagagcaaagcatcaaagctcttcggcaattattctcgagaccaaccaatcttcctccgcctcgaggactacttctgggttaaaactccttctgcgtacgagcttccttacgggactaagggctcagaagatctgctgcttcgcgtgctggcaattacttcatcttctataccaaagaacatccagtctctgagatgcaggcggtgcgttgtcgtggggaacgggcacaggctccgcaattcctccttaggcgacgcgatcaacaagtacgacgtggtgattcgcctcaataacgccccagttgcaggctacgaaggagatgtgggatctaaaacaaccatgagactgttctacccagaatctgcccactttgatccaaaagtggagaataaccctgacaccttgttggtgctggtggcatttaaggcaatggacttccactggatagaaacaatcctctctgataagaaaagagtgcgaaagggcttttggaagcagccaccactcatctgggatgttaacccaaaacaaatccgcatcctgaatcctttcttcatggagattgcggcagataaactgttaagtcttccaatgcagcaacctagaaagatcaaacagaagcctaccacagggctgttggccatcacactggcgcttcatctgtgtgacctggtgcatattgccggtttcgggtacccagatgcctacaacaagaagcagactatccactactatgaacagatcaccctcaagtccatggcgggttcgggacacaacgttagccaagaggccctcgccattaagaggatgctggagatgggcgcgattaagaaccttacaagtttctag

SEQ ID NO: 89087 - DNA, 1724 bp, Artificial Sequence
  derived and/or modified sequence
ctttcacaaaaggtgaaatgagctctttgtagtgtttcccgcccaggctgcattttagaatcacagaggaggtggcccgaggcagccgggatgacagctctccccaggaatcctgctgcctgctgagaaacatggtcagcaagtcccgctggaagctcctggccatgttggctctggtcctggtcgtcatggtgtggtattccatctcccgggaagacaggtacatcgagcttttttattttcccatcccagagaagaaggagccgtgcctccagggtgaggcagagagcaaggcctctaagctctttggcaactactcccgggatcagcccatcttcctgcggcttgaggattatttctgggtcaagacgccatctgcttacgagctgccctatgggaccaaggggagtgaggatctgctcctccgggtgctagccatcaccagctcctccatccccaagaacatccagagcctcaggtgccgccgctgtgtggtcgtggggaacgggcaccggctgcggaacagctcactgggagatgccatcaacaagtacgatgtggtcatcagattgaacaatgccccagtggctggctatgagggtgacgtgggctccaagaccaccatgcgtctcttctaccctgaatctgcccacttcgaccccaaagtagaaaacaacccagacacactcctcgtcctggtagctttcaaggcaatggacttccactggattgagaccatcctgagtgataagaagcgggtgcgaaagggtttctggaaacagcctcccctcatctgggatgtcaatcctaaacagattcggattctcaaccccttcttcatggagattgcagctgacaaactgctgagcctgccaatgcaacagccacggaagattaagcagaagcccaccacgggcctgttggccatcacgctggccctccacctctgtgacttggtgcacattgccggctttggctacccagacgcctacaacaagaagcagaccattcactactatgagcagatcacgctcaagtccatggcggggtcaggccataatgtctcccaagaggccctggccattaagcggatgctggagatgggagctatcaagaacctcacgtccttctgacctgggcaagagctgtagcctgtcggttgcctactctgctgtctgggtgacccccatgcgtggctgtgggggtggctggtgccagtatgacccacttggactcaccccctcttggggagggagttctgggcctggccaggtctgagatgaggccatgcccctggctgctcttatggagccgagatccagtcagggtgggggcgctggagccgtgggagcccggccagggcagggggctcgttgctgtggcaccccctctctgccagcaccaagagattatttaatgggctatttaattaaggggtaggaaggtgctgtgggctggtcccacacatccaggaaagaggccagtagagaattctgcccactttttataaaaacttacagcgatggccccaccaaggcctagacacggcactggcctcccaggagggcaggggcattgggaatgggtgggtgccctccagagaggggctgctacctcccagcaggcatgggaagagcactggtgtgggggttccaccgagaaggggacctcatctagaaaagaggttacaaacctaccattaaactatttttcctaaaacggaa

SEQ ID NO: 89088 - DNA, 1002 bp, Artificial Sequence
  derived and/or modified sequence
atggtgagcaagagccggtggaagctgctggccatgctggccctggtgctcgttgttatggtgtggtactcaatctctcgggaggatcgctacattgaactgttttattttcccataccagagaagaaggaaccatgcctgcaaggcgaggcagagagtaaggctagcaagctctttggaaactacagcagagatcagcccatctttcttagactggaggactacttttgggtcaagaccccttcagcgtatgaactgccttatggcacaaaaggctccgaagacctgcttcttcgggtgctggccattaccagctcttcaatcccgaagaatatccagtccctgcgctgccgtaggtgcgtagtggtgggcaacggacaccgtttaaggaacagttctctcggggacgccatcaataagtatgacgttgttatccggctgaacaacgctccagttgcaggctatgaaggtgatgtggggtccaaaacgactatgaggttgttttaccccgagagcgcccacttcgatcctaaggtggaaaacaacccggatacgctgcttgtactagttgcctttaaggcgatggacttccattggatcgagacaatcctgtctgataagaagagggtacgcaagggattctggaaacaaccccccctgatctgggacgtcaaccccaaacagattcgtatcctgaatccattttttatggagatcgctgccgataagctgctgtctttgccaatgcagcagcctcgaaagattaaacagaaacccaccacaggcctgctggccatcactctcgctctacacttgtgcgatctggtccatattgccgggtttggctatcctgacgcgtataacaaaaaacagacaatccactattacgagcagatcactctgaaaagtatggccgggagcggccataatgtaagccaggaggctcttgctattaaaaggatgttagagatgggcgctattaaaaatctgacaagcttttag

SEQ ID NO: 89089 - DNA, 1002 bp, Artificial Sequence
  derived and/or modified sequence
atggtgagcaagagccggtggaagctgctggccatgctggccctggttcttgtggtcatggtgtggtacagtatttcaagggaagatcgctatatcgaactgttttactttccaatccctgagaagaaggagccctgtctgcagggggaggccgaaagtaaggctagtaagcttttcgggaactacagtcgggatcagcccatttttctgagactggaagactacttctgggtgaaaaccccgagcgcttatgaactgccttacgggaccaaaggcagcgaagacttacttctaagagttctggccatcacaagcagctctataccgaaaaacattcaatctctaagatgtcggagatgtgtggtagtcggaaatggccaccggcttaggaattcgtcactgggagatgctatcaataaatatgatgtcgtaatacgcctgaataacgctccagtagccggctatgagggcgacgtgggaagtaagacgaccatgcggctcttctaccctgaatctgcacatttcgatcctaaggtggaaaataaccccgacaccctcctcgtgctcgtggcattcaaagctatggacttccactggatcgaaactatactctcagacaaaaagcgggtaaggaagggcttctggaaacagccgcccctgatctgggacgttaatccaaaacagatcagaattctgaacccctttttcatggagatcgccgcagacaagctgctaagcctgccgatgcagcagcccaggaagatcaaacagaaacctaccacggggctgctggctatcacactggccctccatttgtgcgatctggtgcacatcgccggttttggatatcccgatgcttataacaaaaaacagaccatccattattacgagcagattacactcaaatctatggctggttccgggcacaacgtctcccaagaggcccttgcaatcaaaaggatgctcgagatgggcgcaattaagaacctcacaagtttttag

SEQ ID NO: 89090 - DNA, 1002 bp, Artificial Sequence
  derived and/or modified sequence
atggtgagcaagagccggtggaagctgctggccatgctggccctggttctggtggtcatggtgtggtatagtatcagtcgcgaagatagatatatcgagctgttttatttcccgattccggaaaaaaaggagccctgcctgcaaggagaggccgaatcaaaggcctctaaattattcggaaattactcacgggaccagcccatctttttacgcctggaggactacttctgggtgaaaaccccttctgcctatgagttgccttacggtacaaaaggatccgaagacttacttcttcgggtgctggcaattacatcttccagtatacctaagaacatacagtcactgaggtgccgccgctgcgttgtggtgggaaacggccacagactcaggaacagctcccttggagatgctatcaataaatacgacgtcgtaatccgcttgaacaatgcccccgtggctggatacgaaggagacgtcgggagtaaaacaacaatgcggctgttctaccctgagagcgctcactttgaccccaaggtcgagaataaccccgataccctcctggtgctggttgcctttaaagctatggacttccattggatagagacgatcctgtctgacaaaaagcgcgtcaggaaggggttttggaaacagccccccctaatctgggatgtaaatcctaaacaaataagaattttgaatccgtttttcatggagatcgcagctgacaaattactctctctcccaatgcagcagccccgcaaaataaagcagaagcccacgaccggcctactggccatcacacttgcactgcatctttgtgacctcgtgcatatcgccggcttcggatatccagatgcatacaacaaaaagcagactatccactactacgagcagatcaccttgaagtctatggctggcagcgggcataatgtctctcaggaggcgctggctatcaaacggatgctggaaatgggcgcgatcaagaaccttacctctttctag

SEQ ID NO: 89091 - RNA, 1020 nt, Artificial Sequence
  derived and/or modified sequence
augguaucaaaauccagauggaaauugcuagccaugcucgcgcuuguucuggugguaauggugugguacucaaucagucgagaggaucgguauaucgagcuguucuacuuccccauucccgagaaaaaggagcccugucuacaaggcgaggccgaauccaaggccagcaaacuguuuggcaaacugucaccacuauguaguuacucacgggaucagccuaucuuucugagauuggaagauuacuuuugggucaaaacccccucugccuacgagcucccguacggcaccaaaggcucugaagacuugcugcuucgaguucuggccauuacauccuccagcauccccaagaacauccagucacugcgcugcagacgguguguugugguggguaacggacacagguugcguaacagcagccugggcgacgccaucaacaaauacgacgucgucauucgacugaacaaugcccccguggccggguaugaaggugaugugggaucaaaaacaaccaugcgucuguuuuacccggaaagugcacauuucgauccuaagguggaaaacaaucccgacacccuauugguucuggucgcguuuaaagcuauggacuuucacuggauagagacgauacuauccgauaaaaagcgcgugagaaaagguuucuggaagcaaccuccucucaucugggacgucaacccaaagcagauacgcauccugaaccccuuuuuuauggaaauagccgccgacaagcuucuaucgcucccuaugcagcaaccccggaagauuaaacagaaaccuaccacuggguuacuugccaucacgcucgcucuucacuugugugaucugguccacauagcugguuucggcuacccugacgcauauaauaaaaaacagaccauucauuacuaugagcagauuacacuaaaauccauggccggcuccggacacaacguuagucaagaggcguuggcgaucaagcguaugcuggagaugggcgccaucaagaaucugacuucuuucuag

SEQ ID NO: 89092 - RNA, 1002 nt, Artificial Sequence
  derived and/or modified sequence
augguuuccaagagccgguggaaguuacuugcgaugcucgcacucguccugguggucauggugugguacucuauuagucgggaagaucgauauaucgaacucuucuauuucccaauuccagaaaaaaaggaaccgugccugcagggugaagccgaaucuaaggccaguaagcucuuugggaacuacucccgggaccaacccauuuuccugagacucgaagauuauuuuuggguaaagacaccgagcgccuaugaacuccccuaugggacuaagggaagugaggaucugcugcugcgaguucuugcaaucacuagcaguucuauuccuaaaaacauucagucacuccgaugucgacgcugugugguuguaggaaauggacaccgccugcgaaacagcucauuaggcgacgcuaucaauaaguaugauguggucauuaggcuaaauaacgcacccguggcuggguacgagggagacguaggcuccaagaccacaaugaggcuguuuuaucccgagagcgcccauuuugaucccaagguggaaaauaaucccgauacccuccugguguugguggcuuucaaagcgauggauuuucacuggauugagaccauccuuucagauaagaaaagagugaggaaaggcuucuggaagcagccaccccugauaugggacgugaaccccaagcaaauccggauccugaaucccuuuuuuauggagauugccgcugacaagcuccucucccugccaaugcagcagccgagaaaaauaaagcagaagccaacaacugggcuccuugcuauuacacuugcuuuacauuuaugcgaccugguucauaucgcggguuuugguuacccagacgcuuacaauaaaaagcaaacuauacacuacuacgaacagaucacacuaaagucuauggcaggcucuggucauaacgugucacaagaggcucuggccaucaaaagaaugcuugagaugggcgccaucaagaaccugacaucauuuuag

SEQ ID NO: 89093 - RNA, 1002 nt, Artificial Sequence
  derived and/or modified sequence
augguaucgaagucacgcuggaaguuauuagcgaugcuggcacucguuuugguggucauggugugguauucaauuuccagggaggaccgguacauugaacucuucuauuuccccauuccugaaaaaaaagagcccugccuccagggcgaagccgagaguaaagccagcaaacucuuuggaaacuauagcagagaccaacccauuuuucuuagauuggaggacuacuucugggucaagaccccaagcgcuuacgaacugccauacgggacgaaaggaagcgaggacuugcuccuccguguucuggcaauuaccuccucuaguauucccaagaacauacagagcuugcggugcaggagauguguugucguuggaaauggccaccguuugcggaauuccagccuuggcgaugccaucaacaaguaugacgugguaauccgacuaaacaacgcccccguugcaggauacgaaggagacguggggaguaagacuacuaugagguuguucuacccugaaagugcacauuucgaccccaaggucgagaacaacccugauacucuccucgucuuaguagcuuucaaagccauggauuuccacuggaucgaaacgaucuugucugauaaaaagagagugagaaaaggcuucuggaagcagcccccccuuauuugggacguuaacccaaagcagauuaggauccugaacccuuucuucauggagauugccgcagauaaauugcucucacugcccaugcagcagccucguaagauuaagcaaaagccuacuacuggccuguuggccauaacccuggccuuacaccugugugaccuaguccacaucgcaggauucggcuacccugacgccuacaacaagaaacagacaauacacuauuaugagcagauaacauuaaagucuauggcggguagcggacacaauguuagucaggaggcccucgcgauuaaacgaaugcuugagaugggcgcgaucaaaaaccucacuucuuuuuag

SEQ ID NO: 89094 - RNA, 1002 nt, Artificial Sequence
  derived and/or modified sequence
auggugucaaaaaguagauggaaacugcuggcuaugcuggccuuagugcuggugguuauggugugguauaguauaucacgagaggaccgguauaucgaacuauucuauuuuccaauccccgaaaaaaaggaaccaugcuuacagggcgaagcugaaagcaaggcaagcaaacuguuugguaauuacagcagagaucagccaauuuuucucagacuggaagauuauuucugggucaaaacucccagcgccuaugagcucccuuauggcacaaaggggagcgaagaccuucuguugcgagugcuggcaaucacauccucauccauucccaagaacauucaguccuuaagaugcagacggugcguggugguuggcaacggccaucgccuccggaacuccucguugggggaugcuaucaauaaguacgacguugucauaaggcuaaauaaugccccaguggccggcuaugaaggcgacgucggcagcaagacgaccaugcggcuuuuuuacccugaaucugcccacuuugacccuaagguagagaacaaucccgacacucuccucgugcugguggcuuuuaaggccauggacuuccauuggauugagaccauuuugagcgacaagaaacgcgugcgaaagggcuucuggaagcaaccaccacugaucugggaugucaaccccaagcagauucgcauauugaaccccuucuuuauggagauugccgcugacaagcugcuuucccuuccaaugcagcagccucgcaagauuaaacaaaaaccaacaaccggacucuuagcuaucacgcuugcccugcaucugugcgaucucgugcacauugccgguuuuggguaccccgacgcuuacaacaagaaacagacaauucacuauuacgagcagauuacacugaaaagcauggcugggucaggucacaacgucucacaggaagcccucgcaauuaagcggauguuagaaaugggggcuauuaaaaaccugacaagcuucuag

SEQ ID NO: 89095 - RNA, 1002 nt, Artificial Sequence
  derived and/or modified sequence
augguaucgaaaucgcgauggaaguugcucgccaugcuggcccugguccucguugugaugguaugguauagcauuucaagagaagaucgauauauagaacuuuucuacuucccuauuccagagaaaaaagagccuugucuccagggagaggcugagucgaaggcgaguaaauuguucggcaauuauagucgggaccagccaauauucuugcgucucgaagauuauuuuuggguaaagacaccaagcgcauacgagcuuccuuauggcacuaaaggaagugaggaucuucuccucaggguguuggccauuacuagcucuuccaucccuaagaauauacagagucugcguugccgucgcugcguggugguuggcaauggccaucgccuucgcaauagcucauuaggagacgccaucaacaaauaugauguugugaucagacuuaacaacgcucccguggccggcuacgaaggugaugugggaucaaagacaacaaugcgccuguuuuaucccgaauccgcucacuuugauccuaagguugagaauaacccagauacucuccuaguguuggucgccuucaaagcgauggacuuucauuggaucgagacuauucucagcgauaaaaaaagaguucgcaagggauuuuggaaacagccaccucugaucugggacgucaacccuaagcagauacgaauucugaaccccuuuuucauggaaauugccgcugacaagcugcuaucccugccaaugcaacaaccuagaaagauaaaacagaagccaacaaccggucuuuuagcuauuacucuggcacuccacuuaugugaccugguacacauugcugguuuuggcuaccccgacgcuuacaauaagaaacagacaauccauuacuacgaacagaucacucucaaaagcauggccggcagcgggcacaacguuagccaggaggcucuagccaucaagcggaugcuggagaugggugcaauaaagaauuuaacuagcuucuag

SEQ ID NO: 89096 - RNA, 1020 nt, Artificial Sequence
  derived and/or modified sequence
augguaucaaaauccagauggaaauugcuagccaugcucgcgcuuguucuggugguaauggugugguacucaaucagucgagaggaucgguauaucgagcuguucuacuuccccauucccgagaaaaaggagcccugucuacaaggcgaggccgaauccaaggccagcaaacuguuuggcaaacugucaccacuauguaguuacucacgggaucagccuaucuuucugagauuggaagauuacuuuugggucaaaacccccucugccuacgagcucccguacggcaccaaaggcucugaagaccuccugcugagggugcucgcuauuacgaguucaucgauuccaaagaacauccagucguuacgguguaggcguugugucguaguagguaacgggcaccgcuugcgaaacucaucccugggcgaugcuauaaauaaauacgacguugugaucagacugaacaaugcaccuguugccgguuacgagggagauguaggaucaaaaacaacuaugaggcuguuuuacccggaauccgcucauuucgauccuaagguugagaacaauccagauacucugcugguccuggucgcuuuuaaggcgauggacuuccauuggauugagacaauucuguccgauaagaagagaguccgcaagggcuuuuggaaacagccaccccugauuugggacgugaaccccaagcagauuagaauccugaacccuuuuuucauggaaauugccgccgacaaguuacugagccucccaaugcaacaaccucgaaaaaucaagcaaaaacccaccaccggacucuuggccaucacgcuggcgcuucacuuaugugaucucgugcacauugccggguucggcuaccccgaugcauauaauaagaaacagacuauucacuacuacgaacaaaucacuuuaaagagcauggcaggcuccggccacaacguuucccaagaggcccucgccaucaaacggauguuagaaaugggcgccaucaagaaucuaaccucauuuuag

SEQ ID NO: 89097 - RNA, 1002 nt, Artificial Sequence
  derived and/or modified sequence
augguaagcaaaagucgauggaagcuccuagccauguuagccuugguccuggucgugauggugugguauuccaucucuagagaagauagauacaucgagcuuuucuacuucccaauuccagaaaaaaaagagccaugccuccagggggaagcagagucaaaagcauccaaguuguucggcaauuauucucgggaccaaccaauauuccugagauuggaagauuacuucuggguuaaaacaccauccgcauacgaacuuccuuacggaacgaaaggaagugaagaccuucuccuuagaguuuuggccaucaccaguagcuccauccccaaaaacauccagucucuccguugcaggcgauguguggucguuggaaauggccaccgccugaggaauaguucacuuggagaugcaauuaauaaguacgacguagucauaaggcucaauaaugcuccaguugcgggcuacgaaggggacgugggguccaaaacgacaaugcgccucuuuuauccagaaucugcccauuuugacccuaaaguagagaauaacccagauacccuccuagucuuggucgccuucaaagcaauggauuuccacuggauugagacaauacuuuccgacaagaagagagucaggaagggauucuggaagcagccaccacucauaugggacguaaauccaaaacaaauccguauacucaauccguuuuuuauggagauugcugccgacaaacugcucucacuaccuaugcaacaaccuaggaaaauaaaacagaagccaacaacuggucuacuggccaucacccucgcucugcaccuuugcgaccucguccauaucgccggcuucggguacccugaugcuuauaauaagaaacagaccauccauuacuaugagcaaaucacccugaagaguauggccggaucgggacauaauguaagccaggaggcccuugccauuaaacgcaugcuggagaugggagccauaaagaaccucacuucuuucuag

SEQ ID NO: 89098 - RNA, 1002 nt, Artificial Sequence
  derived and/or modified sequence
augguauccaaaagucgguggaaguuacucgcaaugcuagcauuaguuuuaguggucauggugugguauagcauaagccgggaagacagauauaucgaacucuucuauuuccccauaccagagaaaaaggagccauguuuacagggagaggcagaaucaaaggcuaguaaacuuuucgggaauuacucucgugaccaaccaauuuuccuuagacuagaggauuauuucuggguuaagacuccuuccgccuacgaacugcccuacggcacgaaggggagugaagaccucuuguuacgggugcucgcaaucacauccucaagcauuccaaagaacauacaaucccucaggugucggcguugcgucgucguugggaacggucauagauuaaggaacucuucacuaggggaugccaucaacaaguaugauguaguuauucgacugaacaacgccccagucgcaggauacgagggagauguuggcucgaagaccaccaugcgcuuguuuuaucccgagagugcucauuucgaccccaaaguggagaacaauccagauacucuguuaguccuggucgcuuucaaggcaauggauuuccacuggauagaaaccauccucuccgauaagaaacguguccggaaaggcuuuuggaagcagccaccucucauuugggacgucaauccaaagcaaauuagaauuuugaauccauuuuucauggagauugcggcugauaaacuucucucucuaccuaugcagcagccucgcaagauaaagcagaaaccgacaaccggccuacuugcuaucacacucgcccuccaccugugugaccucgugcacaucgccggguuuggguacccagacgccuauaauaaaaagcagacgauccacuauuaugagcagaucacucugaagaguauggcagguagcggacauaacguaucacaggaagcacuugcgauuaagagaaugcuggagaugggugcaauaaaaaauuuaacuagcuuuuag

SEQ ID NO: 89099 - RNA, 1002 nt, Artificial Sequence
  derived and/or modified sequence
auggucuccaagucccgcuggaagcuccucgcaaugcuggcguuagugcucguaguaauggugugguacaguaucagccgcgaagaccgguacauugaacuuuuuuacuuuccaauaccagagaaaaaggaacccugccuucaaggggaagcugaaagcaaggcgucuaaacuuuucggcaacuacagccgcgaccagcccauuuuuuuaaggcuugaagauuacuuuugggugaaaacuccaucagcauaugaacugccauaugggaccaaggggucugaggaccuguuacuuaggguccuugcaauaacaagcuccuccaucccuaaaaacauucaguccuuacgcugccggagauguguugucgugggcaaugggcaccguuuaagaaauucaucucucggggaugcgauuaacaaguacgauguggugauaagacucaauaacgcuccaguagcuggguacgagggagaugugggaucuaagacaacgaugcggcuguucuacccugagagugcgcacuuugaccccaaaguggaaaauaacccggauacacuguugguccugguagcuuucaaagcaauggacuuccacuggaucgagaccauuuugagugacaagaagcgcgugcgcaaagguuucuggaaacaacccccucuuauaugggauguuaauccaaagcagaucagaauuuugaaccccuucuuuauggagaucgcugcugacaaacuacugucucuaccgaugcaacagccccgcaaaauuaaacagaagccaacaacaggcuugcuugcuauaacucuggcucuccaucucugcgaccuaguucacauugccggauucggauauccugaugcauauaauaagaaacagaccauccacuauuacgaacagauuacgcugaagaguauggcggguucaggacauaauguuucucaggaagcuuuggcuaucaaacgcaugcuggagaugggcgcgaucaagaaucuuaccucauuuuag

SEQ ID NO: 89100 - RNA, 1002 nt, Artificial Sequence
  derived and/or modified sequence
augguuucaaaaagccgauggaagcuucucgccauguuagcucuggucuugguggugauggucugguauucaaucucgagagaagaucgguacauagagcuguuuuauuucccaauccccgagaagaaggaaccaugcuugcagggagaagcugagucaaaggccucaaagcuguuuggcaacuacucaagagaucagccaaucuuuuuacgacuggaagacuacuuuuggguuaaaacacccagugcauacgaauugccguacggaacgaaagguucagaggauuugcuguugcguguguuagccauuacuucuaguaguauucccaagaacauucaaucauugaggugcagaagauguguuguggugggaaaugggcaccgacuaagaaauucaucacugggugacgcaauuaauaaguacgacgucgugauccggcucaauaaugccccaguggccggcuaugagggagauguugguagcaagaccaccaugcgacuguuuuacccugaguccgcgcacuucgauccgaaaguggaaaacaaucccgacacccuccucguacugguggccuuuaaagcuauggacuuccacuggauugagacuauucucagcgauaaaaaaagaguucgcaagggauuuuggaaacagccaccucugaucugggacgucaacccuaagcagauacgaauucugaaccccuuuuucauggaaauugccgcugacaagcugcuaucccugccaaugcaacaaccuagaaagauaaaacagaagccaacaaccggucuuuuagcuauuacucuggcacuccacuuaugugaccugguacacauugcugguuuuggcuaccccgacgcuuacaauaagaaacagacaauccauuacuacgaacagaucacuuugaaaucuauggcugggucaggacacaaugugagucaggaagcacuugcgauuaaaagaaugcuugagaugggagccauuaagaaccucacaaguuuuuag

SEQ ID NO: 89101 - protein, 332 aa, Artificial Sequence
  derived and/or modified sequence
MCPAGWKLLAMLALVLVVMVWYSISREDRYIELFYFPIPEKKEPCLQGEAESKASKLFGNYSRDQPIFLRLEDYFWVKTPSAYELPYGTKGSEDLLLRVLAITSSSIPKNIQSLRCRRCVVVGNGHRLRNSSLGDAINKYDVVIRLNNAPVAGYEGDVGSKTTMRLFYPESAHFDPKVENNPDTLLVLVAFKAMDFHWIETILSDKKRVRKGFWKQPPLIWDVNPKQIRILNPFFMEIAADKLLSLPMQQPRKIKQKPTTGLLAITLALHLCDLVHIAGFGYPDAYNKKQTIHYYEQITLKSMAGSGHNVSQEALAIKRMLEMGAIKNLTSF

SEQ ID NO: 89102 - DNA, 999 bp, Artificial Sequence
  derived and/or modified sequence
atgtgtcctgcagggtggaaactcctcgcgatgctcgctctggttctagtggtgatggtatggtatagcatcagccgagaggaccgctacatcgagctgttctactttccgatcccagagaaaaaagagccctgcctccagggtgaagcagaaagcaaggccagcaagttgttcgggaactatagtagagatcagcctatttttctcagactagaggactatttttgggtcaagacaccaagcgcttatgagcttccctacgggaccaaaggtagtgaggatctgctacttagagtactggctatcacctcatcatctataccgaagaacattcaatcattacggtgtcggcgatgcgtagtcgtgggcaatggacaccggttgcgcaatagctccctgggggatgctattaataaatacgatgtagtaatacgtctcaataatgcacccgtcgctggatatgagggtgatgtcggcagtaagaccaccatgaggttgttttacccagaaagcgctcattttgaccccaaagtcgaaaataaccccgatactctgctggtgctggtcgcctttaaagctatggacttccactggattgaaaccattttgtccgataagaagagagtgcgaaaggggttttggaaacagccaccactgatatgggacgtaaatcccaaacagataaggatcctcaacccgttttttatggaaatcgctgccgataaattactttccctgcctatgcaacaacccaggaagattaaacagaagcccaccactggtctgctggctatcacattggcgctgcacctctgcgatttagttcacatcgccggattcggttaccccgacgcctacaataagaagcaaactatacactactatgagcagattaccctgaagtcaatggccggttctgggcacaacgtaagtcaggaggctcttgctatcaagcggatgctggaaatgggtgcgataaagaatctgacatcattctag

SEQ ID NO: 89103 - DNA, 987 bp, Artificial Sequence
  derived and/or modified sequence
atgtgccccgctgggtggaaactcttggcgatgttggctctggtactggtggtaatggtgtggtatagtatatctcgggaggactcattctattttccaatccccgaaaagaaagagccttgtctgcagggggaagcagaatcaaaggcatccaaactctttggcaactattcccgtgatcagcccatcttcctcaggctcgaagattacttctgggtcaagaccccgagcgcgtacgaactgccctatggcaccaagggttcggaggatctgctattgagagtgttagccattacctcttcatccatccctaagaacattcagtcgttaagatgccgccgttgtgtcgttgtgggcaatggccatagattacgtaactcttcactgggggatgccatcaacaaatatgatgtggtcatccggctgaataacgcacccgtggccggttatgaaggggatgtggggtcaaagactacgatgcgcttattctacccagaatccgcacattttgacccaaaagttgaaaataacccagacaccttactggtactggttgcgtttaaagccatggacttccactggatcgagactatcctttccgataagaaacgcgttagaaagggtttctggaagcagcccccactgatttgggacgtgaaccctaaacagatccgcattctcaatcctttcttcatggagattgccgctgataagctgttatcactgccaatgcagcagcccaggaagatcaagcaaaaacctactaccggcctgttagctattaccttggcactgcacctgtgcgatttagtgcacatcgcgggtttcggttaccccgacgcctacaataaaaagcagactatccattattatgagcagataaccttgaagagcatggccggatcggggcataacgtcagccaggaggcactggccatcaagcgcatgttggaaatgggtgccatcaagaacctcaccagcttctag

SEQ ID NO: 89104 - DNA, 999 bp, Artificial Sequence
  derived and/or modified sequence
atgtgccccgccgggtggaaacttttggcgatgcttgccttggtgctggtggtgatggtttggtattccatcagtagggaagaccgctatatagagctgttctactttccaattcccgaaaagaaagaaccatgtctgcagggagaggctgaatcaaaggcttctaagttatttggtaattattccagggaccagccaatttttctaagactcgaggattacttttgggttaagactcctagcgcgtacgaattaccctatggaacaaaagggagtgaagatctactcctgagggtgctggctatcaccagttcatctattccaaaaaacatccagagcttgaggtgccgcagatgtgtggtcgtgggcaacggtcaccgattaaggaattcctccctgggagacgctatcaacaaatatgacgtcgtgatccggcttaacaatgccccagtagctggttatgagggggatgtcggctccaaaacaactatgcgacttttctaccccgaatccgctcatttcgatcccaaagtggaaaataaccccgataccctactcgtactggtcgctttcaaggccatggactttcactggatcgagacaatactgtccgacaagaaaagggtgagaaagggtttctggaaacagccgcccctaatatgggacgtgaacccaaagcagatccggatcctgaacccattcttcatggaaatagcagcggataagttactgtccctcccgatgcagcagccccgcaaaatcaagcagaaaccaaccaccggactattggctatcacactggccctacacctgtgcgacttagtccatatcgccggttttgggtatccagacgcgtataataagaagcaaaccattcattactatgaacaaataaccctcaaaagcatggccggatcaggtcataacgtgagtcaagaagccctggccatcaagcgaatgctcgaaatgggcgcaatcaagaacctgacctccttctag

SEQ ID NO: 89105 - DNA, 987 bp, Artificial Sequence
  derived and/or modified sequence
atgtgtcctgccgggtggaaacttcttgcaatgctagccctggttctggtggtgatggtttggtattctatctctcgggaggactcattctattttccaatcccagaaaaaaaagaaccctgcctccagggggaagctgaatcaaaggcatccaaactctttgggaattattcaagggaccagccaatttttctccggctagaagactatttctgggtgaagactcccagcgcctacgagttgccatatgggacaaagggatcagaggatctcctcttaagagtgctcgctatcacatcttcctccattcctaagaacatccaatccctacgatgccgacgatgtgtggtagtgggcaacggacaccgactaagaaatagctcgctgggggatgccataaacaaatacgatgtggtgatacggctgaacaatgcacctgttgctggctacgaaggcgatgtaggctccaaaaccactatgcgcctgttctatcctgaatccgcccatttcgatccgaaagtagaaaacaacccagataccctgttggtactagtggccttcaaagccatggactttcactggattgagactattttatctgataaaaagcgggtgaggaagggattttggaaacagcctccactgatttgggacgtcaatcccaagcagatccggattttaaacccattttttatggaaatcgccgcagacaagctactatcactgccaatgcagcaaccacgcaaaattaaacagaaaccaactacgggacttttagccatcactctggcactccacctctgcgacctcgtacacattgctgggtttggctatcctgatgcctataataaaaaacagaccatacattactacgaacagataactctcaaaagcatggcaggttctggtcacaacgtatcacaggaggccctggcaattaaacgaatgctcgaaatgggagctattaagaatcttacctcattctag

SEQ ID NO: 89106 - DNA, 999 bp, Artificial Sequence
  derived and/or modified sequence
atgtgtccagctggatggaagctcttggccatgttagcattagtgttagtggtgatggtttggtacagcatcagtcgcgaggatagatacatagaactgttttactttcccatcccagaaaagaaggagccgtgtctgcaaggcgaggcagaatctaaagctagtaagttgtttggcaattatagtcgggatcagcctattttcctccgattggaagactatttctgggtgaaaactccgtccgcttatgagctaccttacggcacaaagggctcagaagatctgctgttgcgagtattggctatcaccagttcatctattccaaaaaacatccagagcttgaggtgccgcagatgtgtggtcgtgggcaacggtcaccgattaaggaattcctccctgggagacgctatcaacaaatatgacgtcgtgatccggcttaacaatgccccagtagctggttatgagggggatgtcggctccaaaacaactatgcgacttttctaccccgaatccgctcatttcgatcccaaagtggaaaataaccccgataccctactcgtactggtcgctttcaaggccatggactttcactggatcgagaccatactgagcgacaagaaacgtgtgagaaagggtttttggaagcagccccccctcatctgggacgtcaaccccaagcagattcgaattctgaatcccttttttatggagattgccgctgacaaactgctctccctccccatgcaacagcctcgcaagataaaacaaaaacctacaaccggcttactggcaatcacccttgcactgcacctctgcgacctcgtccacatcgctggcttcggatacccagatgcctacaacaaaaagcagacaatacactactacgaacagattactctgaaatccatggcaggatcaggtcataatgtaagccaggaggccttagcaattaaacgaatgctggagatgggcgcaataaagaatcttacaagtttctag

SEQ ID NO: 89107 - DNA, 987 bp, Artificial Sequence
  derived and/or modified sequence
atgtgccccgccggctggaagttattggccatgcttgcactcgtccttgtcgtgatggtgtggtattccatttccagagaggactctttctatttccccatcccagaaaaaaaagagccctgcctccagggcgaagccgaaagtaaagcatccaaactttttggaaattattctagagaccaacctatcttcctccgcctcgaggattatttttgggtgaagactccatctgcctatgaacttccctatggcaccaaaggaagcgaggatctgctcttaagggttttagcaattacctcctcctccattcctaagaacatccaatccctacgatgccgacgatgtgtggtagtgggcaacggacaccgactaagaaatagctcgctgggggatgccataaacaaatacgatgtggtgatacggctgaacaatgcacctgttgctggctacgaaggcgatgtaggctccaaaaccactatgcgcctgttctatcctgaatccgcccatttcgatccgaaagtagaaaacaacccagataccctgttggtactagtggccttcaaagccatggactttcactggattgagactattttatctgataaaaagcgggtgaggaagggattttggaaacagcctccactgatttgggacgtcaatcccaagcagatccggattttaaacccattttttatggaaatcgccgcagacaagctactatcactgccaatgcagcaaccacgcaaaattaaacagaaaccaactacgggacttttagccatcactctggcactccacctctgcgacctcgtacacattgctgggtttggctatcctgatgcctataataaaaaacagaccatacattactacgaacagataactctcaaaagcatggcaggttctggtcacaacgtatcacaggaggccctggcaattaaacgaatgctcgaaatgggagctattaagaatcttacctcattctag

SEQ ID NO: 89108 - DNA, 1825 bp, Artificial Sequence
  derived and/or modified sequence
ccaccctggaggacaggcctcagaagccgtcttcagcaggatcctgggacctctgggggctgtggagggacagacagggagccaggggcccttctcttcatcttgaaggacagtgggtacaatcagggtcaagccctcagccagggccaggagagggccagagactgcttctgttgagttaggggtcggagggactcagaagggggcaggtgggaaggtggacgggggttgtacctgcctgttgctgcctctagctcctctctgcatgtgtcctgcaggctggaagctcctggccatgttggctctggtcctggtcgtcatggtgtggtattccatctcccgggaagacaggtacatcgagcttttttattttcccatcccagagaagaaggagccgtgcctccagggtgaggcagagagcaaggcctctaagctctttggcaactactcccgggatcagcccatcttcctgcggcttgaggattatttctgggtcaagacgccatctgcttacgagctgccctatgggaccaaggggagtgaggatctgctcctccgggtgctagccatcaccagctcctccatccccaagaacatccagagcctcaggtgccgccgctgtgtggtcgtggggaacgggcaccggctgcggaacagctcactgggagatgccatcaacaagtacgatgtggtcatcagattgaacaatgccccagtggctggctatgagggtgacgtgggctccaagaccaccatgcgtctcttctaccctgaatctgcccacttcgaccccaaagtagaaaacaacccagacacactcctcgtcctggtagctttcaaggcaatggacttccactggattgagaccatcctgagtgataagaagcgggtgcgaaagggtttctggaaacagcctcccctcatctgggatgtcaatcctaaacagattcggattctcaaccccttcttcatggagattgcagctgacaaactgctgagcctgccaatgcaacagccacggaagattaagcagaagcccaccacgggcctgttggccatcacgctggccctccacctctgtgacttggtgcacattgccggctttggctacccagacgcctacaacaagaagcagaccattcactactatgagcagatcacgctcaagtccatggcggggtcaggccataatgtctcccaagaggccctggccattaagcggatgctggagatgggagctatcaagaacctcacgtccttctgacctgggcaagagctgtagcctgtcggttgcctactctgctgtctgggtgacccccatgcgtggctgtgggggtggctggtgccagtatgacccacttggactcaccccctcttggggagggagttctgggcctggccaggtctgagatgaggccatgcccctggctgctcttatggagccgagatccagtcagggtgggggcgctggagccgtgggagcccggccagggcagggggctcgttgctgtggcaccccctctctgccagcaccaagagattatttaatgggctatttaattaaggggtaggaaggtgctgtgggctggtcccacacatccaggaaagaggccagtagagaattctgcccactttttataaaaacttacagcgatggccccaccaaggcctagacacggcactggcctcccaggagggcaggggcattgggaatgggtgggtgccctccagagaggggctgctacctcccagcaggcatgggaagagcactggtgtgggggttccaccgagaaggggacctcatctagaaaagaggttacaaacc

SEQ ID NO: 89109 - DNA, 987 bp, Artificial Sequence
  derived and/or modified sequence
atgtgtcctgcaggctggaagctcctggccatgttggctctggtcctggtcgtcatggtgtggtattccatctcccgggaagacagtttttattttcccatcccagagaagaaggagccgtgcctccagggtgaggcagagagcaaggcctctaagctctttggcaactactcccgggatcagcccatcttcctgcggcttgaggattatttctgggtcaagacgccatctgcttacgagctgccctatgggaccaaggggagtgaggatctgctcctccgggtgctagccatcaccagctcctccatccccaagaacatccagagcctcaggtgccgccgctgtgtggtcgtggggaacgggcaccggctgcggaacagctcactgggagatgccatcaacaagtacgatgtggtcatcagattgaacaatgccccagtggctggctatgagggtgacgtgggctccaagaccaccatgcgtctcttctaccctgaatctgcccacttcgaccccaaagtagaaaacaacccagacacactcctcgtcctggtagctttcaaggcaatggacttccactggattgagaccatcctgagtgataagaagcgggtgcgaaagggtttctggaaacagcctcccctcatctgggatgtcaatcctaaacagattcggattctcaaccccttcttcatggagattgcagctgacaaactgctgagcctgccaatgcaacagccacggaagattaagcagaagcccaccacgggcctgttggccatcacgctggccctccacctctgtgacttggtgcacattgccggctttggctacccagacgcctacaacaagaagcagaccattcactactatgagcagatcacgctcaagtccatggcggggtcaggccataatgtctcccaagaggccctggccattaagcggatgctggagatgggagctatcaagaacctcacgtccttctga

SEQ ID NO: 89110 - DNA, 999 bp, Artificial Sequence
  derived and/or modified sequence
atgtgccccgccggctggaagctgctggccatgctggccctggtgctggtggtgatggtgtggtacagcatcagcagagaggacagatacatcgagctgttctacttccccatccccgagaagaaggagccctgcctgcagggcgaggccgagagcaaggccagcaagctgttcggcaactacagcagagaccagcccatcttcctgagactggaggactacttctgggtgaagacccccagcgcctacgagctgccctacggcaccaagggcagcgaggacctgctgctgagagtgctggccatcaccagcagcagcatccccaagaacatccagagcctgagatgcagaagatgcgtggtggtgggcaacggccacagactgagaaacagcagcctgggcgacgccatcaacaagtacgacgtggtgatcagactgaacaacgcccccgtggccggctacgagggcgacgtgggcagcaagaccaccatgagactgttctaccccgagagcgcccacttcgaccccaaggtggagaacaaccccgacaccctgctggtgctggtggccttcaaggccatggacttccactggatcgagaccatcctgagcgacaagaagagagtgagaaagggcttctggaagcagccccccctgatctgggacgtgaaccccaagcagatcagaatcctgaaccccttcttcatggagatcgccgccgacaagctgctgagcctgcccatgcagcagcccagaaagatcaagcagaagcccaccaccggcctgctggccatcaccctggccctgcacctgtgcgacctggtgcacatcgccggcttcggctaccccgacgcctacaacaagaagcagaccatccactactacgagcagatcaccctgaagagcatggccggcagcggccacaacgtgagccaggaggccctggccatcaagagaatgctggagatgggcgccatcaagaacctgaccagcttctag

SEQ ID NO: 89111 - DNA, 987 bp, Artificial Sequence
  derived and/or modified sequence
atgtgccccgccggctggaagctgctggccatgctggccctggtgctggtggtgatggtgtggtacagcatcagcagagaggacagcttctacttccccatccccgagaagaaggagccctgcctgcagggcgaggccgagagcaaggccagcaagctgttcggcaactacagcagagaccagcccatcttcctgagactggaggactacttctgggtgaagacccccagcgcctacgagctgccctacggcaccaagggcagcgaggacctgctgctgagagtgctggccatcaccagcagcagcatccccaagaacatccagagcctgagatgcagaagatgcgtggtggtgggcaacggccacagactgagaaacagcagcctgggcgacgccatcaacaagtacgacgtggtgatcagactgaacaacgcccccgtggccggctacgagggcgacgtgggcagcaagaccaccatgagactgttctaccccgagagcgcccacttcgaccccaaggtggagaacaaccccgacaccctgctggtgctggtggccttcaaggccatggacttccactggatcgagaccatcctgagcgacaagaagagagtgagaaagggcttctggaagcagccccccctgatctgggacgtgaaccccaagcagatcagaatcctgaaccccttcttcatggagatcgccgccgacaagctgctgagcctgcccatgcagcagcccagaaagatcaagcagaagcccaccaccggcctgctggccatcaccctggccctgcacctgtgcgacctggtgcacatcgccggcttcggctaccccgacgcctacaacaagaagcagaccatccactactacgagcagatcaccctgaagagcatggccggcagcggccacaacgtgagccaggaggccctggccatcaagagaatgctggagatgggcgccatcaagaacctgaccagcttctag

SEQ ID NO: 89112 - DNA, 999 bp, Artificial Sequence
  derived and/or modified sequence
atgtgccctgcgggctggaagttactggccatgctggctcttgtccttgtggttatggtatggtacagcatctcgcgggaggacagatatatcgagctgttctattttcctatcccagaaaagaaggaaccatgtttgcaaggcgaggccgaaagcaaggcctctaaactgtttgggaactactcccgtgaccagcctattttcctgcgactcgaagattatttctgggtcaaaaccccctctgcttatgagctgccctacggcaccaaagggtctgaagatctcctcctccgcgttcttgctattacctcttcatccattccaaaaaacatacagagtctgaggtgccgacgctgcgtggtagtgggtaacggccataggcttagaaactcctcactaggtgacgccatcaataaatacgacgttgtaatcaggctgaacaatgcacccgttgccggatacgagggtgacgtgggatccaaaactacaatgagattattctaccccgagtccgcccacttcgaccctaaagtggagaataacccagataccctgctcgtgttggtagcattcaaggctatggatttccattggatcgaaacaatcctctcggataagaagcgcgtccgcaagggtttctggaaacagcctcccctcatctgggacgtcaaccccaagcagattaggatcctgaatccatttttcatggagatcgcagccgacaagctgctgagcctgcccatgcagcagcccagaaagattaaacaaaagccaaccacgggcctcctggccattaccctggccctgcatctgtgtgatctcgtgcatatcgccgggtttggttatcccgacgcctataataaaaaacagacgatccactattacgaacaaatcactctgaagtctatggctggcagcggtcataacgtatcacaggaagcactcgccataaaacgcatgctggagatgggggcaatcaagaacttaacttcattttag

SEQ ID NO: 89113 - DNA, 987 bp, Artificial Sequence
  derived and/or modified sequence
atgtgtcccgcaggatggaagttgctggccatgctggcactcgtactcgtggttatggtgtggtatagcatcagcagagaggatagtttctattttccaattcccgagaaaaaagagccttgtctacaaggcgaggccgaatcaaaggcttctaaactgtttgggaactatagccgcgaccagcccatctttctgaggcttgaggattacttttgggtgaagacaccatccgcttacgagctgccatatggtaccaaagggtctgaagacctgctgctgcgcgtactggccattaccagctcatcgatcccgaagaatatccagtcgctccgatgccggaggtgcgtggtggtgggcaacgggcatagacttcggaatagcagcctgggagatgcgataaacaaatacgacgtggtcatacgactcaacaacgcacccgtagcagggtacgagggggatgttgggtccaagactacaatgagactgttctatcccgagagtgcgcactttgaccccaaggttgaaaacaacccggataccttgttggtgctggttgctttcaaagccatggacttccattggatcgaaaccatactgtccgataagaaaagagtgagaaagggattttggaaacagccaccgttaatatgggatgtgaatcctaagcagatccgtattctaaacccatttttcatggagatcgcagccgacaagctactctcgttgcctatgcaacagccacgtaaaatcaaacagaaacccaccacagggctcttggcaattacactagcactgcacttgtgcgatctggtgcacatcgcagggtttgggtacccagatgcatataataagaagcagactatccattactacgagcagataactctgaaatccatggccggctcaggccacaatgtgagccaggaagctctcgccatcaaacgtatgttggagatgggcgctattaagaatctgaccagtttctag

SEQ ID NO: 89114 - DNA, 999 bp, Artificial Sequence
  derived and/or modified sequence
atgtgcccagctggctggaagctgctggccatgctggccctggtgctggtggtgatggtgtggtacagcatcagcagagaagatcgctacatcgagctgttctacttccccatccctgagaagaaggagccctgcctgcagggcgaggccgagagcaaggccagcaagctgtttggaaactacagccgggaccagcccatcttcctgcggctggaggactacttctgggtgaagaccccatctgcctatgagctgccctacggcaccaagggcagcgaggacctgctgctgcgggtgctggccatcaccagcagcagcatccccaagaacatccagagcctgcgctgcagaagatgtgtggtggtgggcaatggccaccggctgaggaacagcagcctgggagatgccatcaacaagtatgatgtggtgatccggctgaacaatgcccctgtggccggctatgaaggagatgtgggcagcaagaccaccatgaggctcttctacccagagagcgcccactttgaccccaaggtggagaacaacccagacaccctgctggtgctggtggccttcaaggccatggacttccactggattgagaccatcctgagtgacaagaagagggtgaggaagggcttctggaagcagcccccactcatctgggatgtgaaccccaagcagatccgcatcctgaaccccttcttcatggagattgctgctgacaagctgctgagcctgcccatgcagcagcccaggaagatcaagcagaagcccaccaccggcctgctggccatcaccctggccctgcacctgtgtgacctggtgcacatcgccggcttcggctacccagatgcctacaacaagaagcagaccatccactactatgagcagatcaccctgaagtccatggccggcagcggccacaacgtgtcccaggaggccctggccatcaagaggatgctggagatgggcgccatcaagaacctgaccagcttctag

SEQ ID NO: 89115 - DNA, 987 bp, Artificial Sequence
  derived and/or modified sequence
atgtgcccagctggctggaagctgctggccatgctggccctggtgctggtggtgatggtgtggtacagcatcagcagagaagattccttctacttccccatccctgagaagaaggagccctgcctgcagggcgaggccgagagcaaggccagcaagctgtttggaaactacagccgggaccagcccatcttcctgcggctggaggactacttctgggtgaagaccccatctgcctatgagctgccctacggcaccaagggcagcgaggacctgctgctgcgggtgctggccatcaccagcagcagcatccccaagaacatccagagcctgcgctgcagaagatgtgtggtggtgggcaatggccaccggctgaggaacagcagcctgggagatgccatcaacaagtatgatgtggtgatccggctgaacaatgcccctgtggccggctatgaaggagatgtgggcagcaagaccaccatgaggctcttctacccagagagcgcccactttgaccccaaggtggagaacaacccagacaccctgctggtgctggtggccttcaaggccatggacttccactggattgagaccatcctgagtgacaagaagagggtgaggaagggcttctggaagcagcccccactcatctgggatgtgaaccccaagcagatccgcatcctgaaccccttcttcatggagattgctgctgacaagctgctgagcctgcccatgcagcagcccaggaagatcaagcagaagcccaccaccggcctgctggccatcaccctggccctgcacctgtgtgacctggtgcacatcgccggcttcggctacccagatgcctacaacaagaagcagaccatccactactatgagcagatcaccctgaagtccatggccggcagcggccacaacgtgtcccaggaggccctggccatcaagaggatgctggagatgggcgccatcaagaacctgaccagcttctag

SEQ ID NO: 89116 - DNA, 999 bp, Artificial Sequence
  derived and/or modified sequence
atgtgccccgccggctggaagctgctggccatgctggccctggtgctagtggtcatggtgtggtactccatcagcagagaagacaggtatatcgagttgttctatttccccatccccgagaaaaaggagccctgccttcaaggcgaagcagagtctaaggcttctaagctgtttggcaactatagtcgggaccaacctatcttcctgagactcgaagactacttttgggtaaaaactccgagtgcctatgaactcccatatggcaccaaaggaagcgaggacctgctgctgcgggtccttgccataacttctagttcaatccccaaaaacatccaatccctccgctgcaggcgctgtgttgtcgttggaaacggccaccgcctgcgcaacagctccctgggtgatgccattaacaagtatgacgtggtgattcgcctaaacaatgctcccgttgcaggctacgagggggatgtcggttcaaagactaccatgagactgttttaccccgaatctgctcactttgatcctaaagtcgaaaataaccctgatactctcttagttcttgttgcctttaaggccatggacttccactggatcgaaactatcctttccgataagaagcgcgtgcgaaaaggtttctggaagcagccgccattaatctgggacgtgaacccgaaacaaattaggatcctaaatccattttttatggaaattgccgccgataagcttttgagcctgcctatgcagcagccacgtaaaatcaaacagaaacccactactggtttgttagcgattacgcttgcactgcatctgtgtgaccttgttcatatcgcgggcttcggatatcccgatgcttacaacaaaaagcagacgatccattactatgaacagattaccctgaaaagtatggccgggtctggacacaacgtttcacaagaggccctggcgataaagagaatgttagaaatgggcgccatcaaaaatcttacctcattctag

SEQ ID NO: 89117 - DNA, 987 bp, Artificial Sequence
  derived and/or modified sequence
atgtgccccgccggctggaagctgctggccatgctggccctggtgctggtggttatggtttggtatagcatttcacgcgaagactctttttacttccctatcccggagaagaaggagccttgcctccagggcgaagccgagtcaaaagcctccaaactgttcggaaattattcccgcgaccagccaatttttctcagactcgaggactacttttgggtgaaaaccccttcggcctacgagcttccttacggcaccaagggttccgaggatttgctcttgcgcgtgctcgctatcacctctagttctattccaaagaacattcagagcctacggtgccgtcggtgtgtagtggtcggaaacggacacagactgcgaaatagcagcttgggggacgccattaataagtacgacgtcgttatcaggctgaataacgcccccgtggcgggctacgagggtgacgtgggcagcaaaactacaatgcggcttttttatccggagagcgcccacttcgatcctaaggtggagaacaatcctgatacactactggtcctggtggccttcaaagccatggacttccattggatcgaaacgatcctttctgacaagaaaagagtacgaaagggcttctggaaacaaccgccacttatctgggatgtgaacccaaaacagataagaattctgaacccttttttcatggaaattgcggctgacaagctcctgtccctcccgatgcagcaacccaggaaaattaaacagaagcctactacaggcctactggctattaccctggcactacatttatgtgacctcgttcatatcgcagggtttggatatcctgatgcttacaacaagaaacaaacgattcactactacgagcaaatcaccctgaaaagtatggctggcagtggacacaacgtgtcacaggaggctctggcgattaaacgcatgctggagatgggcgcaatcaagaatttgacatccttctag

SEQ ID NO: 89118 - RNA, 999 nt, Artificial Sequence
  derived and/or modified sequence
augugccccgccggguggaaacuuuuggcgaugcuugccuuggugcugguggugaugguuugguauuccaucaguagggaagaccgcuauauagagcuguucuacuuuccaauucccgaaaagaaagaaccaugucugcagggagaggcugaaucaaaggcuucuaaguuauuugguaauuauuccagggaccagccaauuuuucuaagacucgaggauuacuuuuggguuaagacuccuagcgcguacgaauuacccuauggaacaaaagggagugaagaucuacuccugagggugcuggcuaucaccaguucaucuauuccaaaaaacauccagagcuugaggugccgcagauguguggucgugggcaacggucaccgauuaaggaauuccucccugggagacgcuaucaacaaauaugacgucgugauccggcuuaacaaugccccaguagcugguuaugagggggaugucggcuccaaaacaacuaugcgacuuuucuaccccgaauccgcucauuucgaucccaaaguggaaaauaaccccgauacccuacucguacuggucgcuuucaaggccauggacuuucacuggaucgagacaauacuguccgacaagaaaagggugagaaaggguuucuggaaacagccgccccuaauaugggacgugaacccaaagcagauccggauccugaacccauucuucauggaaauagcagcggauaaguuacugucccucccgaugcagcagccccgcaaaaucaagcagaaaccaaccaccggacuauuggcuaucacacuggcccuacaccugugcgacuuaguccauaucgccgguuuuggguauccagacgcguauaauaagaagcaaaccauucauuacuaugaacaaauaacccucaaaagcauggccggaucaggucauaacgugagucaagaagcccuggccaucaagcgaaugcucgaaaugggcgcaaucaagaaccugaccuccuucuag

SEQ ID NO: 89119 - RNA, 987 nt, Artificial Sequence
  derived and/or modified sequence
auguguccugccggguggaaacuucuugcaaugcuagcccugguucugguggugaugguuugguauucuaucucucgggaggacucauucuauuuuccaaucccagaaaaaaaagaacccugccuccagggggaagcugaaucaaaggcauccaaacucuuugggaauuauucaagggaccagccaauuuuucuccggcuagaagacuauuucugggugaagacucccagcgccuacgaguugccauaugggacaaagggaucagaggaucuccucuuaagagugcucgcuaucacaucuuccuccauuccuaagaacauccaaucccuacgaugccgacgaugugugguagugggcaacggacaccgacuaagaaauagcucgcugggggaugccauaaacaaauacgauguggugauacggcugaacaaugcaccuguugcuggcuacgaaggcgauguaggcuccaaaaccacuaugcgccuguucuauccugaauccgcccauuucgauccgaaaguagaaaacaacccagauacccuguugguacuaguggccuucaaagccauggacuuucacuggauugagacuauuuuaucugauaaaaagcgggugaggaagggauuuuggaaacagccuccacugauuugggacgucaaucccaagcagauccggauuuuaaacccauuuuuuauggaaaucgccgcagacaagcuacuaucacugccaaugcagcaaccacgcaaaauuaaacagaaaccaacuacgggacuuuuagccaucacucuggcacuccaccucugcgaccucguacacauugcuggguuuggcuauccugaugccuauaauaaaaaacagaccauacauuacuacgaacagauaacucucaaaagcauggcagguucuggucacaacguaucacaggaggcccuggcaauuaaacgaaugcucgaaaugggagcuauuaagaaucuuaccucauucuag

SEQ ID NO: 89120 - RNA, 999 nt, Artificial Sequence
  derived and/or modified sequence
auguguccagcuggauggaagcucuuggccauguuagcauuaguguuaguggugaugguuugguacagcaucagucgcgaggauagauacauagaacuguuuuacuuucccaucccagaaaagaaggagccgugucugcaaggcgaggcagaaucuaaagcuaguaaguuguuuggcaauuauagucgggaucagccuauuuuccuccgauuggaagacuauuucugggugaaaacuccguccgcuuaugagcuaccuuacggcacaaagggcucagaagaucugcuguugcgaguauuggcuaucaccaguucaucuauuccaaaaaacauccagagcuugaggugccgcagauguguggucgugggcaacggucaccgauuaaggaauuccucccugggagacgcuaucaacaaauaugacgucgugauccggcuuaacaaugccccaguagcugguuaugagggggaugucggcuccaaaacaacuaugcgacuuuucuaccccgaauccgcucauuucgaucccaaaguggaaaauaaccccgauacccuacucguacuggucgcuuucaaggccauggacuuucacuggaucgagaccauacugagcgacaagaaacgugugagaaaggguuuuuggaagcagcccccccucaucugggacgucaaccccaagcagauucgaauucugaaucccuuuuuuauggagauugccgcugacaaacugcucucccuccccaugcaacagccucgcaagauaaaacaaaaaccuacaaccggcuuacuggcaaucacccuugcacugcaccucugcgaccucguccacaucgcuggcuucggauacccagaugccuacaacaaaaagcagacaauacacuacuacgaacagauuacucugaaauccauggcaggaucaggucauaauguaagccaggaggccuuagcaauuaaacgaaugcuggagaugggcgcaauaaagaaucuuacaaguuucuag

SEQ ID NO: 89121 - RNA, 987 nt, Artificial Sequence
  derived and/or modified sequence
augugccccgccggcuggaaguuauuggccaugcuugcacucguccuugucgugauggugugguauuccauuuccagagaggacucuuucuauuuccccaucccagaaaaaaaagagcccugccuccagggcgaagccgaaaguaaagcauccaaacuuuuuggaaauuauucuagagaccaaccuaucuuccuccgccucgaggauuauuuuugggugaagacuccaucugccuaugaacuucccuauggcaccaaaggaagcgaggaucugcucuuaaggguuuuagcaauuaccuccuccuccauuccuaagaacauccaaucccuacgaugccgacgaugugugguagugggcaacggacaccgacuaagaaauagcucgcugggggaugccauaaacaaauacgauguggugauacggcugaacaaugcaccuguugcuggcuacgaaggcgauguaggcuccaaaaccacuaugcgccuguucuauccugaauccgcccauuucgauccgaaaguagaaaacaacccagauacccuguugguacuaguggccuucaaagccauggacuuucacuggauugagacuauuuuaucugauaaaaagcgggugaggaagggauuuuggaaacagccuccacugauuugggacgucaaucccaagcagauccggauuuuaaacccauuuuuuauggaaaucgccgcagacaagcuacuaucacugccaaugcagcaaccacgcaaaauuaaacagaaaccaacuacgggacuuuuagccaucacucuggcacuccaccucugcgaccucguacacauugcuggguuuggcuauccugaugccuauaauaaaaaacagaccauacauuacuacgaacagauaacucucaaaagcauggcagguucuggucacaacguaucacaggaggcccuggcaauuaaacgaaugcucgaaaugggagcuauuaagaaucuuaccucauucuag

SEQ ID NO: 89122 - protein, 1796 aa, Artificial Sequence
  derived and/or modified sequence
MENEIFTPLLEQFMTSPLVTWVKTFGPLAAGNGTNLDEYVALVDGVFLNQVMLQINPKLESQRVNKKVNNDASLRMHNLSILVRQIKFYYQETLQQLIMMSLPNVLIIGKNPFSEQGTEEVKKLLLLLLGCAVQCQKKEEFIERIQGLDFDTKAAVAAHIQEVTHNQENVFDLQWMEVTDMSQEDIEPLLKNMALHLKRLIDERDEHSETIIELSEERDGLHFLPHASSSAQSPCGSPGMKRTESRQHLSVELADAKAKIRRLRQELEEKTEQLLDCKQELEQMEIELKRLQQENMNLLSDARSARMYRDELDALREKAVRVDKLESEVSRYKERLHDIEFYKARVEELKEDNQVLLETKTMLEDQLEGTRARSDKLHELEKENLQLKAKLHDMEMERDMDRKKIEELMEENMTLEMAQKQSMDESLHLGWELEQISRTSELSEAPQKSLGHEVNELTSSRLLKLEMENQSLTKTVEELRTTVDSVEGNASKILKMEKENQRLSKKVEILENEIVQEKQSLQNCQNLSKDLMKEKAQLEKTIETLRENSERQIKILEQENEHLNQTVSSLRQRSQISAEARVKDIEKENKILHESIKETSSKLSKIEFEKRQIKKELEHYKEKGERAEELENELHHLEKENELLQKKITNLKITCEKIEALEQENSELERENRKLKKTLDSFKNLTFQLESLEKENSQLDEENLELRRNVESLKCASMKMAQLQLENKELESEKEQLKKGLELLKASFKKTERLEVSYQGLDIENQRLQKTLENSNKKIQQLESELQDLEMENQTLQKNLEELKISSKRLEQLEKENKSLEQETSQLEKDKKQLEKENKRLRQQAEIKDTTLEENNVKIGNLEKENKTLSKEIGIYKESCVRLKELEKENKELVKRATIDIKTLVTLREDLVSEKLKTQQMNNDLEKLTHELEKIGLNKERLLHDEQSTDDRYKLLESKLESTLKKSLEIKEEKIAALEARLEESTNYNQQLRQELKTVKKNYEALKQRQDEERMVQSSPPISGEDNKWERESQETTRELLKVKDRLIEVERNNATLQAEKQALKTQLKQLETQNNNLQAQILALQRQTVSLQEQNTTLQTQNAKLQVENSTLNSQSTSLMNQNAQLLIQQSSLENENESVIKEREDLKSLYDSLIKDHEKLELLHERQASEYESLISKHGTLKSAHKNLEVEHRDLEDRYNQLLKQKGQLEDLEKMLKVEQEKMLLENKNHETVAAEYKKLCGENDRLNHTYSQLLKETEVLQTDHKNLKSLLNNSKLEQTRLEAEFSKLKEQYQQLDITSTKLNNQCELLSQLKGNLEEENRHLLDQIQTLMLQNRTLLEQNMESKDLFHVEQRQYIDKLNELRRQKEKLEEKIMDQYKFYDPSPPRRRGNWITLKMRKLIKSKKDINRERQKSLTLTPTRSDSSEGFLQLPHQDSQDSSSVGSNSLEDGQTLGTKKSSMVALKRLPFLRNRPKDKDKMKACYRRSMSMNDLVQSMVLAGQWTGSTENLEVPDDISTGKRRKELGAMAFSTTAINFSTVNSSAGFRSKQLVNNKDTTSFEDISPQGVSDDSSTGSRVHASRPASLDSGRTSTSNSNNNASLHEVKAGAVNNQSRPQSHSSGEFSLLHDHEAWSSSGSSPIQYLKRQTRSSPVLQHKISETLESRHHKIKTGSPGSEVVTLQQFLEESNKLTSVQIKSSSQENLLDEVMKSLSVSSDFLGKDKPVSCGLASVISTAEGTTRRTSIHDFLTKDSRLPISVDSPPAAADSNTTAASNVDKVQESRNSKSRSREQQSS

SEQ ID NO: 89123 - DNA, 5391 bp, Artificial Sequence
  derived and/or modified sequence
atggaaaacgaaatcttcacccctctcctggaacagttcatgacatctcctcttgtaacctgggtaaagacattcggacctctggcagcagggaatggcacaaatcttgacgaatacgtggctcttgtggatggcgttttcctcaatcaagtgatgctgcaaatcaaccctaagctcgaatctcagagggtgaataaaaaggtgaacaacgacgcatccctcagaatgcacaacttgtccatcctcgtcaggcaaataaagttctattaccaggaaaccttacagcaattgatcatgatgtctctgcccaacgtcctgattattggcaagaacccattttccgaacaggggacagaggaggtgaagaagctgctacttctattgctggggtgcgccgtacagtgccagaagaaagaagagtttatcgagcggatccaaggattggattttgatacaaaagcagctgtcgccgcacatattcaggaagtgacccataaccaggaaaacgtgtttgacctccaatggatggaggtgaccgacatgagtcaggaggacatagaacctctcctgaaaaatatggcgctgcacctaaagagactgatcgacgagagggatgagcacagtgaaacaattatcgagctgagcgaagagagagacggcctacactttctaccgcacgccagctcgtcagctcagagtccctgtggctcccccggaatgaagcggactgaatccagacaacatctctctgttgaactcgcggacgcgaaagccaagatacgtcgtttaagacaagagctcgaggagaagaccgaacagttgttggactgtaagcaggaactggagcaaatggagatagagctcaaaaggcttcaacaagagaacatgaatctgttgagtgatgcccggtccgcccggatgtaccgcgacgaactggacgccctgcgcgagaaggcagttcgggtagataagctggaaagtgaggtctctcggtataaagaaagactccatgatatcgagttctataaggccagggtggaggaacttaaagaggacaaccaggtcctgctggagaccaagactatgttggaggatcagctggaaggaacccgtgcacggagcgacaagctccacgagctcgaaaaggaaaatctgcagcttaaggctaagctgcacgatatggagatggaaagggacatggatcggaaaaaaatcgaggaactgatggaggaaaatatgaccctcgaaatggcccagaaacaatccatggatgagagtctccatctcggctgggagttagaacagatttcccgtacatctgagctatctgaggctccccagaaatccctcgggcatgaagtcaacgaactgacaagctcccgcctgctgaagctcgagatggagaatcaaagcctcaccaagacagtcgaggagctgcgcaccaccgtggactctgtggaggggaacgctagcaagatactgaagatggagaaggagaaccaacgactctctaaaaaggttgagatcctagagaatgaaattgtccaggagaaacagagtcttcagaactgtcaaaatctctcgaaagacttgatgaaggagaaggcccaactagaaaaaacaattgagacccttcgggagaatagcgagcggcagattaagatcctggagcaagaaaatgagcacctgaatcagacggtttcttctctgcgccagaggtcacagatttccgccgaggcacgcgtcaaagacatagagaaagagaataaaatactgcacgagtccattaaagagacatcatccaaactctccaagatcgaattcgagaagagacagattaaaaaagagctcgagcattacaaagagaaaggagagcgggccgaggagttggagaacgaacttcaccatctcgagaaggaaaatgaacttctccagaagaaaatcacaaatctgaagatcacatgtgagaagattgaagctttagaacaggagaactccgaactggaaagagagaatagaaagctaaagaagacactcgatagctttaaaaacttaacattccagctcgagtctctggaaaaagaaaatagtcagcttgacgaggaaaacttggaactgagacgtaacgtagaatcgctcaaatgtgcatccatgaaaatggctcagttgcagttggaaaacaaggaacttgagtcagaaaaagagcaactgaagaagggactcgagctgctgaaggcatccttcaagaagactgaacggctggaagtgagctatcaggggcttgatattgaaaaccagcgattgcaaaagacgctggagaactctaataagaaaatccaacagctggaatcagagctgcaagatctggagatggagaaccagactctccagaaaaatctggaggagcttaagattagttctaagaggttggaacaattggaaaaggagaacaaaagcctcgagcaggagacatcacagttggagaaagataagaaacaactggagaaggaaaacaaaaggttgagacagcaagcagagatcaaagataccacactggaggagaacaacgtaaagattggaaacctggaaaaggagaacaagacattgtctaaggagattggtatctacaaggagagctgcgtacgccttaaagagcttgagaaggagaataaagaactggtgaaaagagccaccattgacataaagacccttgtcaccttaagagaagaccttgtgtcagaaaaattaaaaacgcagcagatgaacaatgatctcgagaagctcactcacgagctggagaaaattggacttaataaggagcggctgctgcacgacgaacagtcaacggacgacaggtacaaactgctggagtccaaactggaatctactctgaaaaaatcgctcgagattaaagaggagaagatcgctgctctggaagcaaggcttgaggagtccaccaactataatcagcagctcaggcaggagctcaagaccgtgaagaagaattacgaagctctgaagcagagacaggatgaagagcggatggtccagagttcaccccctatctctggagaggacaataagtgggagagggagagccaggagactaccagagagcttctgaaggtaaaagacaggctgattgaggtggagcgtaacaacgccaccttgcaagcagaaaagcaagcacttaagactcagctgaaacagctagagactcaaaacaataacctacaggcccaaatcctagcactgcaacggcagacagtgtccttacaggagcaaaacactacgctgcaaactcagaatgcaaaattgcaggtggagaactccaccttgaactcccagtcaactagcctgatgaaccaaaacgctcagctgctcatccaacagtcatcgctcgagaatgagaacgagtccgtcatcaaggagagagaggacctgaaaagtctctacgactcccttatcaaagaccacgagaagctggaactgcttcacgaacgacaggccagcgagtatgagtcacttatttcaaaacatggcacgctcaaatcagctcacaaaaacctcgaggttgagcaccgcgacctggaagaccgctataaccagctgctaaaacaaaaaggccagctggaggatctcgagaagatgctaaaggtggagcaggagaaaatgctgctcgagaataagaaccacgagaccgttgctgccgagtataaaaaactctgcggggagaatgataggcttaatcacacgtactcccagctattgaaggaaaccgaggtgctccagacagaccacaagaaccttaagtctctattaaacaatagcaagttggagcagaccaggctcgaagctgagttctcaaaactgaaggagcaatatcaacaactcgatattacatccactaagttgaataaccagtgcgagcttctgagtcagctgaagggaaacctggaggaggagaatcgccatctccttgatcagatacagactctgatgctccagaataggacactgttggagcagaacatggaatccaaggacctgtttcacgtggaacagaggcagtatatcgataaactgaacgagttgagacgacaaaaggagaagctggaggaaaagataatggaccagtataagttctatgatccaagcccaccccggcggcgcggcaattggataacccttaagatgcgaaaattaataaagagtaagaaggatattaatcgggagaggcagaaatcgctgaccctgacccccactagatccgactcgtccgaggggtttttgcaactgccccaccaggacagccaagactccagttccgttgggagcaatagtttggaggacgggcagactcttggtaccaaaaaatcgtctatggttgcgctgaaacgtctaccttttctaagaaatcgacccaaagacaaagataagatgaaggcatgttataggcgcagtatgtccatgaacgacctggtccaatccatggtcttggctggacagtggacaggtagcacagaaaacctagaagtgcccgacgacatctccacggggaaaaggcgaaaggagctcggtgctatggcattctcaacgacggccatcaattttagtaccgtcaattcttccgcaggatttcggtcaaaacagctggtgaacaataaagatactacatccttcgaggacatctcaccccaaggagtgtccgacgactcatccaccggtagcagggtccatgcgtcacgccccgccagtctggactctggcaggacctcaacctcaaactctaataataacgcctctctgcacgaagtcaaagctggggctgtaaataaccaatccagaccacagtcccattccagcggtgaattcagtctgctccacgatcacgaggcctggtcaagtagcgggtcttcccccatacaatatctgaagaggcaaactaggtccagtcccgtgctgcagcataagataagcgaaacactcgaatcacgccaccataaaatcaaaaccgggtcacctgggagtgaggtcgttactctgcagcagttcctcgaagaaagcaataagctcacctccgtgcaaatcaagagtagctcccaggagaacctgttagacgaggtgatgaaatctctctccgtcagttcggattttctgggaaaagacaaacccgtcagctgtggtctggcgtccgtcatatcaacagctgaggggactaccaggagaacgagcatccatgactttttgactaaagatagcaggttgcccataagtgtggacagtccacctgctgccgccgattccaacacgaccgccgcgagcaatgttgataaagtgcaggagagcagaaacagcaaatcaagatccagagagcagcagagctcctag

SEQ ID NO: 89124 - DNA, 5391 bp, Artificial Sequence
  derived and/or modified sequence
atggagaatgagatcttcacccccctgctggagcagttcatgaccagccccctggtgacctgggtgaagaccttcggccccctggccgctggaaatggcaccaacctggatgaatatgtggccctggtggatggagtcttcctgaaccaggtgatgctgcagatcaaccccaagctggagagccagagggtgaacaagaaggtgaacaatgatgccagcctgaggatgcacaacctgagcatcctggtgcggcagatcaagttctactaccaggagaccctgcagcagctgatcatgatgagcctgcccaacgtgctgatcatcggcaagaaccccttcagcgagcagggcacagaggaggtgaagaagctgctgctgctgctgctgggctgtgctgtgcagtgccagaagaaggaggagttcatcgagcgcatccagggcctggactttgacaccaaggctgctgtggccgcccacatccaggaggtgacccacaaccaggagaatgtgtttgacctgcagtggatggaggtgacagacatgagccaggaggacatcgagcccctgctgaagaacatggccctgcacctgaagaggctgattgatgaaagagatgagcacagcgagaccatcatcgagctgtctgaggagagagatggcctgcacttcctgccccacgccagcagcagcgcccagagcccctgtggcagccctggcatgaagaggacagagagccggcagcacctgtctgtggagctggctgatgccaaggccaagatccggcggctgcggcaggagctggaggagaagacagagcagctgctggactgcaagcaggagctggagcagatggagattgagctgaagaggctgcagcaggagaacatgaacctgctgagtgatgcccggagcgccaggatgtacagagatgagctggatgccctgcgggagaaggctgtgcgggtggacaagctggagagcgaggtgagccgctacaaggagcggctgcatgacatcgagttctacaaggcccgggtggaggagctgaaggaggacaaccaggtgctgctggagaccaagaccatgctggaggaccagctggagggcacccgggcccggagtgacaagctgcacgagctggagaaggagaacctgcagctgaaggccaagctgcatgacatggagatggagcgggacatggacaggaagaagattgaggagctgatggaggagaacatgaccctggagatggcccagaagcagagcatggatgagagcctgcacctgggctgggagctggagcagatcagcaggaccagcgagctgtctgaggccccccagaagagcctgggccacgaggtgaatgagctgaccagcagccggctgctgaagctggagatggagaaccagagcctgaccaagacagtggaggagctgcggaccaccgtggacagcgtggagggcaatgccagcaagatcctgaagatggagaaggagaaccagaggctgagcaagaaggtggagatcctggagaatgagatcgtgcaggagaagcagagcctgcagaactgccagaacctgagcaaggacctgatgaaggagaaggcccagctggagaagaccatcgagaccctgagagaaaattctgagcggcagatcaagatcctggagcaggagaatgagcacctgaaccagacagtgagcagcctgcggcagaggagccagatctctgctgaggcccgggtgaaggacatcgagaaggagaacaagatcctgcacgagagcatcaaggagaccagcagcaagctgagcaagattgaatttgagaagaggcagatcaagaaggagctggagcactacaaggagaagggggagagagctgaggagctggagaatgagctgcaccacctggagaaggaaaatgagctgctgcagaagaagatcaccaacctgaagatcacctgtgagaagattgaggccctggagcaggagaacagcgagctggagagagaaaataggaagctgaagaagaccctggacagcttcaagaacctgaccttccagctggagagcctggagaaggagaacagccagctggatgaggagaacctggagctgcggagaaatgtggagagcctgaagtgtgcctccatgaagatggcccagctgcagctggagaacaaggagctggagagcgagaaggagcagctgaagaagggcctggagctgctgaaggccagcttcaagaagacagagcggctggaggtgtcctaccagggcctggacatcgagaaccagaggctgcagaagaccctggagaacagcaacaagaagatccagcagctggagagcgagctgcaggacctggagatggagaaccagaccctgcagaagaacctggaggagctgaagatcagcagcaagaggctggagcagctggagaaggagaacaagagcctggagcaggagaccagccagctggagaaggacaagaagcagctggagaaggagaacaagaggctgcggcagcaggccgagatcaaggacaccaccctggaggagaacaacgtgaagattggcaacctggagaaggagaacaagaccctgagcaaggagatcggcatctacaaggagagctgtgtgcggctgaaggagctggagaaggagaacaaggagctggtgaagagggccaccatcgacatcaagaccctggtgaccctgcgggaggacctggtgtctgagaagctgaagacccagcagatgaacaatgacctggagaagctgacccatgagctggagaagattggcctgaacaaggagcggctgctgcatgatgagcagagcacagatgaccgctacaagctgctggagagcaagctggagagcaccctgaagaagagcctggagatcaaggaggagaagattgctgccctggaggcccggctggaggagagcaccaactacaaccagcagctgcggcaggagctgaagacagtgaagaagaactatgaggccctgaagcagaggcaggatgaggagaggatggtgcagagcagcccccccatctctggagaggacaacaagtgggagcgggagagccaggagaccacccgggagctgctgaaggtgaaggacaggctcatcgaggtggagaggaacaatgccaccctgcaggccgagaagcaggccctgaagacccagctgaagcagctggagacccagaacaacaacctgcaggcccagatcctggccctgcagaggcagacagtgtccctgcaggagcagaacaccaccctgcagacccagaatgccaagctgcaggtggagaacagcaccctgaacagccagagcaccagcctgatgaaccagaatgcccagctgctgatccagcagagcagcctggagaatgaaaatgaatctgtcatcaaggagcgggaggacctgaagagcctgtatgacagcctcatcaaggaccacgagaagctggagctgctgcacgagcggcaggcctctgaatatgagagcctcatcagcaagcacggcaccctgaagagcgcccacaagaacctggaggtggagcaccgggacctggaggaccgctacaaccagctgctgaagcagaagggccagctggaggacctggagaagatgctgaaggtggagcaggagaagatgctgctggagaacaagaaccacgagaccgtggccgctgagtacaagaagctgtgtggagaaaatgaccggctgaaccacacctacagccagctgctgaaggagacagaggtgctgcagacagaccacaagaacctgaagagcctgctgaacaacagcaagctggagcagacccggctggaggccgagttcagcaagctgaaggagcagtaccagcagctggacatcaccagcaccaagctgaacaaccagtgtgagctgctgagccagctgaagggcaacctggaggaggagaacagacacctgctggaccagatccagaccctgatgctgcagaacagaaccctgctggagcagaacatggagagcaaggacctcttccacgtggagcagaggcagtacatcgacaagctgaatgagctgcggcggcagaaggagaagctggaggagaagatcatggaccagtacaagttctatgaccccagccccccaagaagaagaggcaactggatcaccctgaagatgaggaagctgatcaagagcaagaaggacatcaaccgggagcggcagaagagcctgaccctgacccccaccaggagtgacagcagcgagggcttcctgcagctgccccaccaggacagccaggacagcagctctgtgggcagcaacagcctggaggatggccagaccctgggcaccaagaagagctccatggtggccctgaagaggctgcccttcctgaggaaccggcccaaggacaaggacaagatgaaggcctgctaccgccgctccatgtccatgaatgacctggtgcagagcatggtgctggccggccagtggacaggcagcacagagaacctggaggtgcctgatgacatcagcacaggcaagaggaggaaggagctgggcgccatggccttcagcaccacagccatcaacttcagcacagtgaacagcagcgctggcttccgcagcaagcagctggtgaacaacaaggacaccaccagctttgaggacatcagcccccagggcgtgtctgatgacagcagcacaggcagccgggtgcacgccagcaggcctgccagcctggacagcggccgcaccagcaccagcaacagcaacaacaatgccagcctgcacgaggtgaaggccggggctgtgaacaaccagagccggccccagagccacagcagcggggagttcagcctgctgcatgaccacgaggcctggagcagcagcggcagcagccccatccagtacctgaagaggcagaccaggagcagccctgtgctgcagcacaagatcagcgagaccctggagagccgccaccacaagatcaagacaggcagccctggcagcgaggtggtgaccctgcagcagttcctggaggagagcaacaagctgacctctgtgcagatcaagagcagcagccaggagaacctgctggatgaggtgatgaagagcctgtctgtgtccagtgacttcctgggcaaggacaagcctgtgtcctgtggcctggccagcgtcatcagcacagctgagggcaccaccaggaggaccagcatccatgacttcctgaccaaggacagccggctgcccatctctgtggacagccccccagctgctgctgacagcaacaccacagctgccagcaatgtggacaaggtgcaggagagcaggaacagcaagagccgcagccgggagcagcagagcagctag

SEQ ID NO: 89125 - DNA, 5391 bp, Artificial Sequence
  derived and/or modified sequence
atggagaacgagatcttcacccccctgctggagcagttcatgaccagtccgctagtcacctgggtcaagaccttcgggcccctagctgctggcaacggtaccaacctcgatgagtatgtggcccttgtagacggcgtattcttaaatcaggtcatgctgcagatcaacccgaagttggagtcccaacgcgtcaacaagaaggtcaacaatgatgctagtctaagaatgcacaaccttagcatcctcgtccgccaaataaagttctattaccaggagaccctgcagcagctcatcatgatgagcctgcctaacgtcctcataataggcaagaaccctttctctgaacagggcacagaagaggtgaagaagttgttattgcttttgctgggttgtgctgtacaatgtcaaaaaaaagaggaatttattgagcgcattcagggcttagatttcgacactaaagctgcggtcgccgcccacattcaggaggtaacgcacaaccaggagaatgtttttgatctgcagtggatggaggtgacagatatgagccaagaagacattgaacccctcctcaaaaacatggctctgcacctgaagcgcttgattgacgaacgcgatgaacatagcgaaaccattattgaactctccgaagaaagggatggacttcactttctgccccacgcctctagcagtgcacagagcccatgcggaagccccgggatgaaaagaacggaaagcagacagcacctgtccgttgagctggccgacgccaaggccaagattaggcgcctccgtcaggagttggaagagaaaacggagcagcttctggactgcaagcaggaactggagcaaatggaaatcgagctgaagagactacaacaagaaaatatgaatctcttgtctgacgccaggtcggcgagaatgtaccgcgacgagctggacgcactgagggagaaagctgtgcgggtcgataagctcgagtcggaggtgagtcgatataaggagcggctccacgacatcgagttttacaaggccagagtcgaagagctgaaagaggacaatcaagttcttctcgagactaagacaatgctcgaagaccagctggaggggacaagagccaggtccgacaaattacatgagcttgagaaagagaatctgcagctgaaggccaagttacacgatatggagatggaacgtgacatggaccgtaaaaaaatagaggaactcatggaggagaatatgacattggagatggcacaaaagcagagcatggacgaatctcttcacctgggttgggagctggagcagatatccaggacttcagaactgtcggaagctccacagaagtctctgggccacgaagtcaatgaactgaccagctcccgcctcctaaaactagaaatggagaatcagtccttgaccaagaccgtggaagagctcagaacaaccgttgactcagtagagggaaatgcttctaagatccttaaaatggagaaagaaaatcagcgactgagcaagaaggtggagatattggagaatgagatcgtgcaggagaaacagagtctccagaattgccagaatttgtcgaaagacctgatgaaagaaaaggctcaacttgaaaaaacaattgaaacccttcgagaaaactctgaacggcagattaagattctcgaacaggaaaacgagcacctgaaccaaaccgtgtcatctctgagacagcgctcccagatcagcgcagaagcacgcgtaaaagatattgagaaagaaaacaagatactgcatgaatcaattaaagagacttcttccaagcttagcaagatcgaatttgaaaaacgacagatcaaaaaagaattagagcactataaagaaaaaggtgaacgagccgaagaacttgagaacgagctgcatcacctagaaaaagaaaatgaactgctgcagaaaaagatcaccaatcttaagataacttgcgaaaagatcgaggcccttgagcaggaaaactccgagttggagcgggagaacagaaagctcaagaaaaccctcgattccttcaaaaacctcactttccagttggaatccttggagaaagaaaatagccaactggacgaggagaatctcgaactcagaaggaatgttgagtccctgaagtgtgccagcatgaagatggcccagcttcaactggaaaacaaggaactcgaatccgaaaaggagcagttaaaaaaaggtctcgagctcttgaaggcgtcctttaaaaaaactgagaggcttgaagtgtcataccagggacttgatatagaaaatcaaagactgcagaagacgctggaaaactccaataaaaaaattcagcagctggaaagcgagctacaggatctggagatggaaaaccagacacttcagaaaaatctcgaggaacttaaaatttcctctaaacgtttggaacagcttgagaaggagaacaaatctttggagcaggaaacgagccagctagagaaggataagaaacaattggagaaggaaaataaacgtttacgccagcaagcggaaatcaaagacactactctcgaggaaaacaatgtgaagattggcaatctggagaaagaaaacaagacattgtcaaaagaaatcggaatatacaaggagagttgcgtacggctgaaagagttggaaaaggaaaataaggagttagtgaagcgagcaacgatcgacattaaaaccctggtgactttaagggaggatctggtctccgagaagttgaagacccaacaaatgaacaatgacctcgagaagctcacacacgaactcgagaagatcgggcttaacaaggagagactcctccatgatgaacaatctacagatgataggtacaagctgctcgaaagcaaactcgagagtaccctgaaaaagagtttggagataaaggaggaaaagatcgctgccttggaagctaggctcgaagaatcgaccaactacaatcaacagctccgacaggagctcaaaacagtcaagaaaaactacgaagcgctgaaacagcgccaagacgaagaacgcatggtacaatcgagccctcctattagtggcgaagacaataagtgggagcgtgagagccaggaaactacgcgagaactcctgaaggtcaaggatcgcctgatcgaagtcgagaggaataacgctacgttgcaagccgagaaacaggctttgaagactcagcttaagcagcttgagacgcagaataacaacctgcaggctcagatcctcgctctgcagcggcagacagtatccttacaggaacagaacaccacattgcaaacccagaatgcaaagctgcaggtcgagaactccaccctgaacagtcagagcacatccctcatgaaccagaatgcacagctgttgattcaacaatcctcattagaaaacgagaatgagagcgtgatcaaagagagggaggaccttaaatcactgtacgacagccttattaaagatcatgagaagctggaactccttcacgaacggcaagcctcggagtatgagagtctgatttctaagcatggcacgcttaagagcgcccacaaaaatctggaggtcgagcacagagatctcgaagataggtataaccagcttctgaaacagaaggggcagttggaagacctggaaaagatgttgaaggtagagcaagaaaagatgctcctagagaacaagaatcatgagacggtcgccgccgagtacaagaagctgtgtggcgagaatgatagattaaatcatacatattcacaactgttaaaggagactgaagtgctgcagaccgatcacaagaatctgaaatctctgttgaacaatagcaaactggagcagacacgcctggaagcagagttttctaagctcaaagagcagtaccaacaactggacatcacgtctaccaaactcaataaccagtgcgagttgctgtcccagcttaagggaaacctggaggaagagaatcggcacctgcttgaccagatacagactctgatgctgcaaaataggaccctactggaacaaaacatggaatctaaagacctcttccacgtggagcaacggcaatatatcgacaaactgaacgaattacgaaggcagaaggagaaattggaagagaagatcatggatcaatataagttttacgatcctagccccccccggcggcgcggaaattggattactctgaaaatgagaaagctcattaaatcaaagaaggacataaacagggagcggcagaagtccctgactctgaccccaacaagaagcgactcaagcgaaggattcctccagttgccccaccaggattcccaggactcatccagtgtggggtctaattccctagaagatggccaaacactgggaacaaagaaaagttccatggttgctctgaaaaggctgccattcctgcggaaccgtccgaaagataaggataagatgaaggcatgttatcgccgcagcatgagcatgaatgatctcgtgcaatctatggtgctcgccggtcaatggaccggctctacagagaacttagaggtgcctgatgatatctccaccggtaaaaggagaaaagagctcggcgccatggctttttccacaaccgcgatcaacttttccactgtcaatagttcagcaggattccgatcaaaacagctcgttaataacaaagacactacttccttcgaggatatatccccacagggggtctcagatgacagctctactggcagtcgggttcatgcatcacgtcccgcttcgcttgattcaggccggacctctacatctaacagcaataacaatgcctctctgcacgaggtgaaggctggtgcagtcaacaaccagagccggccccagagccattctagtggcgaattctccctcctccacgatcacgaggcatggtcaagtagcggatctagcccgatccagtatctgaagaggcaaactcgatcgtcccccgtcctgcagcataagataagcgagacattggagagccggcatcataagatcaagactggcagtcctggtagcgaggtggtgacattgcagcagttcttagaagagagtaacaagctgacctccgtgcagattaagagcagtagtcaggagaatctccttgacgaagtcatgaagtccttgagcgtcagctctgactttctcgggaaagacaagccagtaagctgcgggttagcatctgtcatttctaccgctgaaggcacaaccaggcggacctcaatacatgacttcctcacaaaggactcacgcctgcctatcagtgtagacagtccccccgcagccgctgattcaaatacaaccgcagcctctaatgtggataaggtgcaggagtccaggaatagtaagagccggagccgtgagcagcaaagctcatag

SEQ ID NO: 89126 - DNA, 5391 bp, Artificial Sequence
  derived and/or modified sequence
atggaaaatgaaattttcacccccctgctggaacagttcatgacatcccctctggtgacatgggttaaaacttttgggcctctggcggctgggaacggaaccaacctcgacgaatatgtggccctggtggatggcgtcttcctgaaccaggtgatgctccagatcaatcctaaattggagtcgcagagggtaaacaagaaggttaataacgacgcatccttgcggatgcacaatctcagtatcttggtgcgccagatcaagttttattaccaagagaccctccagcagttgatcatgatgagcctgcctaatgtgcttattataggtaaaaatccctttagcgagcaagggactgaggaagtcaagaaactgttgctattgcttctgggatgtgccgtgcagtgccaaaaaaaggaggaatttatagagcgcattcagggactggacttcgacacaaaagctgctgtggccgctcatatccaggaggttacacataaccaggaaaacgtcttcgacttgcaatggatggaggtcacagatatgtcccaggaagacattgaacctctgctgaagaatatggcactccatcttaagaggcttatcgatgagagagacgaacacagcgaaacgataatcgaactatctgaggaaagggacggtttgcatttcctgcctcatgcatccagctctgcacagtcaccttgcgggagccccggtatgaagcgcaccgaaagccgccagcatctttccgtggagctcgcggatgccaaagccaaaatcaggcgacttcggcaggagctggaagagaaaactgaacagctgctggattgcaagcaggagctggagcaaatggaaattgagctaaaaagactgcagcaggaaaacatgaaccttctttcggacgcccgatccgccaggatgtaccgtgacgaactggatgcgctgcgcgagaaggcggtcagggtggataaattggagtcagaagtcagccgttacaaagagcgcctgcacgatattgaattctataaagcgagggtagaagagctgaaggaggacaatcaggtattgttagaaaccaaaaccatgctggaggatcagctcgaaggaaccagggcccgatctgataaactgcatgagcttgagaaggagaacctgcagcttaaagcgaaactgcatgatatggaaatggagcgggacatggacaggaagaagattgaagaactgatggaagagaatatgacgctggagatggctcagaagcaaagcatggatgaaagcctacatctggggtgggagctggagcagattagccggacgtcagaactgtctgaggcccctcagaaaagcctggggcacgaagtgaatgaattgacttccagcaggctgctcaagctggaaatggaaaaccaaagtttaactaaaaccgtggaagagctgcgcaccacagttgactccgtcgaaggtaacgcttccaagattctcaagatggagaaagagaaccagcgtctgtccaagaaagtggagattctggagaatgaaatagtccaggagaaacagagtctacagaactgccagaatctgagcaaagacctgatgaaggaaaaagcccagctcgaaaagactatcgaaactctgcgagagaattcggagaggcagattaaaattttggaacaagaaaacgaacacctcaatcagactgtgtcgagcttgcggcagagatcccaaatttctgcagaagctagagtgaaagacattgaaaaggagaacaagattctacacgaatccatcaaggagacctctagtaagcttagcaagatcgaatttgaaaaacgccagattaagaaagagttagagcattacaaggaaaagggcgagcgggcagaagaacttgaaaacgagttgcaccacctcgaaaaagagaatgagcttctccagaagaaaatcacaaacctcaaaataacctgtgaaaagatagaggctctggaacaggaaaactctgagctcgagagggaaaatcgaaaattgaagaagactcttgatagcttcaaaaatctgacattccagttagaaagcttagagaaggagaattcccagctagacgaagagaacttagagctcaggaggaatgtggaatccctcaagtgcgcatcaatgaaaatggcacaactacagctggagaataaagagctggaatccgagaaagaacagttgaagaaaggacttgagttactgaaggcaagttttaagaaaacagagagactagaagtgagttaccagggacttgacatcgagaaccagcgcttacagaagactctggagaactccaataagaagattcagcagctggagtctgaattacaagacctggagatggaaaatcagacattgcaaaaaaatctcgaagaattgaaaatctcttctaaacggctggaacaactcgagaaagagaataagtctctggaacaagaaacgagccagctggagaaagataagaaacagcttgaaaaagagaacaagagactccggcagcaggcagagatcaaagataccacattggaggagaataatgttaagatcggtaatctcgagaaagagaacaagactctatcaaaggaaatcgggatctataaagagtcttgcgtcagactaaaggagctggaaaaagagaataaggagctcgtaaagcgggcaacaatagatatcaaaacgctggtgactctgcgggaagatcttgtgtctgaaaagctgaagactcaacagatgaataacgacctggaaaagttaacgcacgaactcgagaaaatcggcctcaacaaggagcgtctgttgcatgatgaacagtctaccgacgatcgctacaagctgctggagtcaaagttggagtcgacgctgaagaaatccctggaaatcaaagaggagaagatcgctgctttggaggcgagactcgaggagtcaaccaactacaaccagcagctccgacaagagcttaagacagtgaaaaaaaattacgaggccctgaaacagagacaggatgaggaacgaatggtccagagctctcctcctatctccggggaagacaataaatgggagagagaatctcaggaaaccacacgggaactcctcaaggtgaaggacaggctaatcgaggtggagcgaaacaatgcgacccttcaggccgagaagcaagctttgaagacccagctgaaacagcttgagacccaaaacaataacctacaggcgcagatcctggcacttcagcgacagacagtgtctctgcaagaacaaaatactaccttacagacacagaatgcgaaactgcaggtcgaaaatagcaccctgaacagtcagtctacctctcttatgaaccagaatgctcagttgctgattcagcaatctagcctggagaatgagaacgaatccgtaatcaaggagcgagaagacttgaagagcctatatgatagcctgatcaaagatcacgaaaaacttgaactgctacacgagaggcaagcttcagagtacgaaagtctgatctctaagcacggcaccctcaagagtgcacataagaatctcgaggtggagcatagagatctggaggacagatacaaccagctgctcaagcagaaggggcaacttgaggacctcgagaagatgctgaaagtcgagcaggagaaaatgctgctggaaaataaaaatcacgagacagtcgctgcagagtataagaaactgtgcggggagaacgaccgactaaatcatacttacagccaactcctcaaagagaccgaagtgcttcagacagaccacaaaaacctaaagtccttattaaataattccaaacttgagcagaccagactggaggcagagttctctaaactcaaagaacaataccagcagctggatataacatctaccaagctgaataaccagtgcgagttgctatctcagcttaaaggcaacctcgaggaggaaaataggcaccttttagatcaaatccagactttaatgctgcaaaaccggacactgcttgagcagaacatggagtcaaaggatttattccacgtcgaacaacgtcaatacatcgacaaactgaacgaactgcggaggcaaaaagagaagctggaagaaaaaattatggatcaatataaattctatgacccttcacctccacggaggcggggaaattggattacactgaaaatgaggaagctcatcaagagtaagaaagatataaacagagagaggcaaaagtctctgacactcaccccaacccgatccgactccagtgaaggtttcttgcaactacctcatcaggactcacaggactcatctagcgtgggatctaactcgttggaagacggtcagacgctgggcactaaaaagtcatcaatggtggctttaaagaggttaccatttctgcggaacaggcctaaagacaaggataagatgaaggcttgctatcgaagaagtatgtccatgaacgatttggtccagtctatggtgcttgctggtcagtggacaggatcaacagagaacctggaagtgcccgacgatatctccactggaaaacgccgaaaagaacttggcgctatggcttttagcactacagctattaactttagcaccgttaactcatccgcagggtttagaagcaagcagctggtcaataataaagataccactagcttcgaggatatatcccctcaaggagtttctgatgacagcagtaccggctccagagtgcatgcttctcgcccagccagtctggactccggccgtaccagcacatccaattccaataataatgcttccctgcacgaggtgaaggccggtgctgtaaacaatcaaagcagaccacagtcacacagtagtggtgaattttccctgctgcatgatcacgaagcctggtcatccagtggctctagccctatccagtatctcaagcggcagacccgctcctcccctgtccttcagcataaaatttccgaaaccctggaatcccggcatcacaagatcaagaccggaagtcccggtagcgaggtagtcactctgcagcagtttctcgaagagagcaataagctcacctctgtccagattaagagttcttcacaggaaaacctcctcgatgaagtgatgaagtctctcagtgtttcatctgattttttgggcaaggacaagccggtgtcctgtggcctggcgtctgttatttctacagctgagggcactactagaaggaccagcatccacgacttcctgactaaggactcacgtcttccaatctcagttgattcacccccagcggcagcagattccaacacaaccgccgcaagcaacgtggataaggtgcaggagtcgcgcaacagcaagtcccgctcacgagagcagcagtctagttat

SEQ ID NO: 89127 - DNA, 6378 bp, Artificial Sequence
  derived and/or modified sequence
gccacttcttgggatttcggctcgtttcactctggggtgttttttgaggagggagagtgcccccctcctccacgatgggatttttctcccttgccgaaatggactttcattgatttctacttacttccacgtttagtgaccaattccctaggcgtatttttgtggtagttccttttttcaaatacatactctgtaaaatggagaacgaaatttttactccccttctggagcagttcatgaccagccctttggtcacttgggttaaaacgtttggacctctggccgcaggaaatgggaccaaccttgatgaatatgtggctttggtggatggggtattcttgaaccaggtcatgctccaaattaatcctaaattggagagtcagagagtaaataaaaaagtcaataatgatgcctcacttagaatgcacaatctatccattttggtgagacagataaaattttattaccaggagactttgcagcaattgatcatgatgtcgttgccaaatgtcttaatcattggcaaaaatcccttttctgaacaaggcacagaagaagttaaaaaactgcttttacttttattgggttgtgcagttcagtgtcagaaaaaagaggaatttattgaaagaattcaaggtttagattttgatacaaaagcagcggttgccgcacatattcaagaggtaactcataatcaggaaaatgtgtttgacctgcaatggatggaagtgactgatatgtcgcaggaggacatagaaccactcttgaaaaatatggcattgcatctaaaaagacttatagatgagagagatgaacattcagagactatcatagaactctctgaagagcgggatggtctccattttctaccccatgcctcttcatctgcacagtcaccctgtggttctccaggcatgaagcgaacagaaagtcgacaacatctgtcggtggaactggcagatgctaaagccaagataagaaggcttaggcaggaattggaggaaaagactgagcagttgttggattgtaaacaagaacttgagcaaatggaaatagaactcaaaaggctgcaacaagagaacatgaatttgctttcggatgctcgctctgccagaatgtaccgagatgaattagatgcacttcgagagaaagcagtcagagtcgataagcttgaaagtgaagtcagcagatataaagagagactacatgatattgaattttataaggcaagagttgaggaattaaaagaagacaatcaagttttattagaaacaaaaaccatgttggaagaccaactagagggaactcgtgctcgttctgataaattacatgaattagaaaaagagaacttacaactgaaagctaaacttcatgatatggaaatggaacgagatatggatagaaaaaagattgaagaattaatggaagaaaatatgactttggaaatggcacagaaacaaagtatggatgaatcattacatcttggctgggaactggaacagatatccagaactagtgaactttccgaagcaccccagaaatccctgggccatgaggtgaatgagttgacatcaagtagattattgaagctagagatggaaaatcaaagtttgacaaaaaccgtagaagagcttcggactactgtggattctgtagaaggcaatgcttccaaaatcctgaaaatggaaaaagaaaatcaaaggctcagtaaaaaggttgagattcttgaaaatgagattgttcaagaaaagcaaagtcttcagaattgtcagaatttaagcaaggatctaatgaaggagaaagctcagcttgaaaaaacaatagaaacactgagagaaaattcagagagacagattaagatactggaacaggaaaatgaacatctgaatcaaacagtgtcttccttaaggcagcggtcccagataagtgcagaagcaagagtgaaagacattgaaaaagaaaacaaaattcttcatgaatctatcaaagaaacaagtagcaagctaagcaagattgaatttgaaaaaagacaaattaaaaaagaattggaacattataaagaaaaaggagaacgagctgaagaacttgaaaatgaattgcatcatcttgaaaaagaaaatgaattattacagaaaaaaataactaatttaaaaattacttgtgaaaaaattgaggccttagaacaagaaaattcagagctagaaagagaaaatagaaaattaaaaaaaacattggatagctttaaaaatctgacctttcagttagaatccctagaaaaagagaattcccaacttgatgaggaaaacttagaactgcgaaggaatgtagaatctttgaagtgtgcaagcatgaaaatggctcagctacagctagaaaacaaagaactggaaagtgaaaaagagcaacttaagaagggtttggagctcctgaaagcatctttcaagaaaacagaacgcttagaagttagctaccagggtttagatatagaaaatcaaagactgcaaaaaactttagagaacagcaataaaaaaatccagcaattagagagtgaactacaagacttagagatggaaaatcaaacattgcagaaaaacctagaagaactaaaaatatctagcaaaagactagaacagctggaaaaagaaaataaatcattagagcaagagacttctcaactggaaaaggataagaaacaattggagaaggaaaataagagactccgacaacaagcagaaattaaagataccacattagaagaaaataatgtgaagattggaaatttggaaaaagaaaacaaaaccctatccaaagaaattggtatatataaagaatcttgtgtccgtctgaaagaactagaaaaagaaaataaggagcttgtgaaaagagcaactattgatataaaaacgttggttacactacgtgaggatttggtgagtgaaaagttgaagacccaacagatgaacaatgatctcgaaaaattaactcatgagcttgagaagatagggttaaataaggagcgactcttacatgatgaacaaagtactgatgacaggtataaacttttggaatcaaaattagaatccactcttaagaagtctcttgaaataaaagaagaaaaaattgctgctttagaagctcgattagaagaatccacgaattataaccagcaattgcgccaagaacttaaaacagtgaaaaaaaattatgaagctctcaaacagagacaagatgaggaaaggatggtacagagctctcctccaatatctggtgaagacaacaaatgggagcgagaaagtcaagaaacgactagagaacttctgaaagttaaagacagattaattgaagtagaaagaaataatgctacactgcaagcagagaagcaagcgttgaaaactcaactgaagcaacttgagacacagaacaataatttgcaggctcagattcttgcacttcagaggcagacagtgtcattacaagaacagaataccactcttcaaacacagaatgccaagcttcaggttgaaaattccacccttaattcccaaagtacctcactcatgaaccagaatgcccaactcctaatccagcagtcttccttagaaaatgaaaatgaatctgtaatcaaagagcgagaagacctaaaatctctctatgattctctgatcaaagatcatgaaaagctggaacttcttcatgaacgtcaggcttcagagtatgaatctcttatctctaaacatggaactctgaagtctgcccacaaaaatcttgaggtggaacatagagaccttgaagaccgttacaatcagttattaaaacagaaaggacagttggaagatttggaaaaaatgctcaaagtagaacaggaaaaaatgctgcttgaaaataaaaatcatgaaacagtagctgcagaatacaagaaactttgtggtgaaaatgataggctgaatcatacctatagtcaacttttaaaagagactgaagttttacaaactgaccataaaaatttgaaaagtcttctgaataattccaaactggaacaaacaagattagaagctgaattttcaaaactaaaggaacaataccaacaattggatattacatcaaccaagctgaataaccagtgtgagttgctaagccaacttaaaggaaatttagaagaagaaaatcggcatctactagatcaaattcagacattaatgctacagaacagaacacttttggagcagaatatggaaagcaaggatctttttcatgttgaacaaagacagtacattgataagttaaatgaattaagacgtcagaaggagaaactagaagagaaaattatggatcaatacaaattttatgacccatctcctcctagaaggagaggcaactggattactctaaaaatgagaaaattgataaagtctaagaaagatattaatcgggaacgccagaaatctctaacattaacacccacccgctcagactccagtgaaggatttcttcagctccctcatcaagacagtcaagatagttcttcagtaggttcaaactctttagaagatggccagaccttggggaccaagaaaagcagcatggttgcactgaaaagactgccctttttgaggaacagaccgaaggataaagacaaaatgaaggcctgctaccgtcgttccatgtccatgaatgacctggtgcagtccatggtcctagcaggacagtggacaggtagtactgagaatttggaggttcctgatgatatttcaacgggtaaaaggagaaaagaattgggagctatggccttctctactacagccatcaacttttcaactgtcaactcttctgcaggcttcagatccaagcagttggttaataataaagatactacatcctttgaagacataagtccacaaggtgttagtgatgattctagtacgggatcaagagttcatgcttcaagaccagccagccttgatagtggcagaacatccactagcaatagcaataataatgcttcactacatgaagtcaaagcaggtgcagttaataaccaaagcaggccacaaagccacagcagtggagaatttagcctgcttcatgaccatgaggcttggtccagcagtggtagcagtccaatccagtacttgaaaagacagaccagatcaagcccagtgctccagcacaaaatatctgaaacactggagagtcgacatcacaagatcaaaactggttcccctggaagtgaagttgttactctacaacagtttttggaagaaagcaataagcttacctcagtacagataaagtcctcaagtcaagagaatcttttagatgaagtaatgaaaagtttgtctgtctcttctgactttttgggaaaagacaaaccagttagctgtggtctggccagcgtgatctcaactgccgaaggaactacacgaaggacaagcatccatgattttttgaccaaggacagtagactgcctatatcagttgattcaccaccagctgctgctgacagcaacaccactgcagcatctaatgtggacaaagtacaagaaagcagaaattcaaaaagcaggtctagggagcaacaaagctcctaattctattacccactacatgacatgtgggccaagtgagagaaaagtgtccttcagtttctcagtatgaagcctttatttctgaagtaacaagacacctagcaactataggaatcatttttaaaaatctttaaggagacttttaacagtccttcgtgaatagagcaggcaagaaatacaaaccttcattccttgaatcaaggagcactactggattcaactgccaaaattttttaaaggttttaggacttactataccttgtactgttaagatctactgaataaaggacgttctctcactaaggaccaggtgttttaaggttaagtgtttaaagaagtactccaagaacaatctgcttttttcatcatttgttttatgaatttatccatgtttgcttaatgcttctgctaagtgttagccaaaatctagccatttatatttagttgtgtaaacctaaattaaatgctgtagtattttgtggaatgtactatatagcaagatacagagaaaattgttttggcatgtcagagccttatttggttagcagactgcatgtgttgatactttttttttcttaaagccaattattttgatgcaaaagaaattcagtttataagataaatctgaaaaatccataatgaaataggagttataaaaaatttatagtgatattaatctttccatatttcccattaagcaacactaagcattcataagttaacccatggtaaagagtgtttttctgaaacttttttttagtaagatggtttttcagcaaatggcattcccaag

SEQ ID NO: 89128 - DNA, 5391 bp, Artificial Sequence
  derived and/or modified sequence
atggagaacgagatcttcacccccctgctggagcagttcatgaccagccccctggtgacctgggtgaagaccttcggccccctggccgccggcaacggcaccaacctggacgagtacgtggccctggtggacggcgtgttcctgaaccaggtgatgctgcagatcaaccccaagctggagagccagagagtgaacaagaaggtgaacaacgacgccagcctgagaatgcacaacctgagcatcctggtgagacagatcaagttctactaccaggagaccctgcagcagctgatcatgatgagcctgcccaacgtgctgatcatcggcaagaaccccttcagcgagcagggcaccgaggaggtgaagaagctgctgctgctgctgctgggctgcgccgtgcagtgccagaagaaggaggagttcatcgagagaatccagggcctggacttcgacaccaaggccgccgtggccgcccacatccaggaggtgacccacaaccaggagaacgtgttcgacctgcagtggatggaggtgaccgacatgagccaggaggacatcgagcccctgctgaagaacatggccctgcacctgaagagactgatcgacgagagagacgagcacagcgagaccatcatcgagctgagcgaggagagagacggcctgcacttcctgccccacgccagcagcagcgcccagagcccctgcggcagccccggcatgaagagaaccgagagcagacagcacctgagcgtggagctggccgacgccaaggccaagatcagaagactgagacaggagctggaggagaagaccgagcagctgctggactgcaagcaggagctggagcagatggagatcgagctgaagagactgcagcaggagaacatgaacctgctgagcgacgccagaagcgccagaatgtacagagacgagctggacgccctgagagagaaggccgtgagagtggacaagctggagagcgaggtgagcagatacaaggagagactgcacgacatcgagttctacaaggccagagtggaggagctgaaggaggacaaccaggtgctgctggagaccaagaccatgctggaggaccagctggagggcaccagagccagaagcgacaagctgcacgagctggagaaggagaacctgcagctgaaggccaagctgcacgacatggagatggagagagacatggacagaaagaagatcgaggagctgatggaggagaacatgaccctggagatggcccagaagcagagcatggacgagagcctgcacctgggctgggagctggagcagatcagcagaaccagcgagctgagcgaggccccccagaagagcctgggccacgaggtgaacgagctgaccagcagcagactgctgaagctggagatggagaaccagagcctgaccaagaccgtggaggagctgagaaccaccgtggacagcgtggagggcaacgccagcaagatcctgaagatggagaaggagaaccagagactgagcaagaaggtggagatcctggagaacgagatcgtgcaggagaagcagagcctgcagaactgccagaacctgagcaaggacctgatgaaggagaaggcccagctggagaagaccatcgagaccctgagagagaacagcgagagacagatcaagatcctggagcaggagaacgagcacctgaaccagaccgtgagcagcctgagacagagaagccagatcagcgccgaggccagagtgaaggacatcgagaaggagaacaagatcctgcacgagagcatcaaggagaccagcagcaagctgagcaagatcgagttcgagaagagacagatcaagaaggagctggagcactacaaggagaagggcgagagagccgaggagctggagaacgagctgcaccacctggagaaggagaacgagctgctgcagaagaagatcaccaacctgaagatcacctgcgagaagatcgaggccctggagcaggagaacagcgagctggagagagagaacagaaagctgaagaagaccctggacagcttcaagaacctgaccttccagctggagagcctggagaaggagaacagccagctggacgaggagaacctggagctgagaagaaacgtggagagcctgaagtgcgccagcatgaagatggcccagctgcagctggagaacaaggagctggagagcgagaaggagcagctgaagaagggcctggagctgctgaaggccagcttcaagaagaccgagagactggaggtgagctaccagggcctggacatcgagaaccagagactgcagaagaccctggagaacagcaacaagaagatccagcagctggagagcgagctgcaggacctggagatggagaaccagaccctgcagaagaacctggaggagctgaagatcagcagcaagagactggagcagctggagaaggagaacaagagcctggagcaggagaccagccagctggagaaggacaagaagcagctggagaaggagaacaagagactgagacagcaggccgagatcaaggacaccaccctggaggagaacaacgtgaagatcggcaacctggagaaggagaacaagaccctgagcaaggagatcggcatctacaaggagagctgcgtgagactgaaggagctggagaaggagaacaaggagctggtgaagagagccaccatcgacatcaagaccctggtgaccctgagagaggacctggtgagcgagaagctgaagacccagcagatgaacaacgacctggagaagctgacccacgagctggagaagatcggcctgaacaaggagagactgctgcacgacgagcagagcaccgacgacagatacaagctgctggagagcaagctggagagcaccctgaagaagagcctggagatcaaggaggagaagatcgccgccctggaggccagactggaggagagcaccaactacaaccagcagctgagacaggagctgaagaccgtgaagaagaactacgaggccctgaagcagagacaggacgaggagagaatggtgcagagcagcccccccatcagcggcgaggacaacaagtgggagagagagagccaggagaccaccagagagctgctgaaggtgaaggacagactgatcgaggtggagagaaacaacgccaccctgcaggccgagaagcaggccctgaagacccagctgaagcagctggagacccagaacaacaacctgcaggcccagatcctggccctgcagagacagaccgtgagcctgcaggagcagaacaccaccctgcagacccagaacgccaagctgcaggtggagaacagcaccctgaacagccagagcaccagcctgatgaaccagaacgcccagctgctgatccagcagagcagcctggagaacgagaacgagagcgtgatcaaggagagagaggacctgaagagcctgtacgacagcctgatcaaggaccacgagaagctggagctgctgcacgagagacaggccagcgagtacgagagcctgatcagcaagcacggcaccctgaagagcgcccacaagaacctggaggtggagcacagagacctggaggacagatacaaccagctgctgaagcagaagggccagctggaggacctggagaagatgctgaaggtggagcaggagaagatgctgctggagaacaagaaccacgagaccgtggccgccgagtacaagaagctgtgcggcgagaacgacagactgaaccacacctacagccagctgctgaaggagaccgaggtgctgcagaccgaccacaagaacctgaagagcctgctgaacaacagcaagctggagcagaccagactggaggccgagttcagcaagctgaaggagcagtaccagcagctggacatcaccagcaccaagctgaacaaccagtgcgagctgctgagccagctgaagggcaacctggaggaggagaacagacacctgctggaccagatccagaccctgatgctgcagaacagaaccctgctggagcagaacatggagagcaaggacctgttccacgtggagcagagacagtacatcgacaagctgaacgagctgagaagacagaaggagaagctggaggagaagatcatggaccagtacaagttctacgaccccagcccccccagaagaagaggcaactggatcaccctgaagatgagaaagctgatcaagagcaagaaggacatcaacagagagagacagaagagcctgaccctgacccccaccagaagcgacagcagcgagggcttcctgcagctgccccaccaggacagccaggacagcagcagcgtgggcagcaacagcctggaggacggccagaccctgggcaccaagaagagcagcatggtggccctgaagagactgcccttcctgagaaacagacccaaggacaaggacaagatgaaggcctgctacagaagaagcatgagcatgaacgacctggtgcagagcatggtgctggccggccagtggaccggcagcaccgagaacctggaggtgcccgacgacatcagcaccggcaagagaagaaaggagctgggcgccatggccttcagcaccaccgccatcaacttcagcaccgtgaacagcagcgccggcttcagaagcaagcagctggtgaacaacaaggacaccaccagcttcgaggacatcagcccccagggcgtgagcgacgacagcagcaccggcagcagagtgcacgccagcagacccgccagcctggacagcggcagaaccagcaccagcaacagcaacaacaacgccagcctgcacgaggtgaaggccggcgccgtgaacaaccagagcagaccccagagccacagcagcggcgagttcagcctgctgcacgaccacgaggcctggagcagcagcggcagcagccccatccagtacctgaagagacagaccagaagcagccccgtgctgcagcacaagatcagcgagaccctggagagcagacaccacaagatcaagaccggcagccccggcagcgaggtggtgaccctgcagcagttcctggaggagagcaacaagctgaccagcgtgcagatcaagagcagcagccaggagaacctgctggacgaggtgatgaagagcctgagcgtgagcagcgacttcctgggcaaggacaagcccgtgagctgcggcctggccagcgtgatcagcaccgccgagggcaccaccagaagaaccagcatccacgacttcctgaccaaggacagcagactgcccatcagcgtggacagcccccccgccgccgccgacagcaacaccaccgccgccagcaacgtggacaaggtgcaggagagcagaaacagcaagagcagaagcagagagcagcagagcagctag

SEQ ID NO: 89129 - DNA, 6705 bp, Artificial Sequence
  derived and/or modified sequence
gacgtcttaagacccactttcacatttaagttgtttttctaatccgcatatgatcaattcaaggccgaataagaaggctggctctgcaccttggtgatcaaataattcgatagcttgtcgtaataatggcggcatactatcagtagtaggtgtttccctttcttctttagcgacttgatgctcttgatcttccaatacgcaacctaaagtaaaatgccccacagcgctgagtgcatataatgcattctctagtgaaaaaccttgttggcataaaaaggctaattgattttcgagagtttcatactgtttttctgtaggccgtgtacctaaatgtacttttgctccatcgcgatgacttagtaaagcacatctaaaacttttagcgttattacgtaaaaaatcttgccagctttccccttctaaagggcaaaagtgagtatggtgcctatctaacatctcaatggctaaggcgtcgagcaaagcccgcttattttttacatgccaatacaatgtaggctgctctacacctagcttctgggcgagtttacgggttgttaaaccttcgattccgacctcattaagcagctctaatgcgctgttaatcactttacttttatctaatctagacatcattaattcctaatttttgttgacactctatcgttgatagagttattttaccactccctatcagtgatagagaaaagaattcaaaagatctaaagaggagaaaggatctatggataagaaatactcaataggcttagctatcggcacaaatagcgtcggatgggcggtgatcactgatgaatataaggttccgtctaaaaagttcaaggttctgggaaatacagaccgccacagtatcaaaaaaaatcttataggggctcttttatttgacagtggagagacagcggaagcgactcgtctcaaacggacagctcgtagaaggtatacacgtcggaagaatcgtatttgttatctacaggagattttttcaaatgagatggcgaaagtagatgatagtttctttcatcgacttgaagagtcttttttggtggaagaagacaagaagcatgaacgtcatcctatttttggaaatatagtagatgaagttgcttatcatgagaaatatccaactatctatcatctgcgaaaaaaattggtagattctactgataaagcggatttgcgcttaatctatttggccttagcgcatatgattaagtttcgtggtcattttttgattgagggagatttaaatcctgataatagtgatgtggacaaactatttatccagttggtacaaacctacaatcaattatttgaagaaaaccctattaacgcaagtggagtagatgctaaagcgattctttctgcacgattgagtaaatcaagacgattagaaaatctcattgctcagctccccggtgagaagaaaaatggcttatttgggaatctcattgctttgtcattgggtttgacccctaattttaaatcaaattttgatttggcagaagatgctaaattacagctttcaaaagatacttacgatgatgatttagataatttattggcgcaaattggagatcaatatgctgatttgtttttggcagctaagaatttatcagatgctattttactttcagatatcctaagagtaaatactgaaataactaaggctcccctatcagcttcaatgattaaacgctacgatgaacatcatcaagacttgactcttttaaaagctttagttcgacaacaacttccagaaaagtataaagaaatcttttttgatcaatcaaaaaacggatatgcaggttatattgatgggggagctagccaagaagaattttataaatttatcaaaccaattttagaaaaaatggatggtactgaggaattattggtgaaactaaatcgtgaagatttgctgcgcaagcaacggacctttgacaacggctctattccccatcaaattcacttgggtgagctgcatgctattttgagaagacaagaagacttttatccatttttaaaagacaatcgtgagaagattgaaaaaatcttgacttttcgaattccttattatgttggtccattggcgcgtggcaatagtcgttttgcatggatgactcggaagtctgaagaaacaattaccccatggaattttgaagaagttgtcgataaaggtgcttcagctcaatcatttattgaacgcatgacaaactttgataaaaatcttccaaatgaaaaagtactaccaaaacatagtttgctttatgagtattttacggtttataacgaattgacaaaggtcaaatatgttactgaaggaatgcgaaaaccagcatttctttcaggtgaacagaagaaagccattgttgatttactcttcaaaacaaatcgaaaagtaaccgttaagcaattaaaagaagattatttcaaaaaaatagaatgttttgatagtgttgaaatttcaggagttgaagatagatttaatgcttcattaggtacctaccatgatttgctaaaaattattaaagataaagattttttggataatgaagaaaatgaagatatcttagaggatattgttttaacattgaccttatttgaagatagggagatgattgaggaaagacttaaaacatatgctcacctctttgatgataaggtgatgaaacagcttaaacgtcgccgttatactggttggggacgtttgtctcgaaaattgattaatggtattagggataagcaatctggcaaaacaatattagattttttgaaatcagatggttttgccaatcgcaattttatgcagctgatccatgatgatagtttgacatttaaagaagacattcaaaaagcacaagtgtctggacaaggcgatagtttacatgaacatattgcaaatttagctggtagccctgctattaaaaaaggtattttacagactgtaaaagttgttgatgaattggtcaaagtaatggggcggcataagccagaaaatatcgttattgaaatggcacgtgaaaatcagacaactcaaaagggccagaaaaattcgcgagagcgtatgaaacgaatcgaagaaggtatcaaagaattaggaagtcagattcttaaagagcatcctgttgaaaatactcaattgcaaaatgaaaagctctatctctattatctccaaaatggaagagacatgtatgtggaccaagaattagatattaatcgtttaagtgattatgatgtcgatgccattgttccacaaagtttccttaaagacgattcaatagacaataaggtcttaacgcgttctgataaaaatcgtggtaaatcggataacgttccaagtgaagaagtagtcaaaaagatgaaaaactattggagacaacttctaaacgccaagttaatcactcaacgtaagtttgataatttaacgaaagctgaacgtggaggtttgagtgaacttgataaagctggttttatcaaacgccaattggttgaaactcgccaaatcactaagcatgtggcacaaattttggatagtcgcatgaatactaaatacgatgaaaatgataaacttattcgagaggttaaagtgattaccttaaaatctaaattagtttctgacttccgaaaagatttccaattctataaagtacgtgagattaacaattaccatcatgcccatgatgcgtatctaaatgccgtcgttggaactgctttgattaagaaatatccaaaacttgaatcggagtttgtctatggtgattataaagtttatgatgttcgtaaaatgattgctaagtctgagcaagaaataggcaaagcaaccgcaaaatatttcttttactctaatatcatgaacttcttcaaaacagaaattacacttgcaaatggagagattcgcaaacgccctctaatcgaaactaatggggaaactggagaaattgtctgggataaagggcgagattttgccacagtgcgcaaagtattgtccatgccccaagtcaatattgtcaagaaaacagaagtacagacaggcggattctccaaggagtcaattttaccaaaaagaaattcggacaagcttattgctcgtaaaaaagactgggatccaaaaaaatatggtggttttgatagtccaacggtagcttattcagtcctagtggttgctaaggtggaaaaagggaaatcgaagaagttaaaatccgttaaagagttactagggatcacaattatggaaagaagttcctttgaaaaaaatccgattgactttttagaagctaaaggatataaggaagttaaaaaagacttaatcattaaactacctaaatatagtctttttgagttagaaaacggtcgtaaacggatgctggctagtgccggagaattacaaaaaggaaatgagctggctctgccaagcaaatatgtgaattttttatatttagctagtcattatgaaaagttgaagggtagtccagaagataacgaacaaaaacaattgtttgtggagcagcataagcattatttagatgagattattgagcaaatcagtgaattttctaagcgtgttattttagcagatgccaatttagataaagttcttagtgcatataacaaacatagagacaaaccaatacgtgaacaagcagaaaatattattcatttatttacgttgacgaatcttggagctcccgctgcttttaaatattttgatacaacaattgatcgtaaacgatatacgtctacaaaagaagttttagatgccactcttatccatcaatccatcactggtctttatgaaacacgcattgatttgagtcagctaggaggtgactaactcgagtaaggatctccaggcatcaaataaaacgaaaggctcagtcgaaagactgggcctttcgttttatctgttgtttgtcggtgaacgctctctactagagtcacactggctcaccttcgggtgggcctttctgcgtttatacctagggatatattccgcttcctcgctcactgactcgctacgctcggtcgttcgactgcggcgagcggaaatggcttacgaacggggcggagatttcctggaagatgccaggaagatacttaacagggaagtgagagggccgcggcaaagccgtttttccataggctccgcccccctgacaagcatcacgaaatctgacgctcaaatcagtggtggcgaaacccgacaggactataaagataccaggcgtttccccctggcggctccctcgtgcgctctcctgttcctgcctttcggtttaccggtgtcattccgctgttatggccgcgtttgtctcattccacgcctgacactcagttccgggtaggcagttcgctccaagctggactgtatgcacgaaccccccgttcagtccgaccgctgcgccttatccggtaactatcgtcttgagtccaacccggaaagacatgcaaaagcaccactggcagcagccactggtaattgatttagaggagttagtcttgaagtcatgcgccggttaaggctaaactgaaaggacaagttttggtgactgcgctcctccaagccagttacctcggttcaaagagttggtagctcagagaaccttcgaaaaaccgccctgcaaggcggttttttcgttttcagagcaagagattacgcgcagaccaaaacgatctcaagaagatcatcttattaatcagataaaatatttctagatttcagtgcaatttatctcttcaaatgtagcacctgaagtcagccccatacgatataagttgttactagtgcttggattctcaccaataaaaaacgcccggcggcaaccgagcgttctgaacaaatccagatggagttctgaggtcattactggatctatcaacaggagtccaagcgagctcgatatcaaattacgccccgccctgccactcatcgcagtactgttgtaattcattaagcattctgccgacatggaagccatcacaaacggcatgatgaacctgaatcgccagcggcatcagcaccttgtcgccttgcgtataatatttgcccatggtgaaaacgggggcgaagaagttgtccatattggccacgtttaaatcaaaactggtgaaactcacccagggattggctgagacgaaaaacatattctcaataaaccctttagggaaataggccaggttttcaccgtaacacgccacatcttgcgaatatatgtgtagaaactgccggaaatcgtcgtggtattcactccagagcgatgaaaacgtttcagtttgctcatggaaaacggtgtaacaagggtgaacactatcccatatcaccagctcaccgtctttcattgccatacgaaattccggatgagcattcatcaggcgggcaagaatgtgaataaaggccggataaaacttgtgcttatttttctttacggtctttaaaaaggccgtaatatccagctgaacggtctggttataggtacattgagcaactgactgaaatgcctcaaaatgttctttacgatgccattgggatatatcaacggtggtatatccagtgatttttttctccattttagcttccttagctcctgaaaatctcgataactcaaaaaatacgcccggtagtgatcttatttcattatggtgaaagttggaacctcttacgtgccgatcaacgtctcattttcgccagatatc

SEQ ID NO: 89130 - DNA, 4146 bp, Artificial Sequence
  derived and/or modified sequence
gccaccatggacaagaagtactccattgggctcgatatcggcacaaacagcgtcggctgggccgtcattacggacgagtacaaggtgccgagcaaaaaattcaaagttctgggcaataccgatcgccacagcataaagaagaacctcattggcgccctcctgttcgactccggggagacggccgaagccacgcggctcaaaagaacagcacggcgcagatatacccgcagaaagaatcggatctgctacctgcaggagatctttagtaatgagatggctaaggtggatgactctttcttccataggctggaggagtcctttttggtggaggaggataaaaagcacgagcgccacccaatctttggcaatatcgtggacgaggtggcgtaccatgaaaagtacccaaccatatatcatctgaggaagaagcttgtagacagtactgataaggctgacttgcggttgatctatctcgcgctggcgcatatgatcaaatttcggggacacttcctcatcgagggggacctgaacccagacaacagcgatgtcgacaaactctttatccaactggttcagacttacaatcagcttttcgaagagaacccgatcaacgcatccggagttgacgccaaagcaatcctgagcgctaggctgtccaaatcccggcggctcgaaaacctcatcgcacagctccctggggagaagaagaacggcctgtttggtaatcttatcgccctgtcactcgggctgacccccaactttaaatctaacttcgacctggccgaagatgccaagcttcaactgagcaaagacacctacgatgatgatctcgacaatctgctggcccagatcggcgaccagtacgcagacctttttttggcggcaaagaacctgtcagacgccattctgctgagtgatattctgcgagtgaacacggagatcaccaaagctccgctgagcgctagtatgatcaagcgctatgatgagcaccaccaagacttgactttgctgaaggcccttgtcagacagcaactgcctgagaagtacaaggaaattttcttcgatcagtctaaaaatggctacgccggatacattgacggcggagcaagccaggaggaattttacaaatttattaagcccatcttggaaaaaatggacggcaccgaggagctgctggtaaagcttaacagagaagatctgttgcgcaaacagcgcactttcgacaatggaagcatcccccaccagattcacctgggcgaactgcacgctatcctcaggcggcaagaggatttctacccctttttgaaagataacagggaaaagattgagaaaatcctcacatttcggataccctactatgtaggccccctcgcccggggaaattccagattcgcgtggatgactcgcaaatcagaagagaccatcactccctggaacttcgaggaagtcgtggataagggggcctctgcccagtccttcatcgaaaggatgactaactttgataaaaatctgcctaacgaaaaggtgcttcctaaacactctctgctgtacgagtacttcacagtttataacgagctcaccaaggtcaaatacgtcacagaagggatgagaaagccagcattcctgtctggagagcagaagaaagctatcgtggacctcctcttcaagacgaaccggaaagttaccgtgaaacagctcaaagaagactatttcaaaaagattgaatgtttcgactctgttgaaatcagcggagtggaggatcgcttcaacgcatccctgggaacgtatcacgatctcctgaaaatcattaaagacaaggacttcctggacaatgaggagaacgaggacattcttgaggacattgtcctcacccttacgttgtttgaagatagggagatgattgaagaacgcttgaaaacttacgctcatctcttcgacgacaaagtcatgaaacagctcaagaggcgccgatatacaggatgggggcggctgtcaagaaaactgatcaatgggatccgagacaagcagagtggaaagacaatcctggattttcttaagtccgatggatttgccaaccggaacttcatgcagttgatccatgatgactctctcacctttaaggaggacatccagaaagcacaagtttctggccagggggacagtcttcacgagcacatcgctaatcttgcaggtagcccagctatcaaaaagggaatactgcagaccgttaaggtcgtggatgaactcgtcaaagtaatgggaaggcataagcccgagaatatcgttatcgagatggcccgagagaaccaaactacccagaagggacagaagaacagtagggaaaggatgaagaggattgaagagggtataaaagaactggggtcccaaatccttaaggaacacccagttgaaaacacccagcttcagaatgagaagctctacctgtactacctgcagaacggcagggacatgtacgtggatcaggaactggacatcaatcggctctccgactacgacgtggatcatatcgtgccccagtcttttctcaaagatgattctattgataataaagtgttgacaagatccgataaaaatagagggaagagtgataacgtcccctcagaagaagttgtcaagaaaatgaaaaattattggcggcagctgctgaacgccaaactgatcacacaacggaagttcgataatctgactaaggctgaacgaggtggcctgtctgagttggataaagccggcttcatcaaaaggcagcttgttgagacacgccagatcaccaagcacgtggcccaaattctcgattcacgcatgaacaccaagtacgatgaaaatgacaaactgattcgagaggtgaaagttattactctgaagtctaagctggtctcagatttcagaaaggactttcagttttataaggtgagagagatcaacaattaccaccatgcgcatgatgcctacctgaatgcagtggtaggcactgcacttatcaaaaaatatcccaagcttgaatctgaatttgtttacggagactataaagtgtacgatgttaggaaaatgatcgcaaagtctgagcaggaaataggcaaggccaccgctaagtacttcttttacagcaatattatgaattttttcaagaccgagattacactggccaatggagagattcggaagcgaccacttatcgaaacaaacggagaaacaggagaaatcgtgtgggacaagggtagggatttcgcgacagtccggaaggtcctgtccatgccgcaggtgaacatcgttaaaaagaccgaagtacagaccggaggcttctccaaggaaagtatcctcccgaaaaggaacagcgacaagctgatcgcacgcaaaaaagattgggaccccaagaaatacggcggattcgattctcctacagtcgcttacagtgtactggttgtggccaaagtggagaaagggaagtctaaaaaactcaaaagcgtcaaggaactgctgggcatcacaatcatggagcgatcaagcttcgaaaaaaaccccatcgactttctcgaggcgaaaggatataaagaggtcaaaaaagacctcatcattaagcttcccaagtactctctctttgagcttgaaaacggccggaaacgaatgctcgctagtgcgggcgagctgcagaaaggtaacgagctggcactgccctctaaatacgttaatttcttgtatctggccagccactatgaaaagctcaaagggtctcccgaagataatgagcagaagcagctgttcgtggaacaacacaaacactaccttgatgagatcatcgagcaaataagcgaattctccaaaagagtgatcctcgccgacgctaacctcgataaggtgctttctgcttacaataagcacagggataagcccatcagggagcaggcagaaaacattatccacttgtttactctgaccaacttgggcgcgcctgcagccttcaagtacttcgacaccaccatagacagaaagcggtacacctctacaaaggaggtcctggacgccacactgattcatcagtcaattacggggctctatgaaacaagaatcgacctctctcagctcggtggagacagcagggctgaccccaagaagaagaggaaggtgtga

SEQ ID NO: 89131 - DNA, 4212 bp, Artificial Sequence
  derived and/or modified sequence
atgggacctaagaaaaagaggaaggtgcctaagaaaaagaggaaggtgcctaagaaaaagaggaaggtggcggccgctgactacaaggatgacgacgataaatctagagacaagaaatactctattggactggatatcgggacaaactccgttggctgggccgtcataaccgacgagtataaggtgccaagcaagaaattcaaggtgctgggtaatactgaccgccattcaatcaagaagaacctgatcggagcactcctcttcgactccggtgaaaccgctgaagctactcggctgaagcggaccgcaaggcggagatacacccgccgcaagaatcggatatgttatctgcaagagatctttagcaacgaaatggctaaggtggacgactccttctttcaccgcctggaagagagctttctggtggaggaggataagaaacacgagaggcaccctatattcggaaatatcgtggatgaggtggcttaccatgaaaagtatcctacaatctaccatctgaggaagaagctggtggacagcaccgataaagcagacctgaggctcatctatctggccctggctcatatgataaagtttagaggacactttctgatcgagggcgacctgaatcccgataattccgatgtggataaactcttcattcaactggtgcagacatataaccaactgttcgaggagaatcccataaacgcttctggtgtggatgccaaggctattctgtccgctcggctgtccaagtcacgcagactggagaatctgattgcccaactgccaggagaaaagaagaacggcctgtttgggaacctcatcgccctgagcctgggcctgacacctaacttcaagtccaattttgatctggccgaagatgctaaactccagctctccaaggacacctatgacgatgatctggacaacctgctcgcacagataggcgaccagtacgccgatctctttctggctgctaagaatctctccgacgccattctgctgagcgacatactccgggtcaacactgagatcaccaaagcacctctgagcgcctccatgataaaacgctatgatgaacaccatcaagacctgactctgctcaaagccctcgtgaggcaacagctgccagagaagtacaaagagatattcttcgaccagagcaagaatggatatgccggatacatcgatggcggagcatcacaggaagaattttacaagttcatcaaaccaatcctcgagaagatggacggtactgaagagctgctggtgaagctgaacagggaggacctgctgaggaagcagaggacctttgataatggctccattccacatcagatacacctgggagagctgcatgcaatcctccgcaggcaggaggatttctatcctttcctgaaggataaccgggagaagatagagaagatcctgaccttcaggatcccttattacgtcggccctctggctagaggcaactcccgcttcgcttggatgaccaggaaatctgaggagacaattactccttggaacttcgaagaggtcgtggataagggcgcaagcgcccagtcattcatcgaacggatgaccaatttcgataagaacctgcccaacgagaaggtcctgcccaaacattcactcctgtacgagtatttcaccgtctataacgagctgactaaagtgaagtacgtgaccgagggcatgaggaagcctgccttcctgtccggagagcagaagaaggctatcgttgatctgctcttcaagactaatagaaaggtgacagtgaagcagctcaaggaggattactttaagaagatcgaatgctttgactcagtggaaatctctggcgtggaggaccgctttaatgccagcctgggcacttaccatgatctgctgaagataatcaaagacaaagatttcctcgataatgaggagaacgaggacatcctggaagatatcgtgctgaccctgactctgttcgaggatagagagatgatcgaagagcgcctgaagacctatgcccatctgtttgacgataaagtcatgaaacagctcaagcggcggcgctacactgggtggggtagactctccaggaaactcataaacggcatccgcgacaaacagagcggaaagaccatcctggatttcctgaaatccgacggattcgctaacaggaacttcatgcaactgattcacgatgactctctgacatttaaagaggacatccagaaggcacaggtgagcggtcaaggcgacagcctgcacgagcacatcgccaacctcgctggatcacccgccataaagaagggaatactgcagacagtcaaggtcgtggacgaactcgtcaaagtgatgggtcggcacaagccagagaatatcgttatcgaaatggcaagggagaaccaaaccacccagaagggccagaagaactctcgggaacggatgaaaagaatcgaagagggaattaaggagctgggatctcagatactgaaggagcaccctgtggagaatacacagctccagaacgagaaactctacctgtactacctccagaacgggcgggacatgtacgttgaccaggaactcgacatcaaccggctgtccgattatgacgtggaccatattgttccacagtccttcctcaaagatgactccattgacaacaaggtgctgaccagatccgataagaatcgcggtaagtctgacaatgttccatcagaagaggtggtcaagaagatgaagaattactggcggcagctcctcaacgccaaactgatcacccagcggaagtttgacaatctgactaaggcagaaagaggaggtctgagcgaactcgacaaggccggctttattaagaggcaactggtcgaaacacgccagattaccaaacacgtggcacaaatcctcgactctaggatgaacactaagtacgatgagaacgataagctgatcagggaagtgaaagtgataactctgaagagcaagctggtgtctgacttccggaaggactttcaattctacaaagttcgcgaaataaacaattaccatcatgctcacgatgcctatctcaatgctgtcgttggcaccgccctgatcaagaaataccctaaactggagtctgagttcgtgtacggtgactataaagtctacgatgtgaggaagatgatagcaaagtctgagcaagagattggcaaagccaccgccaagtacttcttctactctaatatcatgaatttctttaagactgagataaccctggctaacggcgaaatccggaagcgcccactgatcgaaacaaacggagaaacaggagaaatcgtgtgggataaaggcagggacttcgcaactgtgcggaaggtgctgtccatgccacaagtcaatatcgtgaagaagaccgaagtgcagaccggcggattctcaaaggagagcatcctgccaaagcggaactctgacaagctgatcgccaggaagaaagattgggacccaaagaagtatggcggtttcgattcccctacagtggcttattccgttctggtcgtggcaaaagtggagaaaggcaagtccaagaaactcaagtctgttaaggagctgctcggaattactattatggagagatccagcttcgagaagaatccaatcgatttcctggaagctaagggctataaagaagtgaagaaagatctcatcatcaaactgcccaagtactctctctttgagctggagaatggtaggaagcggatgctggcctccgccggagagctgcagaaaggaaacgagctggctctgccctccaaatacgtgaacttcctgtatctggcctcccactacgagaaactcaaaggtagccctgaagacaatgagcagaagcaactctttgttgagcaacataaacactacctggacgaaatcattgaacagattagcgagttcagcaagcgggttattctggccgatgcaaacctcgataaagtgctgagcgcatataataagcacagggacaagccaattcgcgaacaagcagagaatattatccacctctttactctgactaatctgggcgctcctgctgccttcaagtatttcgatacaactattgacaggaagcggtacacctctaccaaagaagttctcgatgccaccctgatacaccagtcaattaccggactgtacgagactcgcatcgacctgtctcagctcggcggcgactag

SEQ ID NO: 89132 - DNA, 4140 bp, Artificial Sequence
  derived and/or modified sequence
atggacaagaagtactccattgggctcgatatcggcacaaacagcgtcggctgggccgtcattacggacgagtacaaggtgccgagcaaaaaattcaaagttctgggcaataccgatcgccacagcataaagaagaacctcattggcgccctcctgttcgactccggggagacggccgaagccacgcggctcaaaagaacagcacggcgcagatatacccgcagaaagaatcggatctgctacctgcaggagatctttagtaatgagatggctaaggtggatgactctttcttccataggctggaggagtcctttttggtggaggaggataaaaagcacgagcgccacccaatctttggcaatatcgtggacgaggtggcgtaccatgaaaagtacccaaccatatatcatctgaggaagaagcttgtagacagtactgataaggctgacttgcggttgatctatctcgcgctggcgcatatgatcaaatttcggggacacttcctcatcgagggggacctgaacccagacaacagcgatgtcgacaaactctttatccaactggttcagacttacaatcagcttttcgaagagaacccgatcaacgcatccggagttgacgccaaagcaatcctgagcgctaggctgtccaaatcccggcggctcgaaaacctcatcgcacagctccctggggagaagaagaacggcctgtttggtaatcttatcgccctgtcactcgggctgacccccaactttaaatctaacttcgacctggccgaagatgccaagcttcaactgagcaaagacacctacgatgatgatctcgacaatctgctggcccagatcggcgaccagtacgcagacctttttttggcggcaaagaacctgtcagacgccattctgctgagtgatattctgcgagtgaacacggagatcaccaaagctccgctgagcgctagtatgatcaagcgctatgatgagcaccaccaagacttgactttgctgaaggcccttgtcagacagcaactgcctgagaagtacaaggaaattttcttcgatcagtctaaaaatggctacgccggatacattgacggcggagcaagccaggaggaattttacaaatttattaagcccatcttggaaaaaatggacggcaccgaggagctgctggtaaagcttaacagagaagatctgttgcgcaaacagcgcactttcgacaatggaagcatcccccaccagattcacctgggcgaactgcacgctatcctcaggcggcaagaggatttctacccctttttgaaagataacagggaaaagattgagaaaatcctcacatttcggataccctactatgtaggccccctcgcccggggaaattccagattcgcgtggatgactcgcaaatcagaagagaccatcactccctggaacttcgaggaagtcgtggataagggggcctctgcccagtccttcatcgaaaggatgactaactttgataaaaatctgcctaacgaaaaggtgcttcctaaacactctctgctgtacgagtacttcacagtttataacgagctcaccaaggtcaaatacgtcacagaagggatgagaaagccagcattcctgtctggagagcagaagaaagctatcgtggacctcctcttcaagacgaaccggaaagttaccgtgaaacagctcaaagaagactatttcaaaaagattgaatgtttcgactctgttgaaatcagcggagtggaggatcgcttcaacgcatccctgggaacgtatcacgatctcctgaaaatcattaaagacaaggacttcctggacaatgaggagaacgaggacattcttgaggacattgtcctcacccttacgttgtttgaagatagggagatgattgaagaacgcttgaaaacttacgctcatctcttcgacgacaaagtcatgaaacagctcaagaggcgccgatatacaggatgggggcggctgtcaagaaaactgatcaatgggatccgagacaagcagagtggaaagacaatcctggattttcttaagtccgatggatttgccaaccggaacttcatgcagttgatccatgatgactctctcacctttaaggaggacatccagaaagcacaagtttctggccagggggacagtcttcacgagcacatcgctaatcttgcaggtagcccagctatcaaaaagggaatactgcagaccgttaaggtcgtggatgaactcgtcaaagtaatgggaaggcataagcccgagaatatcgttatcgagatggcccgagagaaccaaactacccagaagggacagaagaacagtagggaaaggatgaagaggattgaagagggtataaaagaactggggtcccaaatccttaaggaacacccagttgaaaacacccagcttcagaatgagaagctctacctgtactacctgcagaacggcagggacatgtacgtggatcaggaactggacatcaatcggctctccgactacgacgtggatcatatcgtgccccagtcttttctcaaagatgattctattgataataaagtgttgacaagatccgataaaaatagagggaagagtgataacgtcccctcagaagaagttgtcaagaaaatgaaaaattattggcggcagctgctgaacgccaaactgatcacacaacggaagttcgataatctgactaaggctgaacgaggtggcctgtctgagttggataaagccggcttcatcaaaaggcagcttgttgagacacgccagatcaccaagcacgtggcccaaattctcgattcacgcatgaacaccaagtacgatgaaaatgacaaactgattcgagaggtgaaagttattactctgaagtctaagctggtctcagatttcagaaaggactttcagttttataaggtgagagagatcaacaattaccaccatgcgcatgatgcctacctgaatgcagtggtaggcactgcacttatcaaaaaatatcccaagcttgaatctgaatttgtttacggagactataaagtgtacgatgttaggaaaatgatcgcaaagtctgagcaggaaataggcaaggccaccgctaagtacttcttttacagcaatattatgaattttttcaagaccgagattacactggccaatggagagattcggaagcgaccacttatcgaaacaaacggagaaacaggagaaatcgtgtgggacaagggtagggatttcgcgacagtccggaaggtcctgtccatgccgcaggtgaacatcgttaaaaagaccgaagtacagaccggaggcttctccaaggaaagtatcctcccgaaaaggaacagcgacaagctgatcgcacgcaaaaaagattgggaccccaagaaatacggcggattcgattctcctacagtcgcttacagtgtactggttgtggccaaagtggagaaagggaagtctaaaaaactcaaaagcgtcaaggaactgctgggcatcacaatcatggagcgatcaagcttcgaaaaaaaccccatcgactttctcgaggcgaaaggatataaagaggtcaaaaaagacctcatcattaagcttcccaagtactctctctttgagcttgaaaacggccggaaacgaatgctcgctagtgcgggcgagctgcagaaaggtaacgagctggcactgccctctaaatacgttaatttcttgtatctggccagccactatgaaaagctcaaagggtctcccgaagataatgagcagaagcagctgttcgtggaacaacacaaacactaccttgatgagatcatcgagcaaataagcgaattctccaaaagagtgatcctcgccgacgctaacctcgataaggtgctttctgcttacaataagcacagggataagcccatcagggagcaggcagaaaacattatccacttgtttactctgaccaacttgggcgcgcctgcagccttcaagtacttcgacaccaccatagacagaaagcggtacacctctacaaaggaggtcctggacgccacactgattcatcagtcaattacggggctctatgaaacaagaatcgacctctctcagctcggtggagacagcagggctgaccccaagaagaagaggaaggtgtga

SEQ ID NO: 89133 - DNA, 4354 bp, Artificial Sequence
  derived and/or modified sequence
tcaagcttttggaccctcgtacagaagctaatacgactcactatagggaaataagagagaaaagaagagtaagaagaaatataagagccaccatggacaagaaatacagcatcggcctggatattggaactaacagcgttggatgggcagtgatcaccgacgagtacaaggtgccgagcaagaagttcaaggtgctggggaacactgaccgccattcaattaagaaaaacctcattggagcactgctttttgactcgggtgagactgccgaagctaccaggctcaaacgcaccgcacgcagacggtacacccgccgcaagaatcgcatctgctatctgcaagagatcttttccaacgagatggcgaaggttgacgacagctttttccaccggctggaagagagcttcctcgtggaagaggacaaaaagcacgaaaggcatccaatcttcggtaacatcgtggacgaagtggcgtatcacgaaaagtaccctaccatctaccatctgcggaagaagctggtcgattccacggataaggcagacctgagactgatctacctggctttggcccatatgatcaaattccgcggccatttcctgatcgagggggaccttaacccggataactcggatgtcgacaagctgttcatccagctggtccaaacgtataaccaactgtttgaggaaaatcccatcaacgcttcgggggtggacgccaaagcaatcctctccgcgcgcctgagcaagtcacggcggctcgaaaacctgatcgcgcagctgccgggagaaaagaaaaatggactgtttgggaatctgatcgcgctgtcgctcggcctgactccaaactttaagtcaaatttcgatttggccgaagatgccaagctgcagctgtcaaaggacacttacgacgacgacctggacaatctgctggcccagattggggaccaatacgcagacctgttcttggccgcgaagaacctgagcgacgccattcttctgtccgatattctgagagtcaataccgaaatcactaaggctccgctgtccgcttcaatgatcaagcgctacgatgaacaccaccaggatctcactctgctcaaagccctcgtgagacaacaattgcctgaaaagtacaaggagatcttcttcgaccagagcaaaaacggctacgcaggctacatcgatggaggagcgtcacaagaagagttctacaagttcatcaagccaatcttggagaagatggacggtactgaagaactccttgtgaagctgaatagggaggatttgctcagaaagcagcggacttttgacaacggctcgatccctcatcagattcacctcggtgagctgcatgccatccttcggcgccaagaggatttttaccccttcctgaaggataatcgcgagaaaatcgaaaagatcctgacgttcagaattccctactacgtgggaccgctggcgcgcggtaactcgcggtttgcatggatgactcgcaagtcagaggaaactatcactccttggaattttgaggaggtcgtcgataagggagcctccgcccagtcattcatcgaacgcatgaccaacttcgacaagaatcttccgaacgagaaggtccttccaaagcactccctgttgtacgaatacttcaccgtgtacaatgagctgaccaaagttaagtatgtcaccgagggcatgagaaagccggccttcctcagcggcgaacaaaagaaggccatcgtcgacctcctcttcaagaccaaccggaaggtgaccgtcaagcaactcaaggaggactacttcaagaagatcgaatgctttgactcggtcgaaatcagcggagtggaggaccggtttaacgcgtcactgggtacctaccatgatctcctgaaaatcatcaaagacaaggacttcctggacaacgaagaaaacgaggacatcctggaagatattgtgttgaccctgacgctgttcgaggaccgggaaatgatcgaggaaaggcttaagacctacgcacacctcttcgatgacaaagtgatgaagcaactgaagcggcggagatatactggctgggggaggctctcccggaagctcattaatggaatcagagacaaacagtcgggtaaaactatcctcgacttcctcaagtcggatgggttcgccaaccggaacttcatgcagctgatccacgatgattccttgaccttcaaggaagatatccagaaggcgcaagtgagcggacagggagattcgttgcacgaacatatcgctaatctcgccggatccccagccatcaagaaaggaatcctgcagaccgtgaaggtggtggatgaactggtgaaagtgatggggcgccacaaaccagagaacatcgtcattgagatggcccgcgagaatcagaccactcagaagggacaaaagaactccagagagcggatgaaacgcatcgaggaaggcatcaaagagcttggtagccaaatcctgaaggaacacccggtcgagaacacccagctccagaacgaaaagctttacctgtactacctccaaaatggacgggacatgtacgtcgaccaggaattggacatcaacagactcagcgactacgatgtggaccatattgtgccacagtcctttcttaaggacgacagcatcgataacaaagtgctcactagatcagacaaaaatcgcgggaaatcagacaatgtgccatcggaagaggttgtcaagaagatgaaaaactactggagacagctgctcaatgccaaacttatcacccagcggaagttcgacaaccttaccaaggccgagcgcggaggattgtccgaactcgacaaggccggcttcatcaaaaggcagctggtggaaacccggcagatcactaaacacgtggcccagatcctcgattcgcgcatgaacactaaatacgatgagaatgacaagctgattagggaagtcaaggtcatcactctgaagtcgaaactggtgtcggactttagaaaggatttccagttctacaaagtccgcgagattaacaactaccaccacgctcatgacgcctacctgaatgcagttgtgggcaccgcgctgatcaagaagtatccgaagctggaatccgagttcgtgtacggagattacaaagtgtacgacgtgcgcaagatgatcgccaagtcggaacaggaaatcggaaaggctactgcaaagtacttcttctactcaaacatcatgaacttcttcaaaacggagatcacgctcgcgaacggcgaaatccggaaaaggccgctcattgaaaccaacggagaaaccggggagatcgtgtgggacaagggaagggattttgcgactgtgaggaaggtgttgtccatgccgcaagtcaatattgtgaaaaagacggaagtgcaaaccggaggattcagcaaagaatccatcctcccaaagcgcaactcggacaaactcatcgcgcgcaagaaggattgggaccccaagaaatacggtggctttgacagccctactgtggcttactccgtcctcgtcgtggctaaagtggaaaagggtaaatccaaaaagctcaaatcggtgaaggagctcctgggaatcacgatcatggagcggtcgagcttcgaaaagaatcctattgatttcctggaggcgaagggctacaaggaagtcaagaaagacctgatcatcaagctcccgaagtacagcctcttcgagctcgaaaacggcagaaagaggatgctggcatcagcgggagaattgcagaagggaaacgaactggcactgccgtccaagtacgtgaattttctctatctggctagccactacgaaaagctgaagggatcgcccgaggacaacgagcaaaaacaactgttcgtggagcagcacaagcactacctggatgagatcatcgagcagatctccgaattctcgaaacgcgtgatccttgccgatgccaatctggataaagtgttgtcggcttacaacaagcatcgggataaaccgatccgcgaacaggcagaaaacatcattcatctgttcactttgaccaatctgggagcgcctgccgcgtttaagtacttcgacaccactattgatagaaagcgctacacctcgaccaaggaagtgctggacgctaccctgatccaccagtccatcaccggactctacgaaactcgcattgacctgtcccagcttggaggagattcacgggccgatccaaagaaaaagcgcaaggtctgataataggctggagcctcggtggccatgcttcttgccccttgggcctccccccagcccctcctccccttcctgcacccgtacccccgtggtctttgaataaagtctgagtgggcggctctaga

SEQ ID NO: 89134 - DNA, 4600 bp, Artificial Sequence
  derived and/or modified sequence
tcaagcttttggaccctcgtacagaagctaatacgactcactatagggaaataagagagaaaagaagagtaagaagaaatataagagccaccatggacaagaaatactcaatcggacttgctatcggaactaacagcgtgggatgggccgtcattactgacgaatacaaggtgccctcaaagaagttcaaggtcctgggaaataccgatagacactccatcaaaaagaacctgatcggggcactgttgttcgactcgggagagactgcagaagcaaccaggctcaagcgcactgcgaggcgccggtacacccggaggaagaaccgcatctgctacctccaagagattttcagcaacgagatggcaaaggtcgatgattcgttctttcaccgccttgaggagtcgttccttgtcgaggaggacaaaaagcatgaaagacatccgatcttcggaaacatcgtggacgaagtcgcataccatgaaaagtaccctaccatctaccatctcagaaagaaactcgtcgattcaactgataaggccgacttgcggctgatctacctggctctggcgcacatgatcaagtttcggggtcactttctcatcgagggtgatctcaacccggacaattccgacgttgacaaactcttcatccaactggtccagacgtacaaccagctgttcgaagaaaatccgatcaacgcaagcggagtggacgccaaagccattctgtcggcccgcctctcgaagtcgcgtcgcctggaaaatctgattgctcagctcccgggcgaaaagaagaatggcctgtttggaaacctcatcgcactgtccctcgggctgactcccaacttcaaatcgaactttgacttggctgaggatgcaaagctgcaactctccaaagacacttacgatgatgacctggacaatctcctggcgcagatcggggatcagtatgctgacctgttcctggcggccaagaacctgtctgatgccatcctgctctccgatatcctgagagtgaacactgagatcaccaaggcgcctctgagcgcctcgatgatcaaacgctacgatgaacaccatcaggacctcactcttctgaaggctttggtgcggcagcagcttccggaaaagtacaaagagatcttcttcgaccagtcgaaaaacggctacgccggatacattgatggcggcgcaagccaggaggaattctataagtttatcaaaccgatcctggagaagatggacggcactgaagaacttctggtcaagctgaatcgagaggatctgctccggaagcagcggaccttcgacaatgggtctatccctcaccaaatccatctcggcgagctgcatgcgattctgaggcgccaggaggacttctacccattcctgaaagacaatcgggagaaaatcgaaaagattctgacgttccgcattccatactacgtcgggccacttgcgcggggtaattcgagattcgcctggatgacgcggaagtccgaagaaaccatcacgccgtggaatttcgaagaagtggtcgacaagggagccagcgcacagtccttcattgagcgcatgaccaatttcgacaaaaatctgccgaacgagaaggtcctgccgaagcattcactgctgtacgaatactttaccgtgtacaacgaactgaccaaggtgaagtacgtcaccgagggaatgagaaagcctgctttcctgagcggagaacagaagaaggccattgttgacctcctcttcaagactaatcgcaaagtgaccgtgaagcagcttaaagaggattacttcaaaaagatcgaatgtttcgactccgtggaaatcagcggcgtggaggatagattcaacgcgtcccttgggacttaccacgacctccttaagatcatcaaggataaggatttcctcgacaatgaggaaaacgaagatatcctggaggacatcgttctgactctgaccctctttgaggaccgggagatgatcgaggagagactcaagacctacgcgcacctgtttgacgacaaagtgatgaagcaacttaaacgcaggcgctacaccggctggggcagactgtcacgcaagttgatcaacggaattagagataaacagtccggaaagaccatcctggacttcctgaagtccgatggattcgccaaccggaatttcatgcagctcatccatgacgactcattgactttcaaggaggatatccaaaaggcccaagtgagcggccaaggggactcccttcacgaacacatcgcaaatttggccggatcaccagcgattaagaagggaatcctgcagaccgtgaaggtggtggacgagctggtgaaagtgatgggacggcacaagccggaaaacatcgtgatcgagatggccagagagaaccagacgactcaaaagggccagaagaactcgcgcgaacgcatgaagagaatagaagagggaattaaggaactgggatcgcagatcttgaaggagcaccctgtcgaaaatactcaactccagaacgagaagctgtacctgtactatcttcaaaacggcagggacatgtatgtcgaccaagagctcgacattaaccgcctgtccgattatgacgtggacgccatcgtgccgcagagctttctcaaggacgattccatcgacaacaaagtgctcacccgcagcgacaagaatagagggaagtcggataacgtcccttcggaagaggtggtgaaaaagatgaagaattactggcggcagctcctgaatgcaaagctcatcacccaacggaagtttgacaacctcaccaaggcagaaagaggaggactgtcggaattggataaggccggtttcatcaagcgacaattggtggaaactcggcaaattaccaagcatgtggcacagattctggactcccgtatgaacaccaagtacgacgagaacgataagctgatccgcgaggtcaaggtgatcaccctcaaaagcaaacttgtgtcagacttccggaaggacttccaattctacaaggtccgcgaaatcaacaactaccaccacgctcatgacgcatacctgaacgctgtggtcgggactgccctcatcaagaagtaccctaaactcgaaagcgaatttgtgtacggcgactacaaagtgtacgatgtccggaagatgatcgcgaaatccgagcaggagatcggaaaggcgactgctaagtactttttctactcgaacatcatgaacttcttcaaaaccgaaatcaccctggctaatggcgagatcagaaagcgcccgctgatcgaaaccaacggcgaaaccggtgaaatcgtgtgggacaagggccgcgatttcgctactgtgagaaaggtcctttccatgccgcaagtgaatatcgtcaaaaagactgaggtgcagactggcggattttccaaggaatcgatcctcccaaagaggaactcagataagctcatcgcgcggaaaaaggattgggaccctaagaagtacggaggatttgatagcccaactgtggcctactctgtgctcgtggtggccaaagtcgagaaaggaaagtcgaagaagttgaaatccgtgaaagaactcttgggaatcactatcatggagcggtcgtcatttgaaaagaacccaatcgacttcctggaagccaagggatacaaagaagtcaagaaagacctgatcatcaagctccctaagtacagcctgttcgaactggagaacggaaggaaacggatgctggcttccgccggcgaactgcaaaagggcaatgagctggccctcccatcgaaatacgtgaacttcctctaccttgcctcccattacgaaaagttgaagggctcacccgaggacaatgagcagaaacagctctttgttgaacaacacaaacactacctggacgaaatcatcgaacaaatcagcgagttcagcaagcgcgtcattctggcggacgcgaacctggataaagtgctgtccgcgtacaacaagcaccgcgataagccgatacgggaacaggctgagaacatcattcacctcttcactctcactaatctgggagcccccgccgccttcaagtactttgatactaccatcgaccgcaagagatacacgagcaccaaggaagtgctcgatgccaccctgatccaccagtccattactggtctgtacgaaacgcgaatcgatctgtcacagctcggaggagatgggtcaccgaaaaagaaacggaaagtcagctcggattacaaggatcacgacggagactacaaggaccatgacatcgactataaggacgacgacgacaaggccgctggaggcggtggatcgggacgcgcggacgccttggatgacttcgaccttgacatgctgggatccgacgcacttgatgattttgatctcgatatgcttggcagcgacgcactggacgatttcgacctcgacatgctcggatcggatgcgctcgacgacttcgatctggatatgctgtgataataggctggagcctcggtggccatgcttcttgccccttgggcctccccccagcccctcctccccttcctgcacccgtacccccgtggtctttgaataaagtctgagtgggcggctctaga

SEQ ID NO: 89135 - DNA, 4622 bp, Artificial Sequence
  derived and/or modified sequence
tcaagcttttggaccctcgtacagaagctaatacgactcactatagggaaataagagagaaaagaagagtaagaagaaatataagagccaccatggacaagaagtactcaatcggactcgcaatcggaaccaattcagtcggctgggcagtcattaccgatgaatacaaggtgccgtcgaagaagttcaaagtcctgggtaacactgacagacattcgatcaaaaagaacctgatcggagccttgctgtttgattcaggcgaaaccgccgaagctacccggttgaaacgaactgctagacgccgctacacgcgccgcaagaaccggatctgctacctccaagaaatcttctcgaacgaaatggctaaggtggacgactcgttctttcaccggctcgaggagtcattccttgtggaggaagataagaagcacgaaagacacccgatcttcggcaacatcgtggacgaagtcgcgtaccacgaaaagtacccgactatctaccatctccggaagaagctcgtggatagcaccgataaggccgatctgcgactgatctacctcgcgctggcccatatgattaagttccgcgggcacttcctcatcgaaggggacctgaatccagacaactcggacgtggataagctgtttatccagctggtgcagacttacaatcaattgtttgaagaaaaccctatcaacgcgtctggggtggacgcaaaggccatcctgagcgcgcggctgtcaaaatccagacggctggaaaatctgatagcccaactgccgggcgagaagaaaaacggcctgtttggaaatcttatcgccctgtccctgggactgacccccaacttcaagtcgaacttcgacttggccgaggatgcgaagctccagctcagcaaagacacctacgacgatgacctcgataacctgttggcccagatcggtgaccagtatgctgatctcttcttggcggccaagaacctgtcagacgcaattctgctctccgacatcctgcgggtgaatactgagatcactaaagccccattgagcgcgtcgatgatcaaaagatacgacgagcaccaccaggatctgactctcctcaaggcactggtccgccaacagctcccggaaaagtacaaagagatcttctttgaccaatccaaaaacggatacgctggttacatagacggcggagcgtcacaagaagagttctacaagttcatcaagcctatcctggaaaagatggacgggaccgaggaactcctggttaagctcaatagggaggatctgctgcgcaagcaacgcacgttcgacaatggaagcatcccccatcagatccacctgggggagctccacgcgatcctgaggcgccaggaagatttctacccatttctgaaggacaatagagagaaaatcgaaaagatcctgactttccgaatcccgtactacgtgggcccgctcgcacggggaaactcacggtttgcctggatgactcgcaaatccgaagaaaccattaccccctggaatttcgaggaggtggtcgataaaggcgcctcagcccagtcgttcatcgaaagaatgaccaactttgacaagaacctcccaaatgagaaggtgctgccaaaacatagcctgctgtacgagtactttactgtgtataacgaactcaccaaggtgaaatacgtgaccgagggaatgcgcaagccggcatttctgtcgggcgaacagaagaaggcaattgtggacttgctgttcaaaaccaaccggaaggtgaccgtgaaacagctcaaggaagattactttaagaagatcgagtgtttcgatagcgtcgaaatttcgggggtggaagatcgcttcaatgcaagccttgggacgtaccacgatctgcttaagatcattaaggacaaggatttccttgacaacgaagagaacgaggatattctcgaggatatcgtcctgaccctgactctgtttgaggatagagaaatgatcgaggagagattgaaaacttacgcacacctcttcgacgataaggtgatgaaacagctgaaaaggcgtagatacactggttggggaaggctgtcgagaaagctgatcaacggaattagggacaagcagtccggaaaaaccatcctggatttcctcaagtccgacggtttcgccaaccgcaacttcatgcagctgatccacgatgattccctgacgttcaaagaggatatccagaaggcacaagtgtccggacaaggagactcactccacgagcatatcgctaatctcgccggatcgccagctatcaagaagggaatcttgcagactgtcaaggtggtggacgaactggtgaaagtgatgggaaggcataagccggagaatatcgtgatcgagatggcgagggaaaaccagacgacccagaaaggacagaaaaacagccgggaacgcatgaagcgcatcgaagagggaatcaaagagcttgggagccaaatcctcaaagaacaccctgtggaaaatacccaactgcagaatgagaagctttacctgtattacctccaaaacgggcgcgacatgtacgttgaccaggaattggacattaaccggctttccgactacgatgtggacgctatcgtcccgcagtccttcctgaaagacgattcgatcgacaataaggtcctgactagatcagacaagaatcggggaaagtcagacaacgtgcctagcgaagaggtcgttaagaagatgaagaattactggcgccagctgctgaacgcgaagcttatcactcagcgcaagttcgacaacctcaccaaggcagaaagaggcggattgtcggagctcgacaaagctggcttcatcaagcgccagctcgtcgaaactcgccagattactaagcatgtggcgcagatcctggacagccgcatgaatactaagtatgatgagaatgacaagctcatccgggaggtgaaggtcatcaccctgaagtccaagctggtgtccgacttccggaaggacttccaattctacaaagtcagagaaatcaacaattaccatcacgcgcatgacgcctacttgaatgcagtggtgggtactgccctcatcaagaaatacccaaagcttgaaagcgagtttgtctacggagactacaaggtgtacgacgtccggaagatgatcgccaaatcggaacaggaaattgggaaggcgaccgctaagtacttcttctactcgaatatcatgaatttcttcaagaccgagatcacgcttgcaaatggcgaaatccggaagcggcccctcatcgaaaccaacggagaaaccggagaaatcgtgtgggacaagggtcgcgattttgcgaccgtccgaaaggttcttagcatgcctcaagtgaacatcgtcaagaaaacggaagtgcagactggaggcttcagcaaggagtccattctcccgaaacgcaactccgacaaactgatcgcacgcaagaaagactgggacccgaagaaatacggaggcttcgattcgccgactgtggcttactcggtcctggttgtggccaaggtggaaaagggaaagtccaagaagctgaagtccgtcaaggagctcctcggaatcaccatcatggaacggtcaagcttcgagaaaaacccaattgacttcctggaggcaaaggggtacaaggaggtgaagaaggatctgatcatcaaactgccgaagtacagcctctttgagctcgaaaacggacgcaaaaggatgctggcctccgccggagagctgcaaaagggaaacgagcttgccttgccttccaagtacgtgaacttcctgtacctggcatcccactacgaaaaactgaagggatcgccggaggacaacgaacagaagcagctgtttgtggaacaacacaagcattatctggatgaaatcatcgaacaaatcagcgaattctcaaaaagggtgatcttggccgacgccaacctggataaagtgctttccgcctacaacaaacatcgcgacaagccgatccgggagcaggccgaaaacatcattcacctgtttaccctgactaatctgggtgcgcccgcggctttcaaatacttcgataccacgatcgaccggaagagatacaccagcaccaaagaggtgttggacgcgaccctcatccaccaatctattaccggcctctatgaaactaggatcgacctcagccagctgggaggcgatggatccccaaagaagaagagaaaagtgtcctccgactacaaggatcatgatggggactataaagatcatgatattgattacaaggacgacgacgacaaggccgctggaggaggaggttccggccgcgccgatgctctcgacgacttcgacctcgacatgctgggatccgacgccctggacgactttgatctggatatgctgggctcggacgcccttgatgacttcgatctggacatgctggggtcggatgcactggacgacttcgaccttgatatgctgtgataataggctggagcctcggtggccatgcttcttgccccttgggcctccccccagcccctcctccccttcctgcacccgtaccccccaaacaccattgtcacactccagtggtctttgaataaagtctgagtgggcggctctaga

SEQ ID NO: 89136 - DNA, 4689 bp, Artificial Sequence
  derived and/or modified sequence
gggaaataagagagaaaagaagagtaagaagaaatataagagccaccatggacaagaaatactcaatcggacttgctatcggaactaacagcgtgggatgggccgtcattactgacgaatacaaggtgccctcaaagaagttcaaggtcctgggaaataccgatagacactccatcaaaaagaacctgatcggggcactgttgttcgactcgggagagactgcagaagcaaccaggctcaagcgcactgcgaggcgccggtacacccggaggaagaaccgcatctgctacctccaagagattttcagcaacgagatggcaaaggtcgatgattcgttctttcaccgccttgaggagtcgttccttgtcgaggaggacaaaaagcatgaaagacatccgatcttcggaaacatcgtggacgaagtcgcataccatgaaaagtaccctaccatctaccatctcagaaagaaactcgtcgattcaactgataaggccgacttgcggctgatctacctggctctggcgcacatgatcaagtttcggggtcactttctcatcgagggtgatctcaacccggacaattccgacgttgacaaactcttcatccaactggtccagacgtacaaccagctgttcgaagaaaatccgatcaacgcaagcggagtggacgccaaagccattctgtcggcccgcctctcgaagtcgcgtcgcctggaaaatctgattgctcagctcccgggcgaaaagaagaatggcctgtttggaaacctcatcgcactgtccctcgggctgactcccaacttcaaatcgaactttgacttggctgaggatgcaaagctgcaactctccaaagacacttacgatgatgacctggacaatctcctggcgcagatcggggatcagtatgctgacctgttcctggcggccaagaacctgtctgatgccatcctgctctccgatatcctgagagtgaacactgagatcaccaaggcgcctctgagcgcctcgatgatcaaacgctacgatgaacaccatcaggacctcactcttctgaaggctttggtgcggcagcagcttccggaaaagtacaaagagatcttcttcgaccagtcgaaaaacggctacgccggatacattgatggcggcgcaagccaggaggaattctataagtttatcaaaccgatcctggagaagatggacggcactgaagaacttctggtcaagctgaatcgagaggatctgctccggaagcagcggaccttcgacaatgggtctatccctcaccaaatccatctcggcgagctgcatgcgattctgaggcgccaggaggacttctacccattcctgaaagacaatcgggagaaaatcgaaaagattctgacgttccgcattccatactacgtcgggccacttgcgcggggtaattcgagattcgcctggatgacgcggaagtccgaagaaaccatcacgccgtggaatttcgaagaagtggtcgacaagggagccagcgcacagtccttcattgagcgcatgaccaatttcgacaaaaatctgccgaacgagaaggtcctgccgaagcattcactgctgtacgaatactttaccgtgtacaacgaactgaccaaggtgaagtacgtcaccgagggaatgagaaagcctgctttcctgagcggagaacagaagaaggccattgttgacctcctcttcaagactaatcgcaaagtgaccgtgaagcagcttaaagaggattacttcaaaaagatcgaatgtttcgactccgtggaaatcagcggcgtggaggatagattcaacgcgtcccttgggacttaccacgacctccttaagatcatcaaggataaggatttcctcgacaatgaggaaaacgaagatatcctggaggacatcgttctgactctgaccctctttgaggaccgggagatgatcgaggagagactcaagacctacgcgcacctgtttgacgacaaagtgatgaagcaacttaaacgcaggcgctacaccggctggggcagactgtcacgcaagttgatcaacggaattagagataaacagtccggaaagaccatcctggacttcctgaagtccgatggattcgccaaccggaatttcatgcagctcatccatgacgactcattgactttcaaggaggatatccaaaaggcccaagtgagcggccaaggggactcccttcacgaacacatcgcaaatttggccggatcaccagcgattaagaagggaatcctgcagaccgtgaaggtggtggacgagctggtgaaagtgatgggacggcacaagccggaaaacatcgtgatcgagatggccagagagaaccagacgactcaaaagggccagaagaactcgcgcgaacgcatgaagagaatagaagagggaattaaggaactgggatcgcagatcttgaaggagcaccctgtcgaaaatactcaactccagaacgagaagctgtacctgtactatcttcaaaacggcagggacatgtatgtcgaccaagagctcgacattaaccgcctgtccgattatgacgtggacgccatcgtgccgcagagctttctcaaggacgattccatcgacaacaaagtgctcacccgcagcgacaagaatagagggaagtcggataacgtcccttcggaagaggtggtgaaaaagatgaagaattactggcggcagctcctgaatgcaaagctcatcacccaacggaagtttgacaacctcaccaaggcagaaagaggaggactgtcggaattggataaggccggtttcatcaagcgacaattggtggaaactcggcaaattaccaagcatgtggcacagattctggactcccgtatgaacaccaagtacgacgagaacgataagctgatccgcgaggtcaaggtgatcaccctcaaaagcaaacttgtgtcagacttccggaaggacttccaattctacaaggtccgcgaaatcaacaactaccaccacgctcatgacgcatacctgaacgctgtggtcgggactgccctcatcaagaagtaccctaaactcgaaagcgaatttgtgtacggcgactacaaagtgtacgatgtccggaagatgatcgcgaaatccgagcaggagatcggaaaggcgactgctaagtactttttctactcgaacatcatgaacttcttcaaaaccgaaatcaccctggctaatggcgagatcagaaagcgcccgctgatcgaaaccaacggcgaaaccggtgaaatcgtgtgggacaagggccgcgatttcgctactgtgagaaaggtcctttccatgccgcaagtgaatatcgtcaaaaagactgaggtgcagactggcggattttccaaggaatcgatcctcccaaagaggaactcagataagctcatcgcgcggaaaaaggattgggaccctaagaagtacggaggatttgatagcccaactgtggcctactctgtgctcgtggtggccaaagtcgagaaaggaaagtcgaagaagttgaaatccgtgaaagaactcttgggaatcactatcatggagcggtcgtcatttgaaaagaacccaatcgacttcctggaagccaagggatacaaagaagtcaagaaagacctgatcatcaagctccctaagtacagcctgttcgaactggagaacggaaggaaacggatgctggcttccgccggcgaactgcaaaagggcaatgagctggccctcccatcgaaatacgtgaacttcctctaccttgcctcccattacgaaaagttgaagggctcacccgaggacaatgagcagaaacagctctttgttgaacaacacaaacactacctggacgaaatcatcgaacaaatcagcgagttcagcaagcgcgtcattctggcggacgcgaacctggataaagtgctgtccgcgtacaacaagcaccgcgataagccgatacgggaacaggctgagaacatcattcacctcttcactctcactaatctgggagcccccgccgccttcaagtactttgatactaccatcgaccgcaagagatacacgagcaccaaggaagtgctcgatgccaccctgatccaccagtccattactggtctgtacgaaacgcgaatcgatctgtcacagctcggaggagatgggtcaccgaaaaagaaacggaaagtcagctcggattacaaggatcacgacggagactacaaggaccatgacatcgactataaggacgacgacgacaaggccgctggaggcggtggatcgggacgcgcggacgccttggatgacttcgaccttgacatgctgggatccgacgcacttgatgattttgatctcgatatgcttggcagcgacgcactggacgatttcgacctcgacatgctcggatcggatgcgctcgacgacttcgatctggatatgctgtgataataggctggagcctcggtggccatgcttcttgccccttgggcctccccccagcccctcctccccttcctgcacccgtacccccgtggtctttgaataaagtctgagtgggcggcaaaaaaaaaaaaaaaaaaaaaaaaaaaaaaaaaaaaaaaaaaaaaaaaaaaaaaaaaaaaaaaaaaaaaaaaaaaaaaaaaaaaaaaaaaaaaaaaaaaaaaaaaaaaaaaaaaaaaaaaaaaaaaaaaaaaaaaaaaaa

SEQ ID NO: 89137 - DNA, 4711 bp, Artificial Sequence
  derived and/or modified sequence
gggaaataagagagaaaagaagagtaagaagaaatataagagccaccatggacaagaagtactcaatcggactcgcaatcggaaccaattcagtcggctgggcagtcattaccgatgaatacaaggtgccgtcgaagaagttcaaagtcctgggtaacactgacagacattcgatcaaaaagaacctgatcggagccttgctgtttgattcaggcgaaaccgccgaagctacccggttgaaacgaactgctagacgccgctacacgcgccgcaagaaccggatctgctacctccaagaaatcttctcgaacgaaatggctaaggtggacgactcgttctttcaccggctcgaggagtcattccttgtggaggaagataagaagcacgaaagacacccgatcttcggcaacatcgtggacgaagtcgcgtaccacgaaaagtacccgactatctaccatctccggaagaagctcgtggatagcaccgataaggccgatctgcgactgatctacctcgcgctggcccatatgattaagttccgcgggcacttcctcatcgaaggggacctgaatccagacaactcggacgtggataagctgtttatccagctggtgcagacttacaatcaattgtttgaagaaaaccctatcaacgcgtctggggtggacgcaaaggccatcctgagcgcgcggctgtcaaaatccagacggctggaaaatctgatagcccaactgccgggcgagaagaaaaacggcctgtttggaaatcttatcgccctgtccctgggactgacccccaacttcaagtcgaacttcgacttggccgaggatgcgaagctccagctcagcaaagacacctacgacgatgacctcgataacctgttggcccagatcggtgaccagtatgctgatctcttcttggcggccaagaacctgtcagacgcaattctgctctccgacatcctgcgggtgaatactgagatcactaaagccccattgagcgcgtcgatgatcaaaagatacgacgagcaccaccaggatctgactctcctcaaggcactggtccgccaacagctcccggaaaagtacaaagagatcttctttgaccaatccaaaaacggatacgctggttacatagacggcggagcgtcacaagaagagttctacaagttcatcaagcctatcctggaaaagatggacgggaccgaggaactcctggttaagctcaatagggaggatctgctgcgcaagcaacgcacgttcgacaatggaagcatcccccatcagatccacctgggggagctccacgcgatcctgaggcgccaggaagatttctacccatttctgaaggacaatagagagaaaatcgaaaagatcctgactttccgaatcccgtactacgtgggcccgctcgcacggggaaactcacggtttgcctggatgactcgcaaatccgaagaaaccattaccccctggaatttcgaggaggtggtcgataaaggcgcctcagcccagtcgttcatcgaaagaatgaccaactttgacaagaacctcccaaatgagaaggtgctgccaaaacatagcctgctgtacgagtactttactgtgtataacgaactcaccaaggtgaaatacgtgaccgagggaatgcgcaagccggcatttctgtcgggcgaacagaagaaggcaattgtggacttgctgttcaaaaccaaccggaaggtgaccgtgaaacagctcaaggaagattactttaagaagatcgagtgtttcgatagcgtcgaaatttcgggggtggaagatcgcttcaatgcaagccttgggacgtaccacgatctgcttaagatcattaaggacaaggatttccttgacaacgaagagaacgaggatattctcgaggatatcgtcctgaccctgactctgtttgaggatagagaaatgatcgaggagagattgaaaacttacgcacacctcttcgacgataaggtgatgaaacagctgaaaaggcgtagatacactggttggggaaggctgtcgagaaagctgatcaacggaattagggacaagcagtccggaaaaaccatcctggatttcctcaagtccgacggtttcgccaaccgcaacttcatgcagctgatccacgatgattccctgacgttcaaagaggatatccagaaggcacaagtgtccggacaaggagactcactccacgagcatatcgctaatctcgccggatcgccagctatcaagaagggaatcttgcagactgtcaaggtggtggacgaactggtgaaagtgatgggaaggcataagccggagaatatcgtgatcgagatggcgagggaaaaccagacgacccagaaaggacagaaaaacagccgggaacgcatgaagcgcatcgaagagggaatcaaagagcttgggagccaaatcctcaaagaacaccctgtggaaaatacccaactgcagaatgagaagctttacctgtattacctccaaaacgggcgcgacatgtacgttgaccaggaattggacattaaccggctttccgactacgatgtggacgctatcgtcccgcagtccttcctgaaagacgattcgatcgacaataaggtcctgactagatcagacaagaatcggggaaagtcagacaacgtgcctagcgaagaggtcgttaagaagatgaagaattactggcgccagctgctgaacgcgaagcttatcactcagcgcaagttcgacaacctcaccaaggcagaaagaggcggattgtcggagctcgacaaagctggcttcatcaagcgccagctcgtcgaaactcgccagattactaagcatgtggcgcagatcctggacagccgcatgaatactaagtatgatgagaatgacaagctcatccgggaggtgaaggtcatcaccctgaagtccaagctggtgtccgacttccggaaggacttccaattctacaaagtcagagaaatcaacaattaccatcacgcgcatgacgcctacttgaatgcagtggtgggtactgccctcatcaagaaatacccaaagcttgaaagcgagtttgtctacggagactacaaggtgtacgacgtccggaagatgatcgccaaatcggaacaggaaattgggaaggcgaccgctaagtacttcttctactcgaatatcatgaatttcttcaagaccgagatcacgcttgcaaatggcgaaatccggaagcggcccctcatcgaaaccaacggagaaaccggagaaatcgtgtgggacaagggtcgcgattttgcgaccgtccgaaaggttcttagcatgcctcaagtgaacatcgtcaagaaaacggaagtgcagactggaggcttcagcaaggagtccattctcccgaaacgcaactccgacaaactgatcgcacgcaagaaagactgggacccgaagaaatacggaggcttcgattcgccgactgtggcttactcggtcctggttgtggccaaggtggaaaagggaaagtccaagaagctgaagtccgtcaaggagctcctcggaatcaccatcatggaacggtcaagcttcgagaaaaacccaattgacttcctggaggcaaaggggtacaaggaggtgaagaaggatctgatcatcaaactgccgaagtacagcctctttgagctcgaaaacggacgcaaaaggatgctggcctccgccggagagctgcaaaagggaaacgagcttgccttgccttccaagtacgtgaacttcctgtacctggcatcccactacgaaaaactgaagggatcgccggaggacaacgaacagaagcagctgtttgtggaacaacacaagcattatctggatgaaatcatcgaacaaatcagcgaattctcaaaaagggtgatcttggccgacgccaacctggataaagtgctttccgcctacaacaaacatcgcgacaagccgatccgggagcaggccgaaaacatcattcacctgtttaccctgactaatctgggtgcgcccgcggctttcaaatacttcgataccacgatcgaccggaagagatacaccagcaccaaagaggtgttggacgcgaccctcatccaccaatctattaccggcctctatgaaactaggatcgacctcagccagctgggaggcgatggatccccaaagaagaagagaaaagtgtcctccgactacaaggatcatgatggggactataaagatcatgatattgattacaaggacgacgacgacaaggccgctggaggaggaggttccggccgcgccgatgctctcgacgacttcgacctcgacatgctgggatccgacgccctggacgactttgatctggatatgctgggctcggacgcccttgatgacttcgatctggacatgctggggtcggatgcactggacgacttcgaccttgatatgctgtgataataggctggagcctcggtggccatgcttcttgccccttgggcctccccccagcccctcctccccttcctgcacccgtaccccccaaacaccattgtcacactccagtggtctttgaataaagtctgagtgggcggcaaaaaaaaaaaaaaaaaaaaaaaaaaaaaaaaaaaaaaaaaaaaaaaaaaaaaaaaaaaaaaaaaaaaaaaaaaaaaaaaaaaaaaaaaaaaaaaaaaaaaaaaaaaaaaaaaaaaaaaaaaaaaaaaaaaaaaaaaaaa

SEQ ID NO: 89138 - DNA, 4443 bp, Artificial Sequence
  derived and/or modified sequence
gggaaataagagagaaaagaagagtaagaagaaatataagagccaccatggacaagaaatacagcatcggcctggatattggaactaacagcgttggatgggcagtgatcaccgacgagtacaaggtgccgagcaagaagttcaaggtgctggggaacactgaccgccattcaattaagaaaaacctcattggagcactgctttttgactcgggtgagactgccgaagctaccaggctcaaacgcaccgcacgcagacggtacacccgccgcaagaatcgcatctgctatctgcaagagatcttttccaacgagatggcgaaggttgacgacagctttttccaccggctggaagagagcttcctcgtggaagaggacaaaaagcacgaaaggcatccaatcttcggtaacatcgtggacgaagtggcgtatcacgaaaagtaccctaccatctaccatctgcggaagaagctggtcgattccacggataaggcagacctgagactgatctacctggctttggcccatatgatcaaattccgcggccatttcctgatcgagggggaccttaacccggataactcggatgtcgacaagctgttcatccagctggtccaaacgtataaccaactgtttgaggaaaatcccatcaacgcttcgggggtggacgccaaagcaatcctctccgcgcgcctgagcaagtcacggcggctcgaaaacctgatcgcgcagctgccgggagaaaagaaaaatggactgtttgggaatctgatcgcgctgtcgctcggcctgactccaaactttaagtcaaatttcgatttggccgaagatgccaagctgcagctgtcaaaggacacttacgacgacgacctggacaatctgctggcccagattggggaccaatacgcagacctgttcttggccgcgaagaacctgagcgacgccattcttctgtccgatattctgagagtcaataccgaaatcactaaggctccgctgtccgcttcaatgatcaagcgctacgatgaacaccaccaggatctcactctgctcaaagccctcgtgagacaacaattgcctgaaaagtacaaggagatcttcttcgaccagagcaaaaacggctacgcaggctacatcgatggaggagcgtcacaagaagagttctacaagttcatcaagccaatcttggagaagatggacggtactgaagaactccttgtgaagctgaatagggaggatttgctcagaaagcagcggacttttgacaacggctcgatccctcatcagattcacctcggtgagctgcatgccatccttcggcgccaagaggatttttaccccttcctgaaggataatcgcgagaaaatcgaaaagatcctgacgttcagaattccctactacgtgggaccgctggcgcgcggtaactcgcggtttgcatggatgactcgcaagtcagaggaaactatcactccttggaattttgaggaggtcgtcgataagggagcctccgcccagtcattcatcgaacgcatgaccaacttcgacaagaatcttccgaacgagaaggtccttccaaagcactccctgttgtacgaatacttcaccgtgtacaatgagctgaccaaagttaagtatgtcaccgagggcatgagaaagccggccttcctcagcggcgaacaaaagaaggccatcgtcgacctcctcttcaagaccaaccggaaggtgaccgtcaagcaactcaaggaggactacttcaagaagatcgaatgctttgactcggtcgaaatcagcggagtggaggaccggtttaacgcgtcactgggtacctaccatgatctcctgaaaatcatcaaagacaaggacttcctggacaacgaagaaaacgaggacatcctggaagatattgtgttgaccctgacgctgttcgaggaccgggaaatgatcgaggaaaggcttaagacctacgcacacctcttcgatgacaaagtgatgaagcaactgaagcggcggagatatactggctgggggaggctctcccggaagctcattaatggaatcagagacaaacagtcgggtaaaactatcctcgacttcctcaagtcggatgggttcgccaaccggaacttcatgcagctgatccacgatgattccttgaccttcaaggaagatatccagaaggcgcaagtgagcggacagggagattcgttgcacgaacatatcgctaatctcgccggatccccagccatcaagaaaggaatcctgcagaccgtgaaggtggtggatgaactggtgaaagtgatggggcgccacaaaccagagaacatcgtcattgagatggcccgcgagaatcagaccactcagaagggacaaaagaactccagagagcggatgaaacgcatcgaggaaggcatcaaagagcttggtagccaaatcctgaaggaacacccggtcgagaacacccagctccagaacgaaaagctttacctgtactacctccaaaatggacgggacatgtacgtcgaccaggaattggacatcaacagactcagcgactacgatgtggaccatattgtgccacagtcctttcttaaggacgacagcatcgataacaaagtgctcactagatcagacaaaaatcgcgggaaatcagacaatgtgccatcggaagaggttgtcaagaagatgaaaaactactggagacagctgctcaatgccaaacttatcacccagcggaagttcgacaaccttaccaaggccgagcgcggaggattgtccgaactcgacaaggccggcttcatcaaaaggcagctggtggaaacccggcagatcactaaacacgtggcccagatcctcgattcgcgcatgaacactaaatacgatgagaatgacaagctgattagggaagtcaaggtcatcactctgaagtcgaaactggtgtcggactttagaaaggatttccagttctacaaagtccgcgagattaacaactaccaccacgctcatgacgcctacctgaatgcagttgtgggcaccgcgctgatcaagaagtatccgaagctggaatccgagttcgtgtacggagattacaaagtgtacgacgtgcgcaagatgatcgccaagtcggaacaggaaatcggaaaggctactgcaaagtacttcttctactcaaacatcatgaacttcttcaaaacggagatcacgctcgcgaacggcgaaatccggaaaaggccgctcattgaaaccaacggagaaaccggggagatcgtgtgggacaagggaagggattttgcgactgtgaggaaggtgttgtccatgccgcaagtcaatattgtgaaaaagacggaagtgcaaaccggaggattcagcaaagaatccatcctcccaaagcgcaactcggacaaactcatcgcgcgcaagaaggattgggaccccaagaaatacggtggctttgacagccctactgtggcttactccgtcctcgtcgtggctaaagtggaaaagggtaaatccaaaaagctcaaatcggtgaaggagctcctgggaatcacgatcatggagcggtcgagcttcgaaaagaatcctattgatttcctggaggcgaagggctacaaggaagtcaagaaagacctgatcatcaagctcccgaagtacagcctcttcgagctcgaaaacggcagaaagaggatgctggcatcagcgggagaattgcagaagggaaacgaactggcactgccgtccaagtacgtgaattttctctatctggctagccactacgaaaagctgaagggatcgcccgaggacaacgagcaaaaacaactgttcgtggagcagcacaagcactacctggatgagatcatcgagcagatctccgaattctcgaaacgcgtgatccttgccgatgccaatctggataaagtgttgtcggcttacaacaagcatcgggataaaccgatccgcgaacaggcagaaaacatcattcatctgttcactttgaccaatctgggagcgcctgccgcgtttaagtacttcgacaccactattgatagaaagcgctacacctcgaccaaggaagtgctggacgctaccctgatccaccagtccatcaccggactctacgaaactcgcattgacctgtcccagcttggaggagattcacgggccgatccaaagaaaaagcgcaaggtctgataataggctggagcctcggtggccatgcttcttgccccttgggcctccccccagcccctcctccccttcctgcacccgtacccccgtggtctttgaataaagtctgagtgggcggcaaaaaaaaaaaaaaaaaaaaaaaaaaaaaaaaaaaaaaaaaaaaaaaaaaaaaaaaaaaaaaaaaaaaaaaaaaaaaaaaaaaaaaaaaaaaaaaaaaaaaaaaaaaaaaaaaaaaaaaaaaaaaaaaaaaaaaaaaaaa

SEQ ID NO: 89139 - DNA, 4575 bp, Artificial Sequence
  derived and/or modified sequence
gggaaataagagagaaaagaagagtaagaagaaatataagagccaccatggactacaaggaccacgacggagactacaaagaccatgacatcgattacaaggatgacgatgacaaaatggcaccgaagaagaagagaaaggtcggaattcacggggtgccggccgcggacaagaagtactcaatcggactggatatcggcacgaacagcgtgggttgggcagtgatcaccgacgaatacaaggtgccgagcaagaagttcaaagtgctgggaaataccgatcgccattcgatcaagaaaaatctgattggcgcgctcctgttcgactcgggagagactgccgaggccactagactgaagaggaccgctaggcgccgctacacgaggcgcaaaaaccgcatctgctatcttcaagaaatcttctcaaacgagatggccaaggtggacgactcctttttccatcggctggaagaatcatttctggtggaggaggacaagaagcacgaacgccatcccattttcggcaacattgtcgacgaagtggcctatcatgagaagtatccgactatctaccacttgagaaagaagctggtggactccactgacaaggcagatctgcggttgatctacctcgcactggcccatatgatcaaattccggggacacttcctcatcgagggcgaccttaatcccgacaattccgatgtggataagcttttcatccagctggtccagacctacaaccaactgtttgaagaaaatccaatcaatgcgagcggtgtcgatgcaaaggccatcctgagcgcccgcctctcgaaaagcagaaggctcgaaaacctgatcgcacagttgcctggagagaagaagaacggcctcttcggcaatctcatcgcattgtccctgggactgactccaaacttcaaatccaacttcgacttggccgaggacgccaaactgcaactgagcaaagatacctacgatgatgacttggacaatcttctggctcagatcggcgaccagtacgccgacctgttccttgcggctaagaacctgtcggacgccatcctgctgtccgacatcctgcgcgtcaataccgaaattactaaagcaccactctcggcatccatgatcaagagatacgatgaacaccaccaggatctcaccctcctgaaagcactggtgcggcagcagctccctgagaaatacaaggaaatcttctttgatcagtccaagaacggatacgccggatacatcgacggcggcgcgagccaagaggaattctacaagttcatcaagccgatcctggaaaagatggatggcacggaagaactcctggtcaaactgaatagagaggatctgctccgcaaacaacggaccttcgataacggatcgatcccgcaccagatccacctcggcgaactgcatgccatcctgcggcggcaggaggacttttacccgttcctcaaagacaacagagaaaagatcgagaagatcttgacctttcgcatcccgtactacgtgggcccgctcgcgagaggtaactcccgctttgcttggatgactagaaagtcagaggaaacgatcaccccatggaacttcgaagaggtggttgacaaaggagcgagcgcccaatcgttcatcgaacggatgactaacttcgataagaatctgccgaatgagaaggtcctgcctaagcactcacttctgtatgaatactttactgtgtataacgaactcaccaaagtcaaatacgtgactgagggaatgcgcaagcctgcgtttttgtccggcgagcagaaaaaggccatcgtggacttgctgttcaaaaccaaccgcaaggtgactgttaagcaactcaaagaggactactttaagaagatcgaatgctttgactcggtcgagatttccggggttgaagatagattcaacgcgtcgctgggaacctaccatgatctcctcaagattatcaaggacaaagacttcctggataacgaggagaatgaggacatcctcgaagatattgtgcttaccctgacccttttcgaagatcgcgaaatgatcgaagaacgcctgaaaacctacgctcacctgttcgacgataaggtgatgaaacagttgaaacgccggcggtacacgggttgggggcggctgtcgcgcaagctgatcaacggaattcgggacaaacagagcggaaagaccatcctcgattttctgaagtccgatggttttgccaaccgcaacttcatgcagctcatccatgacgattcgcttacctttaaggaggatatccagaaggcacaagtgtcgggacaaggggattcgctccacgaacacatcgccaatctggcggggtcgccggcaattaagaagggaatcctccagactgttaaggtggtcgacgagctggtgaaggtgatggggagacataagcctgaaaacattgtgatcgagatggcgagagaaaatcaaactactcagaagggacagaagaattcccgggagcggatgaagcgcatcgaggagggaatcaaggaactgggctcccaaatcctgaaagagcatcccgtggaaaatactcagctgcagaacgagaagctttacctgtactatcttcaaaatggcagggacatgtacgtcgaccaagaactggatatcaatcggctctccgattacgacgtcgatcacatcgtcccccaatcattcctgaaggatgatagcatcgataacaaggtgctcactagatcagacaaaaaccggggaaagtcagataacgtccccagcgaagaagtcgtgaagaagatgaagaattactggaggcaacttctgaacgccaaactcatcactcagcgcaagttcgacaacctgaccaaagcagaaaggggaggactcagcgagctggacaaggctggtttcatcaaacggcagctggtggagactcgccaaatcacgaagcatgtggcccagattctcgactcgcgcatgaatactaagtacgacgaaaacgataagctgatccgggaggtgaaggtgatcaccctcaagagcaagctcgtgtccgatttccggaaagacttccagttctacaaggtgcgggagattaacaactaccatcacgctcacgacgcttacctcaatgctgtggtggggacggcgttgattaagaagtacccaaaactggagtccgaattcgtctacggagattacaaggtctacgacgtgcgcaagatgattgccaagtcggagcaggaaattgggaaagcgactgctaagtacttcttctactcgaatatcatgaacttcttcaagaccgaaatcaccctggctaacggcgagatcaggaaacggccgctgatcgaaactaatggtgagactggtgaaatcgtgtgggataagggacgggacttcgccacggtccgcaaggtcctcagcatgccgcaagtgaatattgttaagaaaaccgaagtgcagaccggtgggttctcgaaggaatccatcctgccaaagcgcaactcggataagcttattgcccgcaagaaggattgggacccgaaaaagtacggtgggttcgactcccctaccgtggcgtactcggtgttggtggtggccaaagtggaaaagggcaaatcaaagaagctcaagagcgtcaaggagctgctgggaatcaccatcatggagaggtccagctttgagaaaaacccgatcgacttcttggaagccaagggatacaaagaggtgaagaaagacctgatcatcaaacttccaaagtactccctgttcgaactcgaaaacgggaggaagcgcatgctcgcctcagccggggaactgcaaaagggcaacgaactggccctcccgtcaaaatacgtcaacttcctgtacttggcgtcacactacgaaaagctgaaaggatccccagaggacaacgaacagaaacagctgttcgtcgagcagcacaagcactacctggacgagatcatcgaacagatctcggaattcagcaagagagtgatcttggcagacgctaaccttgacaaagtcctctcggcatacaataagcatcgcgacaagccgatcagagaacaggcggagaacatcatccacctgttcactctcaccaacctgggcgcgccagcggcttttaagtactttgataccaccattgaccgcaagagatacacctcaactaaagaagtgctggacgcaaccctgatccatcaaagcatcaccggactttatgaaactcggatcgatctctcacagctcggaggagacaaaagaccggctgccaccaagaaggccggacaggcaaagaagaagaaatgataataggctggagcctcggtggccatgcttcttgccccttgggcctccccccagcccctcctccccttcctgcacccgtacccccgtggtctttgaataaagtctgagtgggcggcaaaaaaaaaaaaaaaaaaaaaaaaaaaaaaaaaaaaaaaaaaaaaaaaaaaaaaaaaaaaaaaaaaaaaaaaaaaaaaaaaaaaaaaaaaaaaaaaaaaaaaaaaaaaaaaaaaaaaaaaaaaaaaaaaaaaaaaaaaaa

SEQ ID NO: 89140 - DNA, 3153 bp, Artificial Sequence
  derived and/or modified sequence
tcaagcttttggaccctcgtacagaagctaatacgactcactatagggaaataagagagaaaagaagagtaagaagaaatataagagccaccatggacaagaaatacagcatcggcctggatattggaactaacagcgttggatgggcagtgatcaccgacgagtacaaggtgccgagcaagaagttcaaggtgctggggaacactgaccgccattcaattaagaaaaacctcattggagcactgctttttgactcgggtgagactgccgaagctaccaggctcaaacgcaccgcacgcagacggtacacccgccgcaagaatcgcatctgctatctgcaagagatcttttccaacgagatggcgaaggttgacgacagctttttccaccggctggaagagagcttcctcgtggaagaggacaaaaagcacgaaaggcatccaatcttcggtaacatcgtggacgaagtggcgtatcacgaaaagtaccctaccatctaccatctgcggaagaagctggtcgattccacggataaggcagacctgagactgatctacctggctttggcccatatgatcaaattccgcggccatttcctgatcgagggggaccttaacccggataactcggatgtcgacaagctgttcatccagctggtccaaacgtataaccaactgtttgaggaaaatcccatcaacgcttcgggggtggacgccaaagcaatcctctccgcgcgcctgagcaagtcacggcggctcgaaaacctgatcgcgcagctgccgggagaaaagaaaaatggactgtttgggaatctgatcgcgctgtcgctcggcctgactccaaactttaagtcaaatttcgatttggccgaagatgccaagctgcagctgtcaaaggacacttacgacgacgacctggacaatctgctggcccagattggggaccaatacgcagacctgttcttggccgcgaagaacctgagcgacgccattcttctgtccgatattctgagagtcaataccgaaatcactaaggctccgctgtccgcttcaatgatcaagcgctacgatgaacaccaccaggatctcactctgctcaaagccctcgtgagacaacaattgcctgaaaagtacaaggagatcttcttcgaccagagcaaaaacggctacgcaggctacatcgatggaggagcgtcacaagaagagttctacaagttcatcaagccaatcttggagaagatggacggtactgaagaactccttgtgaagctgaatagggaggatttgctcagaaagcagcggacttttgacaacggctcgatccctcatcagattcacctcggtgagctgcatgccatccttcggcgccaagaggatttttaccccttcctgaaggataatcgcgagaaaatcgaaaagatcctgacgttcagaattccctactacgtgggaccgctggcgcgcggtaactcgcggtttgcatggatgactcgcaagtcagaggaaactatcactccttggaattttgaggaggtcgtcgataagggagcctccgcccagtcattcatcgaacgcatgaccaacttcgacaagaatcttccgaacgagaaggtccttccaaagcactccctgttgtacgaatacttcaccgtgtacaatgagctgaccaaagttaagtatgtcaccgagggcatgagaaagccggccttcctcagcggcgaacaaaagaaggccatcgtcgacctcctcttcaagaccaaccggaaggtgaccgtcaagcaactcaaggaggactacttcaagaagatcgaatgctttgactcggtcgaaatcagcggagtggaggaccggtttaacgcgtcactgggtacctaccatgatctcctgaaaatcatcaaagacaaggacttcctggacaacgaagaaaacgaggacatcctggaagatattgtgttgaccctgacgctgttcgaggaccgggaaatgatcgaggaaaggcttaagacctacgcacacctcttcgatgacaaagtgatgaagcaactgaagcggcggagatatactggctgggggaggctctcccggaagctcattaatggaatcagagacaaacagtcgggtaaaactatcctcgacttcctcaagtcggatgggttcgccaaccggaacttcatgcagctgatccacgatgattccttgaccttcaaggaagatatccagaaggcgcaagtgagcggacagggagattcgttgcacgaacatatcgctaatctcgccggatccccagccatcaagaaaggaatcctgcagaccgtgaaggtggtggatgaactggtgaaagtgatggggcgccacaaaccagagaacatcgtcattgagatggcccgcgagaatcagaccactcagaagggacaaaagaactccagagagcggatgaaacgcatcgaggaaggcatcaaagagcttggtagccaaatcctgaaggaacacccggtcgagaacacccagctccagaacgaaaagctttacctgtactacctccaaaatggacgggacatgtacgtcgaccaggaattggacatcaacagactcagcgactacgatgtggaccatattgtgccacagtcctttcttaaggacgacagcatcgataacaaagtgctcactagatcagacaaaaatcgcgggaaatcagacaatgtgccatcggaagaggttgtcaagaagatgaaaaactactggagacagctgctcaatgccaaacttatcacccagcggaagttcgacaaccttaccaaggccgagcgcggaggattgtccgaactcgacaaggccggcttcatcaaaaggcagctggtggaaacccggcagatcactaaacacgtggcccagatcctcgattcgcgcatgaacactaaatacgatgagaatgacaagctgattagggaagtcaaggtcatcactctgaagtcgaaactggtgtcggactttagaaaggatttccagttctacaaagtccgcgagattaacaactaccaccacgctcatgacgcctacctgaatgcagttgtgggcaccgcgctgatcaagaagtatccgaagctggaatccgagttcgtgtacggagattacaaagtgtacgacgtgcgcaaga

SEQ ID NO: 89141 - DNA, 4486 bp, Artificial Sequence
  derived and/or modified sequence
tcaagcttttggaccctcgtacagaagctaatacgactcactatagggaaataagagagaaaagaagagtaagaagaaatataagagccaccatggactacaaggaccacgacggagactacaaagaccatgacatcgattacaaggatgacgatgacaaaatggcaccgaagaagaagagaaaggtcggaattcacggggtgccggccgcggacaagaagtactcaatcggactggatatcggcacgaacagcgtgggttgggcagtgatcaccgacgaatacaaggtgccgagcaagaagttcaaagtgctgggaaataccgatcgccattcgatcaagaaaaatctgattggcgcgctcctgttcgactcgggagagactgccgaggccactagactgaagaggaccgctaggcgccgctacacgaggcgcaaaaaccgcatctgctatcttcaagaaatcttctcaaacgagatggccaaggtggacgactcctttttccatcggctggaagaatcatttctggtggaggaggacaagaagcacgaacgccatcccattttcggcaacattgtcgacgaagtggcctatcatgagaagtatccgactatctaccacttgagaaagaagctggtggactccactgacaaggcagatctgcggttgatctacctcgcactggcccatatgatcaaattccggggacacttcctcatcgagggcgaccttaatcccgacaattccgatgtggataagcttttcatccagctggtccagacctacaaccaactgtttgaagaaaatccaatcaatgcgagcggtgtcgatgcaaaggccatcctgagcgcccgcctctcgaaaagcagaaggctcgaaaacctgatcgcacagttgcctggagagaagaagaacggcctcttcggcaatctcatcgcattgtccctgggactgactccaaacttcaaatccaacttcgacttggccgaggacgccaaactgcaactgagcaaagatacctacgatgatgacttggacaatcttctggctcagatcggcgaccagtacgccgacctgttccttgcggctaagaacctgtcggacgccatcctgctgtccgacatcctgcgcgtcaataccgaaattactaaagcaccactctcggcatccatgatcaagagatacgatgaacaccaccaggatctcaccctcctgaaagcactggtgcggcagcagctccctgagaaatacaaggaaatcttctttgatcagtccaagaacggatacgccggatacatcgacggcggcgcgagccaagaggaattctacaagttcatcaagccgatcctggaaaagatggatggcacggaagaactcctggtcaaactgaatagagaggatctgctccgcaaacaacggaccttcgataacggatcgatcccgcaccagatccacctcggcgaactgcatgccatcctgcggcggcaggaggacttttacccgttcctcaaagacaacagagaaaagatcgagaagatcttgacctttcgcatcccgtactacgtgggcccgctcgcgagaggtaactcccgctttgcttggatgactagaaagtcagaggaaacgatcaccccatggaacttcgaagaggtggttgacaaaggagcgagcgcccaatcgttcatcgaacggatgactaacttcgataagaatctgccgaatgagaaggtcctgcctaagcactcacttctgtatgaatactttactgtgtataacgaactcaccaaagtcaaatacgtgactgagggaatgcgcaagcctgcgtttttgtccggcgagcagaaaaaggccatcgtggacttgctgttcaaaaccaaccgcaaggtgactgttaagcaactcaaagaggactactttaagaagatcgaatgctttgactcggtcgagatttccggggttgaagatagattcaacgcgtcgctgggaacctaccatgatctcctcaagattatcaaggacaaagacttcctggataacgaggagaatgaggacatcctcgaagatattgtgcttaccctgacccttttcgaagatcgcgaaatgatcgaagaacgcctgaaaacctacgctcacctgttcgacgataaggtgatgaaacagttgaaacgccggcggtacacgggttgggggcggctgtcgcgcaagctgatcaacggaattcgggacaaacagagcggaaagaccatcctcgattttctgaagtccgatggttttgccaaccgcaacttcatgcagctcatccatgacgattcgcttacctttaaggaggatatccagaaggcacaagtgtcgggacaaggggattcgctccacgaacacatcgccaatctggcggggtcgccggcaattaagaagggaatcctccagactgttaaggtggtcgacgagctggtgaaggtgatggggagacataagcctgaaaacattgtgatcgagatggcgagagaaaatcaaactactcagaagggacagaagaattcccgggagcggatgaagcgcatcgaggagggaatcaaggaactgggctcccaaatcctgaaagagcatcccgtggaaaatactcagctgcagaacgagaagctttacctgtactatcttcaaaatggcagggacatgtacgtcgaccaagaactggatatcaatcggctctccgattacgacgtcgatcacatcgtcccccaatcattcctgaaggatgatagcatcgataacaaggtgctcactagatcagacaaaaaccggggaaagtcagataacgtccccagcgaagaagtcgtgaagaagatgaagaattactggaggcaacttctgaacgccaaactcatcactcagcgcaagttcgacaacctgaccaaagcagaaaggggaggactcagcgagctggacaaggctggtttcatcaaacggcagctggtggagactcgccaaatcacgaagcatgtggcccagattctcgactcgcgcatgaatactaagtacgacgaaaacgataagctgatccgggaggtgaaggtgatcaccctcaagagcaagctcgtgtccgatttccggaaagacttccagttctacaaggtgcgggagattaacaactaccatcacgctcacgacgcttacctcaatgctgtggtggggacggcgttgattaagaagtacccaaaactggagtccgaattcgtctacggagattacaaggtctacgacgtgcgcaagatgattgccaagtcggagcaggaaattgggaaagcgactgctaagtacttcttctactcgaatatcatgaacttcttcaagaccgaaatcaccctggctaacggcgagatcaggaaacggccgctgatcgaaactaatggtgagactggtgaaatcgtgtgggataagggacgggacttcgccacggtccgcaaggtcctcagcatgccgcaagtgaatattgttaagaaaaccgaagtgcagaccggtgggttctcgaaggaatccatcctgccaaagcgcaactcggataagcttattgcccgcaagaaggattgggacccgaaaaagtacggtgggttcgactcccctaccgtggcgtactcggtgttggtggtggccaaagtggaaaagggcaaatcaaagaagctcaagagcgtcaaggagctgctgggaatcaccatcatggagaggtccagctttgagaaaaacccgatcgacttcttggaagccaagggatacaaagaggtgaagaaagacctgatcatcaaacttccaaagtactccctgttcgaactcgaaaacgggaggaagcgcatgctcgcctcagccggggaactgcaaaagggcaacgaactggccctcccgtcaaaatacgtcaacttcctgtacttggcgtcacactacgaaaagctgaaaggatccccagaggacaacgaacagaaacagctgttcgtcgagcagcacaagcactacctggacgagatcatcgaacagatctcggaattcagcaagagagtgatcttggcagacgctaaccttgacaaagtcctctcggcatacaataagcatcgcgacaagccgatcagagaacaggcggagaacatcatccacctgttcactctcaccaacctgggcgcgccagcggcttttaagtactttgataccaccattgaccgcaagagatacacctcaactaaagaagtgctggacgcaaccctgatccatcaaagcatcaccggactttatgaaactcggatcgatctctcacagctcggaggagacaaaagaccggctgccaccaagaaggccggacaggcaaagaagaagaaatgataataggctggagcctcggtggccatgcttcttgccccttgggcctccccccagcccctcctccccttcctgcacccgtacccccgtggtctttgaataaagtctgagtgggcggctctaga

SEQ ID NO: 89142 - RNA, 4140 nt, Artificial Sequence
  derived and/or modified sequence
auggacaagaaguacuccauugggcucgauaucggcacaaacagcgucggcugggccgucauuacggacgaguacaaggugccgagcaaaaaauucaaaguucugggcaauaccgaucgccacagcauaaagaagaaccucauuggcgcccuccuguucgacuccggggagacggccgaagccacgcggcucaaaagaacagcacggcgcagauauacccgcagaaagaaucggaucugcuaccugcaggagaucuuuaguaaugagauggcuaagguggaugacucuuucuuccauaggcuggaggaguccuuuuugguggaggaggauaaaaagcacgagcgccacccaaucuuuggcaauaucguggacgagguggcguaccaugaaaaguacccaaccauauaucaucugaggaagaagcuuguagacaguacugauaaggcugacuugcgguugaucuaucucgcgcuggcgcauaugaucaaauuucggggacacuuccucaucgagggggaccugaacccagacaacagcgaugucgacaaacucuuuauccaacugguucagacuuacaaucagcuuuucgaagagaacccgaucaacgcauccggaguugacgccaaagcaauccugagcgcuaggcuguccaaaucccggcggcucgaaaaccucaucgcacagcucccuggggagaagaagaacggccuguuugguaaucuuaucgcccugucacucgggcugacccccaacuuuaaaucuaacuucgaccuggccgaagaugccaagcuucaacugagcaaagacaccuacgaugaugaucucgacaaucugcuggcccagaucggcgaccaguacgcagaccuuuuuuuggcggcaaagaaccugucagacgccauucugcugagugauauucugcgagugaacacggagaucaccaaagcuccgcugagcgcuaguaugaucaagcgcuaugaugagcaccaccaagacuugacuuugcugaaggcccuugucagacagcaacugccugagaaguacaaggaaauuuucuucgaucagucuaaaaauggcuacgccggauacauugacggcggagcaagccaggaggaauuuuacaaauuuauuaagcccaucuuggaaaaaauggacggcaccgaggagcugcugguaaagcuuaacagagaagaucuguugcgcaaacagcgcacuuucgacaauggaagcaucccccaccagauucaccugggcgaacugcacgcuauccucaggcggcaagaggauuucuaccccuuuuugaaagauaacagggaaaagauugagaaaauccucacauuucggauacccuacuauguaggcccccucgcccggggaaauuccagauucgcguggaugacucgcaaaucagaagagaccaucacucccuggaacuucgaggaagucguggauaagggggccucugcccaguccuucaucgaaaggaugacuaacuuugauaaaaaucugccuaacgaaaaggugcuuccuaaacacucucugcuguacgaguacuucacaguuuauaacgagcucaccaaggucaaauacgucacagaagggaugagaaagccagcauuccugucuggagagcagaagaaagcuaucguggaccuccucuucaagacgaaccggaaaguuaccgugaaacagcucaaagaagacuauuucaaaaagauugaauguuucgacucuguugaaaucagcggaguggaggaucgcuucaacgcaucccugggaacguaucacgaucuccugaaaaucauuaaagacaaggacuuccuggacaaugaggagaacgaggacauucuugaggacauuguccucacccuuacguuguuugaagauagggagaugauugaagaacgcuugaaaacuuacgcucaucucuucgacgacaaagucaugaaacagcucaagaggcgccgauauacaggaugggggcggcugucaagaaaacugaucaaugggauccgagacaagcagaguggaaagacaauccuggauuuucuuaaguccgauggauuugccaaccggaacuucaugcaguugauccaugaugacucucucaccuuuaaggaggacauccagaaagcacaaguuucuggccagggggacagucuucacgagcacaucgcuaaucuugcagguagcccagcuaucaaaaagggaauacugcagaccguuaaggucguggaugaacucgucaaaguaaugggaaggcauaagcccgagaauaucguuaucgagauggcccgagagaaccaaacuacccagaagggacagaagaacaguagggaaaggaugaagaggauugaagaggguauaaaagaacuggggucccaaauccuuaaggaacacccaguugaaaacacccagcuucagaaugagaagcucuaccuguacuaccugcagaacggcagggacauguacguggaucaggaacuggacaucaaucggcucuccgacuacgacguggaucauaucgugccccagucuuuucucaaagaugauucuauugauaauaaaguguugacaagauccgauaaaaauagagggaagagugauaacguccccucagaagaaguugucaagaaaaugaaaaauuauuggcggcagcugcugaacgccaaacugaucacacaacggaaguucgauaaucugacuaaggcugaacgagguggccugucugaguuggauaaagccggcuucaucaaaaggcagcuuguugagacacgccagaucaccaagcacguggcccaaauucucgauucacgcaugaacaccaaguacgaugaaaaugacaaacugauucgagaggugaaaguuauuacucugaagucuaagcuggucucagauuucagaaaggacuuucaguuuuauaaggugagagagaucaacaauuaccaccaugcgcaugaugccuaccugaaugcagugguaggcacugcacuuaucaaaaaauaucccaagcuugaaucugaauuuguuuacggagacuauaaaguguacgauguuaggaaaaugaucgcaaagucugagcaggaaauaggcaaggccaccgcuaaguacuucuuuuacagcaauauuaugaauuuuuucaagaccgagauuacacuggccaauggagagauucggaagcgaccacuuaucgaaacaaacggagaaacaggagaaaucgugugggacaaggguagggauuucgcgacaguccggaagguccuguccaugccgcaggugaacaucguuaaaaagaccgaaguacagaccggaggcuucuccaaggaaaguauccucccgaaaaggaacagcgacaagcugaucgcacgcaaaaaagauugggaccccaagaaauacggcggauucgauucuccuacagucgcuuacaguguacugguuguggccaaaguggagaaagggaagucuaaaaaacucaaaagcgucaaggaacugcugggcaucacaaucauggagcgaucaagcuucgaaaaaaaccccaucgacuuucucgaggcgaaaggauauaaagaggucaaaaaagaccucaucauuaagcuucccaaguacucucucuuugagcuugaaaacggccggaaacgaaugcucgcuagugcgggcgagcugcagaaagguaacgagcuggcacugcccucuaaauacguuaauuucuuguaucuggccagccacuaugaaaagcucaaagggucucccgaagauaaugagcagaagcagcuguucguggaacaacacaaacacuaccuugaugagaucaucgagcaaauaagcgaauucuccaaaagagugauccucgccgacgcuaaccucgauaaggugcuuucugcuuacaauaagcacagggauaagcccaucagggagcaggcagaaaacauuauccacuuguuuacucugaccaacuugggcgcgccugcagccuucaaguacuucgacaccaccauagacagaaagcgguacaccucuacaaaggagguccuggacgccacacugauucaucagucaauuacggggcucuaugaaacaagaaucgaccucucucagcucgguggagacagcagggcugaccccaagaagaagaggaagguguga

SEQ ID NO: 89143 - RNA, 4689 nt, Artificial Sequence
  derived and/or modified sequence
gggaaauaagagagaaaagaagaguaagaagaaauauaagagccaccauggacaagaaauacucaaucggacuugcuaucggaacuaacagcgugggaugggccgucauuacugacgaauacaaggugcccucaaagaaguucaagguccugggaaauaccgauagacacuccaucaaaaagaaccugaucggggcacuguuguucgacucgggagagacugcagaagcaaccaggcucaagcgcacugcgaggcgccgguacacccggaggaagaaccgcaucugcuaccuccaagagauuuucagcaacgagauggcaaaggucgaugauucguucuuucaccgccuugaggagucguuccuugucgaggaggacaaaaagcaugaaagacauccgaucuucggaaacaucguggacgaagucgcauaccaugaaaaguacccuaccaucuaccaucucagaaagaaacucgucgauucaacugauaaggccgacuugcggcugaucuaccuggcucuggcgcacaugaucaaguuucggggucacuuucucaucgagggugaucucaacccggacaauuccgacguugacaaacucuucauccaacugguccagacguacaaccagcuguucgaagaaaauccgaucaacgcaagcggaguggacgccaaagccauucugucggcccgccucucgaagucgcgucgccuggaaaaucugauugcucagcucccgggcgaaaagaagaauggccuguuuggaaaccucaucgcacugucccucgggcugacucccaacuucaaaucgaacuuugacuuggcugaggaugcaaagcugcaacucuccaaagacacuuacgaugaugaccuggacaaucuccuggcgcagaucggggaucaguaugcugaccuguuccuggcggccaagaaccugucugaugccauccugcucuccgauauccugagagugaacacugagaucaccaaggcgccucugagcgccucgaugaucaaacgcuacgaugaacaccaucaggaccucacucuucugaaggcuuuggugcggcagcagcuuccggaaaaguacaaagagaucuucuucgaccagucgaaaaacggcuacgccggauacauugauggcggcgcaagccaggaggaauucuauaaguuuaucaaaccgauccuggagaagauggacggcacugaagaacuucuggucaagcugaaucgagaggaucugcuccggaagcagcggaccuucgacaaugggucuaucccucaccaaauccaucucggcgagcugcaugcgauucugaggcgccaggaggacuucuacccauuccugaaagacaaucgggagaaaaucgaaaagauucugacguuccgcauuccauacuacgucgggccacuugcgcgggguaauucgagauucgccuggaugacgcggaaguccgaagaaaccaucacgccguggaauuucgaagaaguggucgacaagggagccagcgcacaguccuucauugagcgcaugaccaauuucgacaaaaaucugccgaacgagaagguccugccgaagcauucacugcuguacgaauacuuuaccguguacaacgaacugaccaaggugaaguacgucaccgagggaaugagaaagccugcuuuccugagcggagaacagaagaaggccauuguugaccuccucuucaagacuaaucgcaaagugaccgugaagcagcuuaaagaggauuacuucaaaaagaucgaauguuucgacuccguggaaaucagcggcguggaggauagauucaacgcgucccuugggacuuaccacgaccuccuuaagaucaucaaggauaaggauuuccucgacaaugaggaaaacgaagauauccuggaggacaucguucugacucugacccucuuugaggaccgggagaugaucgaggagagacucaagaccuacgcgcaccuguuugacgacaaagugaugaagcaacuuaaacgcaggcgcuacaccggcuggggcagacugucacgcaaguugaucaacggaauuagagauaaacaguccggaaagaccauccuggacuuccugaaguccgauggauucgccaaccggaauuucaugcagcucauccaugacgacucauugacuuucaaggaggauauccaaaaggcccaagugagcggccaaggggacucccuucacgaacacaucgcaaauuuggccggaucaccagcgauuaagaagggaauccugcagaccgugaaggugguggacgagcuggugaaagugaugggacggcacaagccggaaaacaucgugaucgagauggccagagagaaccagacgacucaaaagggccagaagaacucgcgcgaacgcaugaagagaauagaagagggaauuaaggaacugggaucgcagaucuugaaggagcacccugucgaaaauacucaacuccagaacgagaagcuguaccuguacuaucuucaaaacggcagggacauguaugucgaccaagagcucgacauuaaccgccuguccgauuaugacguggacgccaucgugccgcagagcuuucucaaggacgauuccaucgacaacaaagugcucacccgcagcgacaagaauagagggaagucggauaacgucccuucggaagagguggugaaaaagaugaagaauuacuggcggcagcuccugaaugcaaagcucaucacccaacggaaguuugacaaccucaccaaggcagaaagaggaggacugucggaauuggauaaggccgguuucaucaagcgacaauugguggaaacucggcaaauuaccaagcauguggcacagauucuggacucccguaugaacaccaaguacgacgagaacgauaagcugauccgcgaggucaaggugaucacccucaaaagcaaacuugugucagacuuccggaaggacuuccaauucuacaagguccgcgaaaucaacaacuaccaccacgcucaugacgcauaccugaacgcuguggucgggacugcccucaucaagaaguacccuaaacucgaaagcgaauuuguguacggcgacuacaaaguguacgauguccggaagaugaucgcgaaauccgagcaggagaucggaaaggcgacugcuaaguacuuuuucuacucgaacaucaugaacuucuucaaaaccgaaaucacccuggcuaauggcgagaucagaaagcgcccgcugaucgaaaccaacggcgaaaccggugaaaucgugugggacaagggccgcgauuucgcuacugugagaaagguccuuuccaugccgcaagugaauaucgucaaaaagacugaggugcagacuggcggauuuuccaaggaaucgauccucccaaagaggaacucagauaagcucaucgcgcggaaaaaggauugggacccuaagaaguacggaggauuugauagcccaacuguggccuacucugugcucgugguggccaaagucgagaaaggaaagucgaagaaguugaaauccgugaaagaacucuugggaaucacuaucauggagcggucgucauuugaaaagaacccaaucgacuuccuggaagccaagggauacaaagaagucaagaaagaccugaucaucaagcucccuaaguacagccuguucgaacuggagaacggaaggaaacggaugcuggcuuccgccggcgaacugcaaaagggcaaugagcuggcccucccaucgaaauacgugaacuuccucuaccuugccucccauuacgaaaaguugaagggcucacccgaggacaaugagcagaaacagcucuuuguugaacaacacaaacacuaccuggacgaaaucaucgaacaaaucagcgaguucagcaagcgcgucauucuggcggacgcgaaccuggauaaagugcuguccgcguacaacaagcaccgcgauaagccgauacgggaacaggcugagaacaucauucaccucuucacucucacuaaucugggagcccccgccgccuucaaguacuuugauacuaccaucgaccgcaagagauacacgagcaccaaggaagugcucgaugccacccugauccaccaguccauuacuggucuguacgaaacgcgaaucgaucugucacagcucggaggagaugggucaccgaaaaagaaacggaaagucagcucggauuacaaggaucacgacggagacuacaaggaccaugacaucgacuauaaggacgacgacgacaaggccgcuggaggcgguggaucgggacgcgcggacgccuuggaugacuucgaccuugacaugcugggauccgacgcacuugaugauuuugaucucgauaugcuuggcagcgacgcacuggacgauuucgaccucgacaugcucggaucggaugcgcucgacgacuucgaucuggauaugcugugauaauaggcuggagccucgguggccaugcuucuugccccuugggccuccccccagccccuccuccccuuccugcacccguacccccguggucuuugaauaaagucugagugggcggcaaaaaaaaaaaaaaaaaaaaaaaaaaaaaaaaaaaaaaaaaaaaaaaaaaaaaaaaaaaaaaaaaaaaaaaaaaaaaaaaaaaaaaaaaaaaaaaaaaaaaaaaaaaaaaaaaaaaaaaaaaaaaaaaaaaaaaaaaaaa

SEQ ID NO: 89144 - RNA, 4711 nt, Artificial Sequence
  derived and/or modified sequence
gggaaauaagagagaaaagaagaguaagaagaaauauaagagccaccauggacaagaaguacucaaucggacucgcaaucggaaccaauucagucggcugggcagucauuaccgaugaauacaaggugccgucgaagaaguucaaaguccuggguaacacugacagacauucgaucaaaaagaaccugaucggagccuugcuguuugauucaggcgaaaccgccgaagcuacccgguugaaacgaacugcuagacgccgcuacacgcgccgcaagaaccggaucugcuaccuccaagaaaucuucucgaacgaaauggcuaagguggacgacucguucuuucaccggcucgaggagucauuccuuguggaggaagauaagaagcacgaaagacacccgaucuucggcaacaucguggacgaagucgcguaccacgaaaaguacccgacuaucuaccaucuccggaagaagcucguggauagcaccgauaaggccgaucugcgacugaucuaccucgcgcuggcccauaugauuaaguuccgcgggcacuuccucaucgaaggggaccugaauccagacaacucggacguggauaagcuguuuauccagcuggugcagacuuacaaucaauuguuugaagaaaacccuaucaacgcgucugggguggacgcaaaggccauccugagcgcgcggcugucaaaauccagacggcuggaaaaucugauagcccaacugccgggcgagaagaaaaacggccuguuuggaaaucuuaucgcccugucccugggacugacccccaacuucaagucgaacuucgacuuggccgaggaugcgaagcuccagcucagcaaagacaccuacgacgaugaccucgauaaccuguuggcccagaucggugaccaguaugcugaucucuucuuggcggccaagaaccugucagacgcaauucugcucuccgacauccugcgggugaauacugagaucacuaaagccccauugagcgcgucgaugaucaaaagauacgacgagcaccaccaggaucugacucuccucaaggcacugguccgccaacagcucccggaaaaguacaaagagaucuucuuugaccaauccaaaaacggauacgcugguuacauagacggcggagcgucacaagaagaguucuacaaguucaucaagccuauccuggaaaagauggacgggaccgaggaacuccugguuaagcucaauagggaggaucugcugcgcaagcaacgcacguucgacaauggaagcaucccccaucagauccaccugggggagcuccacgcgauccugaggcgccaggaagauuucuacccauuucugaaggacaauagagagaaaaucgaaaagauccugacuuuccgaaucccguacuacgugggcccgcucgcacggggaaacucacgguuugccuggaugacucgcaaauccgaagaaaccauuacccccuggaauuucgaggagguggucgauaaaggcgccucagcccagucguucaucgaaagaaugaccaacuuugacaagaaccucccaaaugagaaggugcugccaaaacauagccugcuguacgaguacuuuacuguguauaacgaacucaccaaggugaaauacgugaccgagggaaugcgcaagccggcauuucugucgggcgaacagaagaaggcaauuguggacuugcuguucaaaaccaaccggaaggugaccgugaaacagcucaaggaagauuacuuuaagaagaucgaguguuucgauagcgucgaaauuucggggguggaagaucgcuucaaugcaagccuugggacguaccacgaucugcuuaagaucauuaaggacaaggauuuccuugacaacgaagagaacgaggauauucucgaggauaucguccugacccugacucuguuugaggauagagaaaugaucgaggagagauugaaaacuuacgcacaccucuucgacgauaaggugaugaaacagcugaaaaggcguagauacacugguuggggaaggcugucgagaaagcugaucaacggaauuagggacaagcaguccggaaaaaccauccuggauuuccucaaguccgacgguuucgccaaccgcaacuucaugcagcugauccacgaugauucccugacguucaaagaggauauccagaaggcacaaguguccggacaaggagacucacuccacgagcauaucgcuaaucucgccggaucgccagcuaucaagaagggaaucuugcagacugucaaggugguggacgaacuggugaaagugaugggaaggcauaagccggagaauaucgugaucgagauggcgagggaaaaccagacgacccagaaaggacagaaaaacagccgggaacgcaugaagcgcaucgaagagggaaucaaagagcuugggagccaaauccucaaagaacacccuguggaaaauacccaacugcagaaugagaagcuuuaccuguauuaccuccaaaacgggcgcgacauguacguugaccaggaauuggacauuaaccggcuuuccgacuacgauguggacgcuaucgucccgcaguccuuccugaaagacgauucgaucgacaauaagguccugacuagaucagacaagaaucggggaaagucagacaacgugccuagcgaagaggucguuaagaagaugaagaauuacuggcgccagcugcugaacgcgaagcuuaucacucagcgcaaguucgacaaccucaccaaggcagaaagaggcggauugucggagcucgacaaagcuggcuucaucaagcgccagcucgucgaaacucgccagauuacuaagcauguggcgcagauccuggacagccgcaugaauacuaaguaugaugagaaugacaagcucauccgggaggugaaggucaucacccugaaguccaagcugguguccgacuuccggaaggacuuccaauucuacaaagucagagaaaucaacaauuaccaucacgcgcaugacgccuacuugaaugcagugguggguacugcccucaucaagaaauacccaaagcuugaaagcgaguuugucuacggagacuacaagguguacgacguccggaagaugaucgccaaaucggaacaggaaauugggaaggcgaccgcuaaguacuucuucuacucgaauaucaugaauuucuucaagaccgagaucacgcuugcaaauggcgaaauccggaagcggccccucaucgaaaccaacggagaaaccggagaaaucgugugggacaagggucgcgauuuugcgaccguccgaaagguucuuagcaugccucaagugaacaucgucaagaaaacggaagugcagacuggaggcuucagcaaggaguccauucucccgaaacgcaacuccgacaaacugaucgcacgcaagaaagacugggacccgaagaaauacggaggcuucgauucgccgacuguggcuuacucgguccugguuguggccaagguggaaaagggaaaguccaagaagcugaaguccgucaaggagcuccucggaaucaccaucauggaacggucaagcuucgagaaaaacccaauugacuuccuggaggcaaagggguacaaggaggugaagaaggaucugaucaucaaacugccgaaguacagccucuuugagcucgaaaacggacgcaaaaggaugcuggccuccgccggagagcugcaaaagggaaacgagcuugccuugccuuccaaguacgugaacuuccuguaccuggcaucccacuacgaaaaacugaagggaucgccggaggacaacgaacagaagcagcuguuuguggaacaacacaagcauuaucuggaugaaaucaucgaacaaaucagcgaauucucaaaaagggugaucuuggccgacgccaaccuggauaaagugcuuuccgccuacaacaaacaucgcgacaagccgauccgggagcaggccgaaaacaucauucaccuguuuacccugacuaaucugggugcgcccgcggcuuucaaauacuucgauaccacgaucgaccggaagagauacaccagcaccaaagagguguuggacgcgacccucauccaccaaucuauuaccggccucuaugaaacuaggaucgaccucagccagcugggaggcgauggauccccaaagaagaagagaaaaguguccuccgacuacaaggaucaugauggggacuauaaagaucaugauauugauuacaaggacgacgacgacaaggccgcuggaggaggagguuccggccgcgccgaugcucucgacgacuucgaccucgacaugcugggauccgacgcccuggacgacuuugaucuggauaugcugggcucggacgcccuugaugacuucgaucuggacaugcuggggucggaugcacuggacgacuucgaccuugauaugcugugauaauaggcuggagccucgguggccaugcuucuugccccuugggccuccccccagccccuccuccccuuccugcacccguaccccccaaacaccauugucacacuccaguggucuuugaauaaagucugagugggcggcaaaaaaaaaaaaaaaaaaaaaaaaaaaaaaaaaaaaaaaaaaaaaaaaaaaaaaaaaaaaaaaaaaaaaaaaaaaaaaaaaaaaaaaaaaaaaaaaaaaaaaaaaaaaaaaaaaaaaaaaaaaaaaaaaaaaaaaaaaaa

SEQ ID NO: 89145 - RNA, 4443 nt, Artificial Sequence
  derived and/or modified sequence
gggaaauaagagagaaaagaagaguaagaagaaauauaagagccaccauggacaagaaauacagcaucggccuggauauuggaacuaacagcguuggaugggcagugaucaccgacgaguacaaggugccgagcaagaaguucaaggugcuggggaacacugaccgccauucaauuaagaaaaaccucauuggagcacugcuuuuugacucgggugagacugccgaagcuaccaggcucaaacgcaccgcacgcagacgguacacccgccgcaagaaucgcaucugcuaucugcaagagaucuuuuccaacgagauggcgaagguugacgacagcuuuuuccaccggcuggaagagagcuuccucguggaagaggacaaaaagcacgaaaggcauccaaucuucgguaacaucguggacgaaguggcguaucacgaaaaguacccuaccaucuaccaucugcggaagaagcuggucgauuccacggauaaggcagaccugagacugaucuaccuggcuuuggcccauaugaucaaauuccgcggccauuuccugaucgagggggaccuuaacccggauaacucggaugucgacaagcuguucauccagcugguccaaacguauaaccaacuguuugaggaaaaucccaucaacgcuucggggguggacgccaaagcaauccucuccgcgcgccugagcaagucacggcggcucgaaaaccugaucgcgcagcugccgggagaaaagaaaaauggacuguuugggaaucugaucgcgcugucgcucggccugacuccaaacuuuaagucaaauuucgauuuggccgaagaugccaagcugcagcugucaaaggacacuuacgacgacgaccuggacaaucugcuggcccagauuggggaccaauacgcagaccuguucuuggccgcgaagaaccugagcgacgccauucuucuguccgauauucugagagucaauaccgaaaucacuaaggcuccgcuguccgcuucaaugaucaagcgcuacgaugaacaccaccaggaucucacucugcucaaagcccucgugagacaacaauugccugaaaaguacaaggagaucuucuucgaccagagcaaaaacggcuacgcaggcuacaucgauggaggagcgucacaagaagaguucuacaaguucaucaagccaaucuuggagaagauggacgguacugaagaacuccuugugaagcugaauagggaggauuugcucagaaagcagcggacuuuugacaacggcucgaucccucaucagauucaccucggugagcugcaugccauccuucggcgccaagaggauuuuuaccccuuccugaaggauaaucgcgagaaaaucgaaaagauccugacguucagaauucccuacuacgugggaccgcuggcgcgcgguaacucgcgguuugcauggaugacucgcaagucagaggaaacuaucacuccuuggaauuuugaggaggucgucgauaagggagccuccgcccagucauucaucgaacgcaugaccaacuucgacaagaaucuuccgaacgagaagguccuuccaaagcacucccuguuguacgaauacuucaccguguacaaugagcugaccaaaguuaaguaugucaccgagggcaugagaaagccggccuuccucagcggcgaacaaaagaaggccaucgucgaccuccucuucaagaccaaccggaaggugaccgucaagcaacucaaggaggacuacuucaagaagaucgaaugcuuugacucggucgaaaucagcggaguggaggaccgguuuaacgcgucacuggguaccuaccaugaucuccugaaaaucaucaaagacaaggacuuccuggacaacgaagaaaacgaggacauccuggaagauauuguguugacccugacgcuguucgaggaccgggaaaugaucgaggaaaggcuuaagaccuacgcacaccucuucgaugacaaagugaugaagcaacugaagcggcggagauauacuggcugggggaggcucucccggaagcucauuaauggaaucagagacaaacagucggguaaaacuauccucgacuuccucaagucggauggguucgccaaccggaacuucaugcagcugauccacgaugauuccuugaccuucaaggaagauauccagaaggcgcaagugagcggacagggagauucguugcacgaacauaucgcuaaucucgccggauccccagccaucaagaaaggaauccugcagaccgugaaggugguggaugaacuggugaaagugauggggcgccacaaaccagagaacaucgucauugagauggcccgcgagaaucagaccacucagaagggacaaaagaacuccagagagcggaugaaacgcaucgaggaaggcaucaaagagcuugguagccaaauccugaaggaacacccggucgagaacacccagcuccagaacgaaaagcuuuaccuguacuaccuccaaaauggacgggacauguacgucgaccaggaauuggacaucaacagacucagcgacuacgauguggaccauauugugccacaguccuuucuuaaggacgacagcaucgauaacaaagugcucacuagaucagacaaaaaucgcgggaaaucagacaaugugccaucggaagagguugucaagaagaugaaaaacuacuggagacagcugcucaaugccaaacuuaucacccagcggaaguucgacaaccuuaccaaggccgagcgcggaggauuguccgaacucgacaaggccggcuucaucaaaaggcagcugguggaaacccggcagaucacuaaacacguggcccagauccucgauucgcgcaugaacacuaaauacgaugagaaugacaagcugauuagggaagucaaggucaucacucugaagucgaaacuggugucggacuuuagaaaggauuuccaguucuacaaaguccgcgagauuaacaacuaccaccacgcucaugacgccuaccugaaugcaguugugggcaccgcgcugaucaagaaguauccgaagcuggaauccgaguucguguacggagauuacaaaguguacgacgugcgcaagaugaucgccaagucggaacaggaaaucggaaaggcuacugcaaaguacuucuucuacucaaacaucaugaacuucuucaaaacggagaucacgcucgcgaacggcgaaauccggaaaaggccgcucauugaaaccaacggagaaaccggggagaucgugugggacaagggaagggauuuugcgacugugaggaagguguuguccaugccgcaagucaauauugugaaaaagacggaagugcaaaccggaggauucagcaaagaauccauccucccaaagcgcaacucggacaaacucaucgcgcgcaagaaggauugggaccccaagaaauacgguggcuuugacagcccuacuguggcuuacuccguccucgucguggcuaaaguggaaaaggguaaauccaaaaagcucaaaucggugaaggagcuccugggaaucacgaucauggagcggucgagcuucgaaaagaauccuauugauuuccuggaggcgaagggcuacaaggaagucaagaaagaccugaucaucaagcucccgaaguacagccucuucgagcucgaaaacggcagaaagaggaugcuggcaucagcgggagaauugcagaagggaaacgaacuggcacugccguccaaguacgugaauuuucucuaucuggcuagccacuacgaaaagcugaagggaucgcccgaggacaacgagcaaaaacaacuguucguggagcagcacaagcacuaccuggaugagaucaucgagcagaucuccgaauucucgaaacgcgugauccuugccgaugccaaucuggauaaaguguugucggcuuacaacaagcaucgggauaaaccgauccgcgaacaggcagaaaacaucauucaucuguucacuuugaccaaucugggagcgccugccgcguuuaaguacuucgacaccacuauugauagaaagcgcuacaccucgaccaaggaagugcuggacgcuacccugauccaccaguccaucaccggacucuacgaaacucgcauugaccugucccagcuuggaggagauucacgggccgauccaaagaaaaagcgcaaggucugauaauaggcuggagccucgguggccaugcuucuugccccuugggccuccccccagccccuccuccccuuccugcacccguacccccguggucuuugaauaaagucugagugggcggcaaaaaaaaaaaaaaaaaaaaaaaaaaaaaaaaaaaaaaaaaaaaaaaaaaaaaaaaaaaaaaaaaaaaaaaaaaaaaaaaaaaaaaaaaaaaaaaaaaaaaaaaaaaaaaaaaaaaaaaaaaaaaaaaaaaaaaaaaaaa

SEQ ID NO: 89146 - RNA, 4575 nt, Artificial Sequence
  derived and/or modified sequence
gggaaauaagagagaaaagaagaguaagaagaaauauaagagccaccauggacuacaaggaccacgacggagacuacaaagaccaugacaucgauuacaaggaugacgaugacaaaauggcaccgaagaagaagagaaaggucggaauucacggggugccggccgcggacaagaaguacucaaucggacuggauaucggcacgaacagcguggguugggcagugaucaccgacgaauacaaggugccgagcaagaaguucaaagugcugggaaauaccgaucgccauucgaucaagaaaaaucugauuggcgcgcuccuguucgacucgggagagacugccgaggccacuagacugaagaggaccgcuaggcgccgcuacacgaggcgcaaaaaccgcaucugcuaucuucaagaaaucuucucaaacgagauggccaagguggacgacuccuuuuuccaucggcuggaagaaucauuucugguggaggaggacaagaagcacgaacgccaucccauuuucggcaacauugucgacgaaguggccuaucaugagaaguauccgacuaucuaccacuugagaaagaagcugguggacuccacugacaaggcagaucugcgguugaucuaccucgcacuggcccauaugaucaaauuccggggacacuuccucaucgagggcgaccuuaaucccgacaauuccgauguggauaagcuuuucauccagcugguccagaccuacaaccaacuguuugaagaaaauccaaucaaugcgagcggugucgaugcaaaggccauccugagcgcccgccucucgaaaagcagaaggcucgaaaaccugaucgcacaguugccuggagagaagaagaacggccucuucggcaaucucaucgcauugucccugggacugacuccaaacuucaaauccaacuucgacuuggccgaggacgccaaacugcaacugagcaaagauaccuacgaugaugacuuggacaaucuucuggcucagaucggcgaccaguacgccgaccuguuccuugcggcuaagaaccugucggacgccauccugcuguccgacauccugcgcgucaauaccgaaauuacuaaagcaccacucucggcauccaugaucaagagauacgaugaacaccaccaggaucucacccuccugaaagcacuggugcggcagcagcucccugagaaauacaaggaaaucuucuuugaucaguccaagaacggauacgccggauacaucgacggcggcgcgagccaagaggaauucuacaaguucaucaagccgauccuggaaaagauggauggcacggaagaacuccuggucaaacugaauagagaggaucugcuccgcaaacaacggaccuucgauaacggaucgaucccgcaccagauccaccucggcgaacugcaugccauccugcggcggcaggaggacuuuuacccguuccucaaagacaacagagaaaagaucgagaagaucuugaccuuucgcaucccguacuacgugggcccgcucgcgagagguaacucccgcuuugcuuggaugacuagaaagucagaggaaacgaucaccccauggaacuucgaagaggugguugacaaaggagcgagcgcccaaucguucaucgaacggaugacuaacuucgauaagaaucugccgaaugagaagguccugccuaagcacucacuucuguaugaauacuuuacuguguauaacgaacucaccaaagucaaauacgugacugagggaaugcgcaagccugcguuuuuguccggcgagcagaaaaaggccaucguggacuugcuguucaaaaccaaccgcaaggugacuguuaagcaacucaaagaggacuacuuuaagaagaucgaaugcuuugacucggucgagauuuccgggguugaagauagauucaacgcgucgcugggaaccuaccaugaucuccucaagauuaucaaggacaaagacuuccuggauaacgaggagaaugaggacauccucgaagauauugugcuuacccugacccuuuucgaagaucgcgaaaugaucgaagaacgccugaaaaccuacgcucaccuguucgacgauaaggugaugaaacaguugaaacgccggcgguacacggguugggggcggcugucgcgcaagcugaucaacggaauucgggacaaacagagcggaaagaccauccucgauuuucugaaguccgaugguuuugccaaccgcaacuucaugcagcucauccaugacgauucgcuuaccuuuaaggaggauauccagaaggcacaagugucgggacaaggggauucgcuccacgaacacaucgccaaucuggcggggucgccggcaauuaagaagggaauccuccagacuguuaagguggucgacgagcuggugaaggugauggggagacauaagccugaaaacauugugaucgagauggcgagagaaaaucaaacuacucagaagggacagaagaauucccgggagcggaugaagcgcaucgaggagggaaucaaggaacugggcucccaaauccugaaagagcaucccguggaaaauacucagcugcagaacgagaagcuuuaccuguacuaucuucaaaauggcagggacauguacgucgaccaagaacuggauaucaaucggcucuccgauuacgacgucgaucacaucgucccccaaucauuccugaaggaugauagcaucgauaacaaggugcucacuagaucagacaaaaaccggggaaagucagauaacguccccagcgaagaagucgugaagaagaugaagaauuacuggaggcaacuucugaacgccaaacucaucacucagcgcaaguucgacaaccugaccaaagcagaaaggggaggacucagcgagcuggacaaggcugguuucaucaaacggcagcugguggagacucgccaaaucacgaagcauguggcccagauucucgacucgcgcaugaauacuaaguacgacgaaaacgauaagcugauccgggaggugaaggugaucacccucaagagcaagcucguguccgauuuccggaaagacuuccaguucuacaaggugcgggagauuaacaacuaccaucacgcucacgacgcuuaccucaaugcugugguggggacggcguugauuaagaaguacccaaaacuggaguccgaauucgucuacggagauuacaaggucuacgacgugcgcaagaugauugccaagucggagcaggaaauugggaaagcgacugcuaaguacuucuucuacucgaauaucaugaacuucuucaagaccgaaaucacccuggcuaacggcgagaucaggaaacggccgcugaucgaaacuaauggugagacuggugaaaucgugugggauaagggacgggacuucgccacgguccgcaagguccucagcaugccgcaagugaauauuguuaagaaaaccgaagugcagaccgguggguucucgaaggaauccauccugccaaagcgcaacucggauaagcuuauugcccgcaagaaggauugggacccgaaaaaguacgguggguucgacuccccuaccguggcguacucgguguuggugguggccaaaguggaaaagggcaaaucaaagaagcucaagagcgucaaggagcugcugggaaucaccaucauggagagguccagcuuugagaaaaacccgaucgacuucuuggaagccaagggauacaaagaggugaagaaagaccugaucaucaaacuuccaaaguacucccuguucgaacucgaaaacgggaggaagcgcaugcucgccucagccggggaacugcaaaagggcaacgaacuggcccucccgucaaaauacgucaacuuccuguacuuggcgucacacuacgaaaagcugaaaggauccccagaggacaacgaacagaaacagcuguucgucgagcagcacaagcacuaccuggacgagaucaucgaacagaucucggaauucagcaagagagugaucuuggcagacgcuaaccuugacaaaguccucucggcauacaauaagcaucgcgacaagccgaucagagaacaggcggagaacaucauccaccuguucacucucaccaaccugggcgcgccagcggcuuuuaaguacuuugauaccaccauugaccgcaagagauacaccucaacuaaagaagugcuggacgcaacccugauccaucaaagcaucaccggacuuuaugaaacucggaucgaucucucacagcucggaggagacaaaagaccggcugccaccaagaaggccggacaggcaaagaagaagaaaugauaauaggcuggagccucgguggccaugcuucuugccccuugggccuccccccagccccuccuccccuuccugcacccguacccccguggucuuugaauaaagucugagugggcggcaaaaaaaaaaaaaaaaaaaaaaaaaaaaaaaaaaaaaaaaaaaaaaaaaaaaaaaaaaaaaaaaaaaaaaaaaaaaaaaaaaaaaaaaaaaaaaaaaaaaaaaaaaaaaaaaaaaaaaaaaaaaaaaaaaaaaaaaaaaa

SEQ ID NO: 89147 - RNA, 3153 nt, Artificial Sequence
  derived and/or modified sequence
ucaagcuuuuggacccucguacagaagcuaauacgacucacuauagggaaauaagagagaaaagaagaguaagaagaaauauaagagccaccauggacaagaaauacagcaucggccuggauauuggaacuaacagcguuggaugggcagugaucaccgacgaguacaaggugccgagcaagaaguucaaggugcuggggaacacugaccgccauucaauuaagaaaaaccucauuggagcacugcuuuuugacucgggugagacugccgaagcuaccaggcucaaacgcaccgcacgcagacgguacacccgccgcaagaaucgcaucugcuaucugcaagagaucuuuuccaacgagauggcgaagguugacgacagcuuuuuccaccggcuggaagagagcuuccucguggaagaggacaaaaagcacgaaaggcauccaaucuucgguaacaucguggacgaaguggcguaucacgaaaaguacccuaccaucuaccaucugcggaagaagcuggucgauuccacggauaaggcagaccugagacugaucuaccuggcuuuggcccauaugaucaaauuccgcggccauuuccugaucgagggggaccuuaacccggauaacucggaugucgacaagcuguucauccagcugguccaaacguauaaccaacuguuugaggaaaaucccaucaacgcuucggggguggacgccaaagcaauccucuccgcgcgccugagcaagucacggcggcucgaaaaccugaucgcgcagcugccgggagaaaagaaaaauggacuguuugggaaucugaucgcgcugucgcucggccugacuccaaacuuuaagucaaauuucgauuuggccgaagaugccaagcugcagcugucaaaggacacuuacgacgacgaccuggacaaucugcuggcccagauuggggaccaauacgcagaccuguucuuggccgcgaagaaccugagcgacgccauucuucuguccgauauucugagagucaauaccgaaaucacuaaggcuccgcuguccgcuucaaugaucaagcgcuacgaugaacaccaccaggaucucacucugcucaaagcccucgugagacaacaauugccugaaaaguacaaggagaucuucuucgaccagagcaaaaacggcuacgcaggcuacaucgauggaggagcgucacaagaagaguucuacaaguucaucaagccaaucuuggagaagauggacgguacugaagaacuccuugugaagcugaauagggaggauuugcucagaaagcagcggacuuuugacaacggcucgaucccucaucagauucaccucggugagcugcaugccauccuucggcgccaagaggauuuuuaccccuuccugaaggauaaucgcgagaaaaucgaaaagauccugacguucagaauucccuacuacgugggaccgcuggcgcgcgguaacucgcgguuugcauggaugacucgcaagucagaggaaacuaucacuccuuggaauuuugaggaggucgucgauaagggagccuccgcccagucauucaucgaacgcaugaccaacuucgacaagaaucuuccgaacgagaagguccuuccaaagcacucccuguuguacgaauacuucaccguguacaaugagcugaccaaaguuaaguaugucaccgagggcaugagaaagccggccuuccucagcggcgaacaaaagaaggccaucgucgaccuccucuucaagaccaaccggaaggugaccgucaagcaacucaaggaggacuacuucaagaagaucgaaugcuuugacucggucgaaaucagcggaguggaggaccgguuuaacgcgucacuggguaccuaccaugaucuccugaaaaucaucaaagacaaggacuuccuggacaacgaagaaaacgaggacauccuggaagauauuguguugacccugacgcuguucgaggaccgggaaaugaucgaggaaaggcuuaagaccuacgcacaccucuucgaugacaaagugaugaagcaacugaagcggcggagauauacuggcugggggaggcucucccggaagcucauuaauggaaucagagacaaacagucggguaaaacuauccucgacuuccucaagucggauggguucgccaaccggaacuucaugcagcugauccacgaugauuccuugaccuucaaggaagauauccagaaggcgcaagugagcggacagggagauucguugcacgaacauaucgcuaaucucgccggauccccagccaucaagaaaggaauccugcagaccgugaaggugguggaugaacuggugaaagugauggggcgccacaaaccagagaacaucgucauugagauggcccgcgagaaucagaccacucagaagggacaaaagaacuccagagagcggaugaaacgcaucgaggaaggcaucaaagagcuugguagccaaauccugaaggaacacccggucgagaacacccagcuccagaacgaaaagcuuuaccuguacuaccuccaaaauggacgggacauguacgucgaccaggaauuggacaucaacagacucagcgacuacgauguggaccauauugugccacaguccuuucuuaaggacgacagcaucgauaacaaagugcucacuagaucagacaaaaaucgcgggaaaucagacaaugugccaucggaagagguugucaagaagaugaaaaacuacuggagacagcugcucaaugccaaacuuaucacccagcggaaguucgacaaccuuaccaaggccgagcgcggaggauuguccgaacucgacaaggccggcuucaucaaaaggcagcugguggaaacccggcagaucacuaaacacguggcccagauccucgauucgcgcaugaacacuaaauacgaugagaaugacaagcugauuagggaagucaaggucaucacucugaagucgaaacuggugucggacuuuagaaaggauuuccaguucuacaaaguccgcgagauuaacaacuaccaccacgcucaugacgccuaccugaaugcaguugugggcaccgcgcugaucaagaaguauccgaagcuggaauccgaguucguguacggagauuacaaaguguacgacgugcgcaaga

SEQ ID NO: 89148 - RNA, 4486 nt, Artificial Sequence
  derived and/or modified sequence
ucaagcuuuuggacccucguacagaagcuaauacgacucacuauagggaaauaagagagaaaagaagaguaagaagaaauauaagagccaccauggacuacaaggaccacgacggagacuacaaagaccaugacaucgauuacaaggaugacgaugacaaaauggcaccgaagaagaagagaaaggucggaauucacggggugccggccgcggacaagaaguacucaaucggacuggauaucggcacgaacagcguggguugggcagugaucaccgacgaauacaaggugccgagcaagaaguucaaagugcugggaaauaccgaucgccauucgaucaagaaaaaucugauuggcgcgcuccuguucgacucgggagagacugccgaggccacuagacugaagaggaccgcuaggcgccgcuacacgaggcgcaaaaaccgcaucugcuaucuucaagaaaucuucucaaacgagauggccaagguggacgacuccuuuuuccaucggcuggaagaaucauuucugguggaggaggacaagaagcacgaacgccaucccauuuucggcaacauugucgacgaaguggccuaucaugagaaguauccgacuaucuaccacuugagaaagaagcugguggacuccacugacaaggcagaucugcgguugaucuaccucgcacuggcccauaugaucaaauuccggggacacuuccucaucgagggcgaccuuaaucccgacaauuccgauguggauaagcuuuucauccagcugguccagaccuacaaccaacuguuugaagaaaauccaaucaaugcgagcggugucgaugcaaaggccauccugagcgcccgccucucgaaaagcagaaggcucgaaaaccugaucgcacaguugccuggagagaagaagaacggccucuucggcaaucucaucgcauugucccugggacugacuccaaacuucaaauccaacuucgacuuggccgaggacgccaaacugcaacugagcaaagauaccuacgaugaugacuuggacaaucuucuggcucagaucggcgaccaguacgccgaccuguuccuugcggcuaagaaccugucggacgccauccugcuguccgacauccugcgcgucaauaccgaaauuacuaaagcaccacucucggcauccaugaucaagagauacgaugaacaccaccaggaucucacccuccugaaagcacuggugcggcagcagcucccugagaaauacaaggaaaucuucuuugaucaguccaagaacggauacgccggauacaucgacggcggcgcgagccaagaggaauucuacaaguucaucaagccgauccuggaaaagauggauggcacggaagaacuccuggucaaacugaauagagaggaucugcuccgcaaacaacggaccuucgauaacggaucgaucccgcaccagauccaccucggcgaacugcaugccauccugcggcggcaggaggacuuuuacccguuccucaaagacaacagagaaaagaucgagaagaucuugaccuuucgcaucccguacuacgugggcccgcucgcgagagguaacucccgcuuugcuuggaugacuagaaagucagaggaaacgaucaccccauggaacuucgaagaggugguugacaaaggagcgagcgcccaaucguucaucgaacggaugacuaacuucgauaagaaucugccgaaugagaagguccugccuaagcacucacuucuguaugaauacuuuacuguguauaacgaacucaccaaagucaaauacgugacugagggaaugcgcaagccugcguuuuuguccggcgagcagaaaaaggccaucguggacuugcuguucaaaaccaaccgcaaggugacuguuaagcaacucaaagaggacuacuuuaagaagaucgaaugcuuugacucggucgagauuuccgggguugaagauagauucaacgcgucgcugggaaccuaccaugaucuccucaagauuaucaaggacaaagacuuccuggauaacgaggagaaugaggacauccucgaagauauugugcuuacccugacccuuuucgaagaucgcgaaaugaucgaagaacgccugaaaaccuacgcucaccuguucgacgauaaggugaugaaacaguugaaacgccggcgguacacggguugggggcggcugucgcgcaagcugaucaacggaauucgggacaaacagagcggaaagaccauccucgauuuucugaaguccgaugguuuugccaaccgcaacuucaugcagcucauccaugacgauucgcuuaccuuuaaggaggauauccagaaggcacaagugucgggacaaggggauucgcuccacgaacacaucgccaaucuggcggggucgccggcaauuaagaagggaauccuccagacuguuaagguggucgacgagcuggugaaggugauggggagacauaagccugaaaacauugugaucgagauggcgagagaaaaucaaacuacucagaagggacagaagaauucccgggagcggaugaagcgcaucgaggagggaaucaaggaacugggcucccaaauccugaaagagcaucccguggaaaauacucagcugcagaacgagaagcuuuaccuguacuaucuucaaaauggcagggacauguacgucgaccaagaacuggauaucaaucggcucuccgauuacgacgucgaucacaucgucccccaaucauuccugaaggaugauagcaucgauaacaaggugcucacuagaucagacaaaaaccggggaaagucagauaacguccccagcgaagaagucgugaagaagaugaagaauuacuggaggcaacuucugaacgccaaacucaucacucagcgcaaguucgacaaccugaccaaagcagaaaggggaggacucagcgagcuggacaaggcugguuucaucaaacggcagcugguggagacucgccaaaucacgaagcauguggcccagauucucgacucgcgcaugaauacuaaguacgacgaaaacgauaagcugauccgggaggugaaggugaucacccucaagagcaagcucguguccgauuuccggaaagacuuccaguucuacaaggugcgggagauuaacaacuaccaucacgcucacgacgcuuaccucaaugcugugguggggacggcguugauuaagaaguacccaaaacuggaguccgaauucgucuacggagauuacaaggucuacgacgugcgcaagaugauugccaagucggagcaggaaauugggaaagcgacugcuaaguacuucuucuacucgaauaucaugaacuucuucaagaccgaaaucacccuggcuaacggcgagaucaggaaacggccgcugaucgaaacuaauggugagacuggugaaaucgugugggauaagggacgggacuucgccacgguccgcaagguccucagcaugccgcaagugaauauuguuaagaaaaccgaagugcagaccgguggguucucgaaggaauccauccugccaaagcgcaacucggauaagcuuauugcccgcaagaaggauugggacccgaaaaaguacgguggguucgacuccccuaccguggcguacucgguguuggugguggccaaaguggaaaagggcaaaucaaagaagcucaagagcgucaaggagcugcugggaaucaccaucauggagagguccagcuuugagaaaaacccgaucgacuucuuggaagccaagggauacaaagaggugaagaaagaccugaucaucaaacuuccaaaguacucccuguucgaacucgaaaacgggaggaagcgcaugcucgccucagccggggaacugcaaaagggcaacgaacuggcccucccgucaaaauacgucaacuuccuguacuuggcgucacacuacgaaaagcugaaaggauccccagaggacaacgaacagaaacagcuguucgucgagcagcacaagcacuaccuggacgagaucaucgaacagaucucggaauucagcaagagagugaucuuggcagacgcuaaccuugacaaaguccucucggcauacaauaagcaucgcgacaagccgaucagagaacaggcggagaacaucauccaccuguucacucucaccaaccugggcgcgccagcggcuuuuaaguacuuugauaccaccauugaccgcaagagauacaccucaacuaaagaagugcuggacgcaacccugauccaucaaagcaucaccggacuuuaugaaacucggaucgaucucucacagcucggaggagacaaaagaccggcugccaccaagaaggccggacaggcaaagaagaagaaaugauaauaggcuggagccucgguggccaugcuucuugccccuugggccuccccccagccccuccuccccuuccugcacccguacccccguggucuuugaauaaagucugagugggcggcucuaga

SEQ ID NO: 89149 - protein, 310 aa, Artificial Sequence
  derived and/or modified sequence
MEFPFDVDALFPERITVLDQHLRPPARRPGTTTPARVDLQQQIMTIIDELGKASAKAQNLSAPITSASRMQSNRHVVYILKDSSARPAGKGAIIGFIKVGYKKLFVLDDREAHNEVEPLCILDFYIHESVQRHGHGRELFQYMLQKERVEPHQLAIDRPSQKLLKFLNKHYNLETTVPQVNNFVIFEGFFAHQHPPARKLPPKRAEGDIKPYSSSDREFLKVAVEPPWPLNRAPRRATPPAHPPPRSSSLGNSPERGPLRPFVPEQELLRSLRLCPPHPTARLLLAADPGGSPAQRRRTSSLPRSEESRY

SEQ ID NO: 89150 - DNA, 903 bp, Artificial Sequence
  derived and/or modified sequence
atggagttccccttcgacgtggacgccctgttccccgagagaatcaccgtgctggaccagcacctgagaccccccgccagaagacccggcaccaccacccccgccagagtggacctgcagcagcagatcatgaccatcatcgacgagctgggcaaggccagcgccaaggcccagaacctgagcgcccccatcaccagcgccagcagaatgcagagcaacagacacgtggtgtacatcctgaaggacagcagcgccagacccgccggcaagggcgccatcatcggcttcatcaaggtgggctacaagaagctgttcgtgctggacgacagagaggcccacaacgaggtggagcccctgtgcatcctggacttctacatccacgagagcgtgcagagacacggccacggcagagagctgttccagtacatgctgcagaaggagagagtggagccccaccagctggccatcgacagacccagccagaagctgctgaagttcctgaacaagcactacaacctggagaccaccgtgccccaggtgaacaacttcgtgatcttcgagggcttcttcgcccaccagcacccccccgccagaaagctgccccccaagagagccgagggcgacatcaagccctacagcagcagcgacagagagttcctgaaggtggccgtggagcccccctggcccctgaacagagcccccagaagagccaccccccccgcccaccccccccccagaagcagcagcctgggcaacagccccgagagaggccccctgagacccttcgtgcccgagcaggagctgctgagaagcctgagactgtgccccccccaccccaccgccagactgctgctggccgccgaccccggcggcagccccgcccagagaagaagaaccagatag

SEQ ID NO: 89151 - DNA, 933 bp, Artificial Sequence
  derived and/or modified sequence
atggagttccccttcgacgtggacgccctgttccccgagagaatcaccgtgctggaccagcacctgagaccccccgccagaagacccggcaccaccacccccgccagagtggacctgcagcagcagatcatgaccatcatcgacgagctgggcaaggccagcgccaaggcccagaacctgagcgcccccatcaccagcgccagcagaatgcagagcaacagacacgtggtgtacatcctgaaggacagcagcgccagacccgccggcaagggcgccatcatcggcttcatcaaggtgggctacaagaagctgttcgtgctggacgacagagaggcccacaacgaggtggagcccctgtgcatcctggacttctacatccacgagagcgtgcagagacacggccacggcagagagctgttccagtacatgctgcagaaggagagagtggagccccaccagctggccatcgacagacccagccagaagctgctgaagttcctgaacaagcactacaacctggagaccaccgtgccccaggtgaacaacttcgtgatcttcgagggcttcttcgcccaccagcacccccccgccagaaagctgccccccaagagagccgagggcgacatcaagccctacagcagcagcgacagagagttcctgaaggtggccgtggagcccccctggcccctgaacagagcccccagaagagccaccccccccgcccaccccccccccagaagcagcagcctgggcaacagccccgagagaggccccctgagacccttcgtgcccgagcaggagctgctgagaagcctgagactgtgccccccccaccccaccgccagactgctgctggccgccgaccccggcggcagccccgcccagagaagaagaaccagcagcctgcccagaagcgaggagagcagatactag

SEQ ID NO: 89152 - DNA, 2611 bp, Artificial Sequence
  derived and/or modified sequence
gaagtgacgtcgtgtggggcgggtccgaccgcgcacaatgggccatggagttcccgttcgatgtggacgcgctgttcccggagcggatcacggtgctggaccagcacctgaggcccccagcccgccgacccggaaccacaacgccggcccgtgttgatctacagcagcaaattatgaccattatagatgaactgggcaaggcttctgccaaggcccagaatctttccgctcctatcactagtgcatcaaggatgcagagtaaccgccatgttgtttatattctcaaagacagttcagcccgaccggctggaaaaggagccattattggtttcatcaaagttggatacaagaagctctttgtactggatgatcgtgaggctcataatgaggtagaaccactttgcatcctggacttttacatccatgagtctgtgcaacgccatggccatgggcgagaactcttccagtatatgttgcagaaggagcgagtggaaccgcaccaactggcaattgaccgaccctcacagaagctgctgaaattcctgaataagcactacaatctggagaccacagtcccacaggtgaacaactttgtgatctttgaaggcttctttgcccatcaacatcctccagcaaggaagctgccacccaagagagcagagggagacatcaagccatactcctctagtgaccgagaatttctgaaggtagctgtggagcctccttggcccctaaacagggcccctcgccgcgccacacctccagcccacccacccccccgctccagcagcctgggaaactcaccagaacgaggtcccctccgcccctttgtgccagagcaggagctgctgcgttccttgcgcctctgccccccacaccctaccgcccgccttctgttggctgctgaccctgggggcagcccagctcaacgtcgtcgcaccaggtaataggagttgaagggctaaggagcctcacagctataaaagaggatgttagaaatggcaaagggcaatttgaatccatcagagagatggatcaataagatgggtggcttggggggggtcctgaaacctttcaagaaaaatatttgtgcaagtgatctgggaaaaaaatgcagtgaaggagcagaataggaccttatatggagcctagggaccctggctttaatgtgagagttatgtggaatggtaggaagaacaccgagatccatcgagttgggggaacagagccttctaagattgggaaaatcttcgcttaatacttgctggggaaggggcagtgtctgacagagagtgggaagccactggcttgtgtgccaagagtccatcgcagcaggcagggagtgggcatttcctttatttctctccctttctcttcacctctgacttctctgtttttctctcccccgccccccgccatttcccatctcccttcctcccatccataacatccttccacagctcccttccccgctctgaggagagtcgatactaacagctaccctctccctgccctgggagacctggggtgggcagggaacccctccctgagaacctcagacccactcttccattgcatcctgtaggacccagtggaacctgacagagcccataggattccctcttctactttcttagacagcagggatgtcagggtctcaaactgcctaacactttgtagcttttcttaacacaaaagcaccccttctctcctaacttgggctctgaatactttcccaacaggaagtctgatctgttgccagacttcttggttagatggctcatacatttatctagagaagcacactcttgcttgctgtcaaactttagaccaccatggaaggtctaagggcatcctgtgccagggaaactttttaaggaattttatctatgggataaaccccatattccctctagtgtctactggtggctctaatactgctttgtgctgcctgccacacttgccctttgagcctgcgaatggccgctagtgagcaagctctgcttcagagcagtctagttaggtagaacagggacttaccagcttcccaaagggatctactcaccattgccaaactcttcatttccacattttgtgtaggtgtcagggaaccccaaactggtgttgctttggggtctctaaaggagattggctgacaccaccatttcccccagatccagattctctgagggaggttgtttcttgagagtagatccagagtgtcaaggatctgttagatcctggaatcccttcttgcatccatccctccctggtagctaggtcccgatatactcctgtcttgtgagattgtcgagatgagatgggggaccactcttcctctgtccttcctctctcctttcctccatagcaaggacgaccttccctgctccatgcccagagtatagctagatcccttcccctccctaccctctgaatgtgtgctagatcaggtgccccactgtgtttcctgaaatccttgggagccggatctccccatctcccctactcactcttcccttttcttctctcagtgttgtctgaataaagtgtgaaatcttttgtgttttctaaattgacattttcaatgaaaaaaagaatcacaaaaaaaaaa

SEQ ID NO: 89153 - DNA, 2061 bp, Artificial Sequence
  derived and/or modified sequence
cacaatgggccatggagttcccgttcgatgtggacgcgctgttcccggagcggatcacggtgctggaccagcacctgaggcccccagcccgccgacccggaaccacaacgccggcccgtgttgatctacagcagcaaattatgaccattatagatgaactgggcaaggcttctgccaaggcccagaatctttccgctcctatcactagtgcatcaaggatgcagagtaaccgccatgttgtttatattctcaaagacagttcagcccgaccggctggaaaaggagccattattggtttcatcaaagttggatacaagaagctctttgtactggatgatcgtgaggctcataatgaggtagaaccactttgcatcctggacttttacatccatgagtctgtgcaacgccatggccatgggcgagaactcttccagtatatgttgcagaaggagcgagtggaaccgcaccaactggcaattgaccgaccctcacagaagctgctgaaattcctgaataagcactacaatctggagaccacagtcccacaggtgaacaactttgtgatctttgaaggcttctttgcccatcaacatcctccagcaaggaagctgccacccaagagagcagagggagacatcaagccatactcctctagtgaccgagaatttctgaaggtagctgtggagcctccttggcccctaaacagggcccctcgccgcgccacacctccagcccacccacccccccgctccagcagcctgggaaactcaccagaacgaggtcccctccgcccctttgtgccagagcaggagctgctgcgttccttgcgcctctgccccccacaccctaccgcccgccttctgttggctgctgaccctgggggcagcccagctcaacgtcgtcgcaccagctcccttccccgctctgaggagagtcgatactaacagctaccctctccctgccctgggagacctggggtgggcagggaacccctccctgagaacctcagacccactcttccattgcatcctgtaggacccagtggaacctgacagagcccataggattccctcttctactttcttagacagcagggatgtcagggtctcaaactgcctaacactttgtagcttttcttaacacaaaagcaccccttctctcctaacttgggctctgaatactttcccaacaggaagtctgatctgttgccagacttcttggttagatggctcatacatttatctagagaagcacactcttgcttgctgtcaaactttagaccaccatggaaggtctaagggcatcctgtgccagggaaactttttaaggaattttatctatgggataaaccccatattccctctagtgtctactggtggctctaatactgctttgtgctgcctgccacacttgccctttgagcctgcgaatggccgctagtgagcaagctctgcttcagagcagtctagttaggtagaacagggacttaccagcttcccaaagggatctactcaccattgccaaactcttcatttccacattttgtgtaggtgtcagggaaccccaaactggtgttgctttggggtctctaaaggagattggctgacaccaccatttcccccagatccagattctctgagggaggttgtttcttgagagtagatccagagtgtcaaggatctgttagatcctggaatcccttcttgcatccatccctccctggtagctaggtcccgatatactcctgtcttgtgagattgtcgagatgagatgggggaccactcttcctctgtccttcctctctcctttcctccatagcaaggacgaccttccctgctccatgcccagagtatagctagatcccttcccctccctaccctctgaatgtgtgctagatcaggtgccccactgtgtttcctgaaatccttgggagccggatctccccatctcccctactcactcttcccttttcttctctcagtgttgtctgaataaagtgtgaaatcttttgtgttttctaaattgacattttcaatgaaaaaaagaatcacaaaaaaaaaa

SEQ ID NO: 89154 - DNA, 2611 bp, Artificial Sequence
  derived and/or modified sequence
gaagtgacgtcgtgtggggcgggtccgaccgcgcacaatgggccatggagttcccgttcgatgtggacgcgctgttcccggagcggatcacggtgctggaccagcacctgaggcccccagcccgccgacccggaaccacaacgccggcccgtgttgatctacagcagcaaattatgaccattatagatgaactgggcaaggcttctgccaaggcccagaatctttccgctcctatcactagtgcatcaaggatgcagagtaaccgccatgttgtttatattctcaaagacagttcagcccgaccggctggaaaaggagccattattggtttcatcaaagttggatacaagaagctctttgtactggatgatcgtgaggctcataatgaggtagaaccactttgcatcctggacttttacatccatgagtctgtgcaacgccatggccatgggcgagaactcttccagtatatgttgcagaaggagcgagtggaaccgcaccaactggcaattgaccgaccctcacagaagctgctgaaattcctgaataagcactacaatctggagaccacagtcccacaggtgaacaactttgtgatctttgaaggcttctttgcccatcaacatcctccagcaaggaagctgccacccaagagagcagagggagacatcaagccatactcctctagtgaccgagaatttctgaaggtagctgtggagcctccttggcccctaaacagggcccctcgccgcgccacacctccagcccacccacccccccgctccagcagcctgggaaactcaccagaacgaggtcccctccgcccctttgtgccagagcaggagctgctgcgttccttgcgcctctgccccccacaccctaccgcccgccttctgttggctgctgaccctgggggcagcccagctcaacgtcgtcgcaccaggtaataggagttgaagggctaaggagcctcacagctataaaagaggatgttagaaatggcaaagggcaatttgaatccatcagagagatggatcaataagatgggtggcttggggggggtcctgaaacctttcaagaaaaatatttgtgcaagtgatctgggaaaaaaatgcagtgaaggagcagaataggaccttatatggagcctagggaccctggctttaatgtgagagttatgtggaatggtaggaagaacaccgagatccatcgagttgggggaacagagccttctaagattgggaaaatcttcgcttaatacttgctggggaaggggcagtgtctgacagagagtgggaagccactggcttgtgtgccaagagtccatcgcagcaggcagggagtgggcatttcctttatttctctccctttctcttcacctctgacttctctgtttttctctcccccgccccccgccatttcccatctcccttcctcccatccataacatccttccacagctcccttccccgctctgaggagagtcgatactaacagctaccctctccctgccctgggagacctggggtgggcagggaacccctccctgagaacctcagacccactcttccattgcatcctgtaggacccagtggaacctgacagagcccataggattccctcttctactttcttagacagcagggatgtcagggtctcaaactgcctaacactttgtagcttttcttaacacaaaagcaccccttctctcctaacttgggctctgaatactttcccaacaggaagtctgatctgttgccagacttcttggttagatggctcatacatttatctagagaagcacactcttgcttgctgtcaaactttagaacaccatggaaggtctaagggcatcctgtgccagggaaactttttaaggaattttatctatgggataaaccccatattccctctagtgtctactggtggctctaatactgctttgtgctgcctgccacacttgccctttgagcctgcgaatggccgctagtgagcaagctctgcttcagagcagtctagttaggtagaacagggacttaccagcttcccaaagggatctactcaccattgccaaactcttcatttccacattttgtgtaggtgtcagggaaccccaaactggtgttgctttggggtctctaaaggagattggctgacaccaccatttcccccagatccagattctctgagggaggttgtttcttgagagtagatccagagtgtcaaggatctgttagatcctggaatcccttcttgcatccatccctccctggtagctaggtcccgatatactcctgtcttgtgagattgtcgagatgagatgggggaccactcttcctctgtccttcctctctcctttcctccatagcaaggacgaccttccctgctccatgcccagagtatagctagatcccttcccctccctaccctctgaatgtgtgctagatcaggtgccccactgtgtttcctgaaatccttgggagccggatctccccatctcccctactcactcttcccttttcttctctcagtgttgtctgaataaagtgtgaaatcttttgtgttttctaaattgacattttcaatgaaaaaaagaatcacaaaaaaaaaa

SEQ ID NO: 89155 - DNA, 2061 bp, Artificial Sequence
  derived and/or modified sequence
cacaatgggccatggagttcccgttcgatgtggacgcgctgttcccggagcggatcacggtgctggaccagcacctgaggcccccagcccgccgacccggaaccacaacgccggcccgtgttgatctacagcagcaaattatgaccattatagatgaactgggcaaggcttctgccaaggcccagaatctttccgctcctatcactagtgcatcaaggatgcagagtaaccgccatgttgtttatattctcaaagacagttcagcccgaccggctggaaaaggagccattattggtttcatcaaagttggatacaagaagctctttgtactggatgatcgtgaggctcataatgaggtagaaccactttgcatcctggacttttacatccatgagtctgtgcaacgccatggccatgggcgagaactcttccagtatatgttgcagaaggagcgagtggaaccgcaccaactggcaattgaccgaccctcacagaagctgctgaaattcctgaataagcactacaatctggagaccacagtcccacaggtgaacaactttgtgatctttgaaggcttctttgcccatcaacatcctccagcaaggaagctgccacccaagagagcagagggagacatcaagccatactcctctagtgaccgagaatttctgaaggtagctgtggagcctccttggcccctaaacagggcccctcgccgcgccacacctccagcccacccacccccccgctccagcagcctgggaaactcaccagaacgaggtcccctccgcccctttgtgccagagcaggagctgctgcgttccttgcgcctctgccccccacaccctaccgcccgccttctgttggctgctgaccctgggggcagcccagctcaacgtcgtcgcaccagctcccttccccgctctgaggagagtcgatactaacagctaccctctccctgccctgggagacctggggtgggcagggaacccctccctgagaacctcagacccactcttccattgcatcctgtaggacccagtggaacctgacagagcccataggattccctcttctactttcttagacagcagggatgtcagggtctcaaactgcctaacactttgtagcttttcttaacacaaaagcaccccttctctcctaacttgggctctgaatactttcccaacaggaagtctgatctgttgccagacttcttggttagatggctcatacatttatctagagaagcacactcttgcttgctgtcaaactttagaacaccatggaaggtctaagggcatcctgtgccagggaaactttttaaggaattttatctatgggataaaccccatattccctctagtgtctactggtggctctaatactgctttgtgctgcctgccacacttgccctttgagcctgcgaatggccgctagtgagcaagctctgcttcagagcagtctagttaggtagaacagggacttaccagcttcccaaagggatctactcaccattgccaaactcttcatttccacattttgtgtaggtgtcagggaaccccaaactggtgttgctttggggtctctaaaggagattggctgacaccaccatttcccccagatccagattctctgagggaggttgtttcttgagagtagatccagagtgtcaaggatctgttagatcctggaatcccttcttgcatccatccctccctggtagctaggtcccgatatactcctgtcttgtgagattgtcgagatgagatgggggaccactcttcctctgtccttcctctctcctttcctccatagcaaggacgaccttccctgctccatgcccagagtatagctagatcccttcccctccctaccctctgaatgtgtgctagatcaggtgccccactgtgtttcctgaaatccttgggagccggatctccccatctcccctactcactcttcccttttcttctctcagtgttgtctgaataaagtgtgaaatcttttgtgttttctaaattgacattttcaatgaaaaaaagaatcacaaaaaaaaaa

SEQ ID NO: 89156 - DNA, 903 bp, Artificial Sequence
  derived and/or modified sequence
atggagttcccattcgatgtagatgccctctttcccgaacggatcaccgtcttggatcagcacctgcgtcctcccgctcgaagacccggcaccacgacccccgcgcgcgtggatctgcaacaacagattatgaccattatcgatgaactgggtaaggcaagtgcaaaggcacagaacctttccgctcctatcacttcagcaagtcgaatgcagtccaatcgacacgtggtatacatacttaaggatagctccgccagacctgctggaaagggagctatcatcggattcatcaaggtcggttacaagaaactgtttgtcctagacgatcgagaggcacacaacgaggttgagcccttatgtattctggatttctacatccacgaatctgtccagcgtcatggacacggtagagaattattccagtacatgctgcagaaagagagggtggagcctcaccagctagccattgatcggccctcacagaaactcctcaaattcttgaacaagcactataacttagagaccactgttccgcaggtgaacaacttcgtaatctttgaggggttctttgctcaccaacatccacccgccagaaaattacctccaaaaagggcagaaggggatattaaaccgtatagttcctcagaccgcgagttccttaaggtcgccgtggagccaccttggcccctgaatagagctcctaggcgagccacacccccagctcatccccccccccgatcttcaagcctcggtaattctcccgaaagaggcccactcaggcccttcgtgcccgagcaagaactgctgaggtctctgagactgtgccctccacatccaacagcacgtctgctgttggccgccgaccccggcggaagccctgcacagcgcagacgcacgagatag

SEQ ID NO: 89157 - DNA, 933 bp, Artificial Sequence
  derived and/or modified sequence
atggagttcccttttgacgtcgacgctctttttcctgaacggattacggtgctcgaccaacacctgcgacctccagcccggcgcccgggaacgactactcctgctagggtcgacctgcagcagcagattatgactattatagatgaattaggaaaagcctccgcaaaggctcagaacttatccgctcccatcacctccgcctcacgcatgcagtccaaccgccatgtggtgtacatcctgaaggacagttcggcacgacccgcggggaagggagctatcatcggctttatcaaggtgggctacaagaaactgttcgtgctggatgaccgggaggcccacaatgaggtcgaacccctgtgtattctggacttttacattcatgaatccgtccagcggcacggacacggtcgcgaactgttccagtacatgttacagaaagaaagggtcgagccgcatcagctggcgatagaccgtcccagccaaaagctcctcaaatttctgaataaacattataacctggaaaccaccgtgccgcaggttaataattttgtgatttttgagggattcttcgctcatcagcacccccctgctagaaagctgccacctaaaagggccgagggcgacattaagccgtactcctccagcgatagagaattcctaaaggtggccgttgagcctccctggcccctcaatagagccccccgtcgtgctacaccgcctgcccatccaccacctcggtctagttccttaggtaactcccccgaacgcggacctctgcgccccttcgtgcccgagcaggagctcctgagatccttgcgcctctgcccacctcacccaactgctaggctactccttgcggccgacccgggaggatcaccagcccagagaaggcgaacgtcatccctgcccaggagcgaggaatccaggtactag

SEQ ID NO: 89158 - DNA, 903 bp, Artificial Sequence
  derived and/or modified sequence
atggagtttccttttgacgtcgatgctcttttcccagaacgaatcactgtgctcgaccagcacttgcgccctcccgcccgcagaccagggactacaacaccggcccgcgtggacttgcagcagcagatcatgactatcatcgacgagctcggaaaggcctccgccaaagcccagaaccttagtgcgcctatcacgagcgcttcacgcatgcaaagtaaccgccacgtggtttacatcctgaaggacagttcagcacgacctgcagggaagggggcaatcatcgggtttatcaaagtaggatataagaaactgtttgtgctggacgatcgcgaagcacataatgaagtagaacctctgtgcatcctagatttctacattcatgaaagtgtgcaacgccatggacatggtcgagagttgttccagtacatgttacagaaagaacgtgttgagccacatcagctcgccattgatcgaccatcacagaagttgctcaagttcctaaacaaacactacaaccttgagaccaccgtgccccaggtgaacaatttcgttatcttcgagggcttcttcgctcaccagcacccacctgctaggaagctacccccaaagcgagcagagggggacattaaaccttacagctcatcggacagggagtttcttaaggtggccgtggagcccccatggccactcaatcgtgctccgagaagggccactcctccggcgcacccgccaccgcggtccagctccttgggcaactcgccagaacgggggcctcttagaccattcgtgcccgagcaagaattactgaggagtctgcggctgtgccccccccaccctaccgcccggctgctgttggcggccgatcccggcgggagccccgcacaaagaaggcgaacccggtag

SEQ ID NO: 89159 - DNA, 933 bp, Artificial Sequence
  derived and/or modified sequence
atggagtttccatttgacgtagatgctctgtttcccgagcgtattacggtgttagaccaacaccttaggccgcctgcgcggaggccaggtacaaccacccccgcccgtgtggacctgcagcagcagattatgactattatcgatgagctaggcaaggccagtgccaaggctcagaacttgtccgcacccattacttctgcctcacggatgcaaagcaaccgacatgtcgtgtatatcttgaaggactcttctgcccggcccgccgggaaaggggccattattggctttatcaaggtgggatataaaaaactttttgtgctcgacgatagggaggctcacaacgaagtggagccactgtgcatactggacttctacatccacgaaagcgtgcagaggcacggacatggtagagaactgttccagtacatgttgcagaaggagcgggtagagcctcaccagctggcgatcgatagacccagtcaaaagttgttgaagttcttgaacaaacactacaacctggaaaccacagtaccccaggtcaacaattttgtcattttcgaaggcttctttgcacatcagcaccctccggccagaaagctgccccccaagcgggccgagggagatataaagccatactcgtcctctgaccgtgaattcctgaaagtcgctgtggaaccaccatggcctctgaacagggcccccaggagggctaccccacccgcacatcctcccccaaggagcagcagccttggtaactcaccagaaagaggaccacttaggccatttgtcccagaacaggagttgctgagaagcctccgcctatgtccccctcaccccaccgctagattgctgctcgcagctgaccctggggggtcacccgcacagcgacgcaggacatcctcccttccccgctccgaggaatcgagatactag

SEQ ID NO: 89160 - DNA, 903 bp, Artificial Sequence
  derived and/or modified sequence
atggagtttccctttgacgtggacgcacttttccccgagcgtataacagtcctggaccaacatctgcgcccaccagcgcgtcggccagggaccaccacccccgcgagagttgacctccagcagcagatcatgaccataatcgatgaattggggaaagcttccgcgaaagcccagaacctgagcgcccctatcacctccgcatccagaatgcagtccaatcggcacgtcgtctacattctgaaggactcctcagcccggccggcaggaaagggtgctatcattgggtttatcaaggtgggatacaagaagctctttgtactggatgaccgcgaggctcacaatgaggtcgaaccactctgtatcctcgacttctacatccatgaaagtgtgcagagacacggtcacggacgcgagctgtttcagtacatgctgcagaaggagcgtgtggaaccacatcagcttgccatcgatagaccaagccagaagttactcaagttcctgaataaacattataacctggagacaacagtaccccaggtgaacaattttgtcatcttcgaggggttcttcgcccaccaacacccgcctgctcgaaaattgcccccaaaaagagcggaaggggatatcaagccttactcgagctctgacagagagtttctgaaagttgccgtggagcccccttggccccttaatcgtgcgcccagaagggctaccccccccgctcaccctcctccgcgatcctctagtttggggaattcacctgaacggggaccgctgcgcccctttgtacctgaacaggagctgctgaggtccctgcggctgtgtccccctcacccaacggcgcggctcctgctggccgcagatcctggaggttccccggcccagaggcgccgtacaaggtag

SEQ ID NO: 89161 - DNA, 903 bp, Artificial Sequence
  derived and/or modified sequence
atggagtttccattcgacgtcgatgctctttttcccgaacggattaccgtgttagatcagcatttacggcccccagcacgcagaccgggaaccacgacaccagcccgcgttgacctccagcaacaaatcatgacaataatcgacgaactcggtaaagccagcgctaaagcccagaatctctctgccccaattaccagcgcatctaggatgcagtccaatcgccacgtggtttatatcctgaaggatagttcggcacgacccgctggtaagggagccattataggcttcatcaaggttggctataaaaagttgttcgtgcttgacgatagggaggcacacaatgaagtggaaccgctatgtatcctcgatttctatatacacgaatcagtgcaacgccacggccacggccgggaattgtttcagtatatgttgcagaaagagagggttgagccccatcagttggctattgatagacctagtcaaaaactcctcaaattcctgaacaaacactacaacctggaaacgaccgtgccacaggtgaacaatttcgtgatttttgaagggttctttgcacatcagcatccaccagcaaggaagctaccacctaagagggctgaaggggatataaagccttactcctcatctgatagggaattcttgaaggtggcggtggagcctccctggcctctcaatagggcaccgcgtcgtgccaccccacctgcccacccacccccacgaagctctagtttaggcaattcgcccgaacgaggtccgctacggccgtttgtgccggaacaggagctgctgcgctccctgagactgtgtcccccacatcccacagcgcggctgctcttggcagctgaccctggcggaagccctgcccagaggaggagaacaagatag

SEQ ID NO: 89162 - DNA, 903 bp, Artificial Sequence
  derived and/or modified sequence
atggaattccctttcgacgtcgacgccttgtttcctgagaggattaccgtccttgaccagcacctgcgcccccctgcccgacgcccgggcactacaaccccagctagagtggacttacagcagcagattatgaccattatcgatgaattgggcaaggcttcagcaaaagcccaaaatctaagcgctcccatcacatctgccagcagaatgcagagcaaccgccatgtagtgtatatcctgaaggatagttctgctcgccctgctggaaagggtgctatcattggctttatcaaggtgggttacaagaagctgttcgtgcttgatgacagagaagctcataatgaagtagagcctttatgcatccttgacttctatattcacgagtcagtgcaaaggcatggacatggtcgggagctgtttcagtacatgctccagaaagaacgcgtcgagcctcatcaactcgccattgacaggcccagccaaaaactgctcaagttccttaacaagcattataatttagaaactaccgttcctcaggtcaacaattttgttatcttcgagggattcttcgctcatcagcatccacctgcacgcaagttgcctcccaaacgggccgagggtgacatcaagccatactcctcatcagaccgggagttcctcaaggtagctgtggagcctccatggccactgaatagggcccctcgccgggcgactcctccggctcacccccccccccgctcctcatccctggggaattccccggagcggggacctctgagaccatttgtccccgaacaagaactcctccgaagtctgaggctgtgccccccccaccccactgcaaggctgctgcttgctgctgatccgggaggatcaccggcccagagaaggaggaccagatag

SEQ ID NO: 89163 - DNA, 933 bp, Artificial Sequence
  derived and/or modified sequence
atggagttcccgtttgacgtcgatgctctatttcccgagcgaattacagttctggaccagcacctccggcctccggctcggcggcctgggactacgacacccgctagagtggatttacagcaacaaataatgaccatcatcgacgagctgggaaaggcctcagccaaggctcagaaccttagcgctcccatcacaagtgcatcacgtatgcagtccaatcgacacgtggtgtatatcttaaaagacagcagcgctcgaccagccggcaaaggagccatcattggctttattaaggtgggttataagaagctgttcgtactcgacgaccgagaagcacacaacgaagttgaacccctgtgcatcctggacttctatatccatgagtcagtccagagacatggccacggtagagaattgttccagtatatgctgcagaaggagagggttgagccgcatcagttagccatcgatcgaccctcccagaagttgctgaagttcctgaataagcattacaatcttgagaccaccgtcccacaagtgaataactttgtgatattcgaaggcttctttgcccatcaacaccccccagcacggaagctgccacccaagagggccgagggcgatattaagccttactcctccagcgaccgagagttcctcaaagtggcagtggagccgccatggccgcttaatcgtgcccccagacgggctactcctcctgcacacccaccgcctcgctcctcatcgctgggtaatagtcctgaaagaggccctctcaggcctttcgtccctgaacaggagctgcttcgttccctcaggctctgccccccgcacccgaccgctaggctcctcctcgctgctgatccagggggcagtccagcgcagcgaaggagaacttcctcactgcctcgatccgaggagagcaggtattag

SEQ ID NO: 89164 - DNA, 933 bp, Artificial Sequence
  derived and/or modified sequence
atggaatttccatttgacgtggatgccttgttccctgagcggatcaccgtgctggaccagcacctgagaccccctgcccgtagacccggcaccaccacccccgcacgtgtcgatctgcagcagcagattatgaccatcattgacgaactaggaaaggcgtctgcgaaggctcagaatctctcagcccccatcaccagtgccagcagaatgcagtccaataggcacgtggtatacattctcaaggattcttcggccagacccgctggaaagggggccatcatcggctttatcaaagtgggctacaagaagcttttcgtcctcgacgacagggaagcccataatgaggtagaacccctgtgtattctcgacttttatattcacgagtcagtgcagagacacggccacgggagagagctctttcagtacatgcttcagaaggaaagggttgagccccatcagttagcaatcgaccgcccttcccagaagcttctaaagtttcttaacaaacactacaatctggagactaccgttcctcaagttaacaactttgttatcttcgaggggttttttgcccatcagcacccccctgccaggaagctgcccccaaaaagagcggagggagacattaagccatattctagctcagacagagaattcctgaaagttgccgtggaaccaccgtggcctctgaatcgcgctcctcgcagagccactccacctgctcacccaccacccagaagtagtagcctgggaaacagccctgaaaggggccctctgcgacccttcgtgccagaacaggagctgctcagatctctgcgcctgtgtcctcctcacccaaccgccaggttgctgctcgccgctgaccctggtgggtccccggcacagcgacggagaactagtagtttgccgaggagcgaagagtctcggtattag

SEQ ID NO: 89165 - DNA, 903 bp, Artificial Sequence
  derived and/or modified sequence
atggagttccccttcgatgtggacgcactgttcccagagagaattacagtcctggaccagcaccttcgcccacccgctcgcagacctggtacgaccacaccggctcgggtcgacctgcagcagcaaatcatgacaatcatcgatgaactggggaaggccagcgccaaggcgcaaaacctctccgctcctatcacttccgcatctcgaatgcagtccaatagacatgtggtttatattctcaaggattccagcgccagacctgcgggcaagggcgccatcatcggcttcatcaaagtgggttacaagaagctcttcgtgctcgacgaccgagaagcacacaatgaagtagagccactatgcatcctggatttttacattcacgaaagcgttcagaggcacggacacggcagagaactattccagtatatgctgcagaaagagcgagtcgagccccaccagctggccatcgaccggcccagccagaagttactcaaattcttgaacaaacactacaatctggagacaacggtacctcaagtaaacaattttgtgatatttgagggcttttttgcgcatcaacaccctcctgctagaaagctgccacctaaacgggctgagggggatattaaaccatacagcagctcagatagagagttcctgaaggtggctgtggagcctccctggcctctgaaccgagccccacgccgcgctacgccccctgcacaccccccccccaggtcgagctccctggggaactccccggagagaggtcctcttcgaccttttgtgcccgagcaagagctgctaagatccctgcggctctgccctcctcatcctaccgccaggctgctgctcgctgccgaccctggaggaagccctgcccagcggaggcgcaccagatag

SEQ ID NO: 89166 - DNA, 933 bp, Artificial Sequence
  derived and/or modified sequence
atggagttcccattcgacgtcgacgccctgttccccgagcgtatcactgtgctcgatcaacacctgaggcctcctgccagaaggccaggaaccaccacacctgctagagtggacttgcagcagcagatcatgacaattatcgacgaactgggcaaagcttcagcaaaagcacagaatctgtctgcacctattacctcagcctctcggatgcagtcaaatcggcacgtggtttatatattgaaggactcaagtgctcgccccgcagggaagggggctatcattggttttattaaagttgggtacaagaagctgttcgttttggatgatcgcgaagcacacaatgaggtcgagcctctgtgcatcctggatttctacatacacgagagcgtacaacgtcacggacatggaagagagctgttccagtatatgttgcagaaagagcgggtagagccccaccagctagcaattgatcgacctagtcagaaactgttgaaattcctgaacaagcactataatttagagacaaccgtgcctcaggttaataattttgtaatatttgaggggttctttgctcaccagcatccgccggctagaaagctccctccaaaacgcgccgagggagacatcaagccgtactcatcgtccgaccgggagttcctgaaagtggccgttgaaccaccttggcccttaaatcgagcacccagacgcgccactcctcctgcccacccccctccccgctccagtagtcttggcaactctcccgaaaggggcccgctgaggccctttgtcccagaacaggagctgttacgcagtctgcgactctgtcccccacatcctaccgcgcggctgctgctggctgccgaccctggcgggagtccagcccagcggaggcggacaagctctctcccccgctctgaggaaagccgctactag

SEQ ID NO: 89167 - DNA, 933 bp, Artificial Sequence
  derived and/or modified sequence
atggagttcccctttgatgtagatgccctgtttccagaaaggattaccgtgctcgatcagcatctccgcccccccgccagacggcccgggaccactacgccagcccgggttgatctgcagcagcagatcatgactatcatagatgagcttggtaaagcctccgctaaggcccagaacctgagtgcccccattaccagcgcctctcggatgcagagtaaccgccacgtggtttacatccttaaggattcttcggccagacctgccggaaagggagctattattggttttatcaaagtagggtataaaaagctcttcgtactggacgacagggaagcccacaacgaggttgagcccctgtgcattctggatttttacattcacgaatctgttcagcggcatggacatggccgggagctgtttcagtacatgttacagaaggagcgggtcgaaccccaccagctagccatcgatcggccatctcaaaagctgcttaagttcttaaataagcactataatttagaaactacggtgccccaggtcaacaactttgtcatctttgaggggttctttgcccaccagcacccccctgcacgtaagttgccacctaaacgagctgagggcgacatcaagccctacagtagctcggatagggagttcctgaaagtggcagtggagccaccatggccgttaaaccgagcgccaagacgcgccacccctcccgcgcatccgcctcctcggtctagctctttgggcaattccccagagcgcggccctttgcggcccttcgtgccagagcaggagctcctgcgaagtctccgcttgtgccctccccacccaaccgctagattgctgctcgctgccgaccccggagggagcccagcgcaacgtcgtcggaccagcagccttcctaggtccgaagagagtagatattag

SEQ ID NO: 89168 - DNA, 903 bp, Artificial Sequence
  derived and/or modified sequence
atggagttcccctttgacgtcgacgccctcttccctgaaagaatcacagtacttgatcagcatctacgccctcccgctcgacgccccgggacaacaaccccagccagggtggacctgcagcagcagataatgaccattatcgacgagctcgggaaggcctctgcaaaagcccagaatctttctgctcctattacttctgcaagtcggatgcagtccaaccgccacgtcgtgtacatactgaaagatagcagcgcaaggcctgctggcaagggagccattatcggattcattaaggtgggatataagaaactctttgtactggatgatagggaagctcataacgaagttgaacctttgtgcattctggacttttatattcacgaatcagtgcagcgacatggacacggccgagaactgtttcagtatatgctccagaaggaacgtgtggagccccatcagctggccattgatcgcccctcccagaagctccttaagttcctgaacaagcactacaatttggagacaacagtacctcaggttaataattttgtcatctttgaaggtttcttcgcccatcaacaccctccggcccgaaagcttccccctaaaagagctgaaggagacataaaaccatactcctcctctgatagggagttcctcaaagtggctgtggaaccgccttggcccctgaacagggccccacgtcgagcaaccccgcctgcacaccctccaccgcgctcttcatctctgggaaactcccccgagcgggggcctctcagaccatttgtgccagaacaggagctgctgagaagcctgcgcctctgtcctccccaccctacagccagactgctgcttgctgctgatcctggcgggtcaccagctcagagaaggcgaacacggtag

SEQ ID NO: 89169 - DNA, 933 bp, Artificial Sequence
  derived and/or modified sequence
atggagtttccatttgacgttgacgcactcttcccggaacgcatcaccgtcctagaccagcacctccgcccccctgctaggcgacccggcacgaccacccccgccagggtggacctccaacagcagattatgacaataatcgatgagttgggcaaggcttctgctaaggcccaaaatctgtcagcaccaattaccagtgcctctaggatgcagtccaatcgccatgtggtgtacattctaaaggactctagcgcgcgcccagctggaaagggcgccatcattgggttcattaaggttggttacaagaaacttttcgtgcttgacgatcgagaggcacacaatgaagtggagcccctgtgcatcttagatttttacattcacgaatccgtgcagaggcacggccatggtagggagctctttcagtatatgctacagaaagagcgagtggaaccgcatcaactagctatcgaccgaccaagccagaagctcttgaaattcctcaataagcactataacttggagactaccgtccctcaagttaataatttcgtgattttcgaagggttctttgctcatcagcatccaccagcccgtaaactgcctccaaaacgagcagaaggggacatcaagccgtatagctcttccgatcgcgagttcctcaaggtggcggttgaacctccttggcccctgaaccgcgcaccaagaagggctacacctcccgcacaccccccaccgcgaagctcctccctcggaaactcccccgagcgtggaccgctacgcccattcgttccagaacaggagctcctgcggagcctgcgcctctgccccccccatcccacagcccggctgctcctggctgcggaccctgggggaagtccggcacagaggagacgcacctccagcctgcccaggtccgaggaatctcgatactag

SEQ ID NO: 89170 - DNA, 2611 bp, Artificial Sequence
  derived and/or modified sequence
gaagtgacgtcgtgtggggcgggtccgaccgcgcacaatgggccatggagttcccgttcgatgtggacgcgctgttcccggagcggatcacggtgctggaccagcacctgaggcccccagcccgccgacccggaaccacaacgccggcccgtgttgatctacagcagcaaattatgaccattatagatgaactgggcaaggcttctgccaaggcccagaatctttccgctcctatcactagtgcatcaaggatgcagagtaaccgccatgttgtttatattctcaaagacagttcagcccgaccggctggaaaaggagccattattggtttcatcaaagttggatacaagaagctctttgtactggatgatcgtgaggctcataatgaggtagaaccactttgcatcctggacttttacatccatgagtctgtgcaacgccatggccatgggcgagaactcttccagtatatgttgcagaaggagcgagtggaaccgcaccaactggcaattgaccgaccctcacagaagctgctgaaattcctgaataagcactacaatctggagaccacagtcccacaggtgaacaactttgtgatctttgaaggcttctttgcccatcaacatcctccagcaaggaagctgccacccaagagagcagagggagacatcaagccatactcctctagtgaccgagaatttctgaaggtagctgtggagcctccttggcccctaaacagggcccctcgccgcgccacacctccagcccacccacccccccgctccagcagcctgggaaactcaccagaacgaggtcccctccgcccctttgtgccagagcaggagctgctgcgttccttgcgcctctgccccccacaccctaccgcccgccttctgttggctgctgaccctgggggcagcccagctcaacgtcgtcgcaccaggtaataggagttgaagggctaaggagcctcacagctataaaagaggatgttagaaatggcaaagggcaatttgaatccatcagagagatggatcaataagatgggtggcttggggggggtcctgaaacctttcaagaaaaatatttgtgcaagtgatctgggaaaaaaatgcagtgaaggagcagaataggaccttatatggagcctagggaccctggctttaatgtgagagttatgtggaatggtaggaagaacaccgagatccatcgagttgggggaacagagccttctaagattgggaaaatcttcgcttaatacttgctggggaaggggcagtgtctgacagagagtgggaagccactggcttgtgtgccaagagtccatcgcagcaggcagggagtgggcatttcctttatttctctccctttctcttcacctctgacttctctgtttttctctcccccgccccccgccatttcccatctcccttcctcccatccataacatccttccacagctcccttccccgctctgaggagagtcgatactaacagctaccctatccctgccctgggagacctggggtgggcagggaacccctccctgagaacctcagacccactcttccattgcatcctgtaggacccagtggaacctgacagagcccataggattccctcttctactttcttagacagcagggatgtcagggtctcaaactgcctaacactttgtagcttttcttaacacaaaagcaccccttctctcctaacttgggctctgaatactttcccaacaggaagtctgatctgttgccagacttcttggttagatggctcatacatttatctagagaagcacactcttgcttgctgtcaaactttagaacaccatggaaggtctaagggcatcctgtgccagggaaactttttaaggaattttatctatgggataaaccccatattccctctagtgtctactggtggctctaatactgctttgtgctgcctgccacacttgccctttgagcctgcgaatggccgctagtgagcaagctctgcttcagagcagtctagttaggtagaacagggacttaccagcttcccaaagggatctactcaccattgccaaactcttcatttccacattttgtgtaggtgtcagggaaccccaaactggtgttgctttggggtctctaaaggagattggctgacaccaccatttcccccagatccagattctctgagggaggttgtttcttgagagtagatccagagtgtcaaggatctgttagatcctggaatcccttcttgcatccatccctccctggtagctaggtcccgatatactcctgtcttgtgagattgtcgagatgagatgggggaccactcttcctctgtccttcctctctcctttcctccatagcaaggacgaccttccctgctccatgcccagagtatagctagatcccttcccctccctaccctctgaatgtgtgctagatcaggtgccccactgtgtttcctgaaatccttgggagccggatctccccatctcccctactcactcttcccttttcttctctcagtgttgtctgaataaagtgtgaaatcttttgtgttttctaaattgacattttcaatgaaaaaaagaatcacaaaaaaaaaa

SEQ ID NO: 89171 - DNA, 2061 bp, Artificial Sequence
  derived and/or modified sequence
cacaatgggccatggagttcccgttcgatgtggacgcgctgttcccggagcggatcacggtgctggaccagcacctgaggcccccagcccgccgacccggaaccacaacgccggcccgtgttgatctacagcagcaaattatgaccattatagatgaactgggcaaggcttctgccaaggcccagaatctttccgctcctatcactagtgcatcaaggatgcagagtaaccgccatgttgtttatattctcaaagacagttcagcccgaccggctggaaaaggagccattattggtttcatcaaagttggatacaagaagctctttgtactggatgatcgtgaggctcataatgaggtagaaccactttgcatcctggacttttacatccatgagtctgtgcaacgccatggccatgggcgagaactcttccagtatatgttgcagaaggagcgagtggaaccgcaccaactggcaattgaccgaccctcacagaagctgctgaaattcctgaataagcactacaatctggagaccacagtcccacaggtgaacaactttgtgatctttgaaggcttctttgcccatcaacatcctccagcaaggaagctgccacccaagagagcagagggagacatcaagccatactcctctagtgaccgagaatttctgaaggtagctgtggagcctccttggcccctaaacagggcccctcgccgcgccacacctccagcccacccacccccccgctccagcagcctgggaaactcaccagaacgaggtcccctccgcccctttgtgccagagcaggagctgctgcgttccttgcgcctctgccccccacaccctaccgcccgccttctgttggctgctgaccctgggggcagcccagctcaacgtcgtcgcaccagctcccttccccgctctgaggagagtcgatactaacagctaccctatccctgccctgggagacctggggtgggcagggaacccctccctgagaacctcagacccactcttccattgcatcctgtaggacccagtggaacctgacagagcccataggattccctcttctactttcttagacagcagggatgtcagggtctcaaactgcctaacactttgtagcttttcttaacacaaaagcaccccttctctcctaacttgggctctgaatactttcccaacaggaagtctgatctgttgccagacttcttggttagatggctcatacatttatctagagaagcacactcttgcttgctgtcaaactttagaacaccatggaaggtctaagggcatcctgtgccagggaaactttttaaggaattttatctatgggataaaccccatattccctctagtgtctactggtggctctaatactgctttgtgctgcctgccacacttgccctttgagcctgcgaatggccgctagtgagcaagctctgcttcagagcagtctagttaggtagaacagggacttaccagcttcccaaagggatctactcaccattgccaaactcttcatttccacattttgtgtaggtgtcagggaaccccaaactggtgttgctttggggtctctaaaggagattggctgacaccaccatttcccccagatccagattctctgagggaggttgtttcttgagagtagatccagagtgtcaaggatctgttagatcctggaatcccttcttgcatccatccctccctggtagctaggtcccgatatactcctgtcttgtgagattgtcgagatgagatgggggaccactcttcctctgtccttcctctctcctttcctccatagcaaggacgaccttccctgctccatgcccagagtatagctagatcccttcccctccctaccctctgaatgtgtgctagatcaggtgccccactgtgtttcctgaaatccttgggagccggatctccccatctcccctactcactcttcccttttcttctctcagtgttgtctgaataaagtgtgaaatcttttgtgttttctaaattgacattttcaatgaaaaaaagaatcacaaaaaaaaaa

SEQ ID NO: 89172 - DNA, 903 bp, Artificial Sequence
  derived and/or modified sequence
atggagttcccctttgatgtggatgccctcttccctgagcgcatcaccgtgctggaccagcacctgcggcccccagcccggcggcccggcaccaccaccccagcccgggtggacctgcagcagcagatcatgaccatcattgatgagctgggcaaggccagcgccaaggcccagaacctgagcgcccccatcaccagcgccagcaggatgcagagcaacagacatgtggtgtacatcctgaaggacagcagcgcccggcctgctgggaagggggccatcatcggcttcatcaaggtgggctacaagaagctgtttgtgctggatgaccgggaggcccacaatgaggtggagcccctgtgcatcctggacttctacatccatgaatctgtgcagagacatggccacggccgggagctgttccagtacatgctgcagaaggagcgggtggagccccaccagctggccatcgaccggcccagccagaagctgctgaagttcctgaacaagcactacaacctggagaccaccgtgccccaggtgaacaactttgtgatctttgagggcttctttgcccaccagcaccccccagccaggaagctgccccccaagagagctgagggggacatcaagccctacagcagcagtgaccgggagttcctgaaggtggccgtggagcccccctggcccctgaacagagccccccggcgggccaccccaccagcccaccccccacccaggagcagcagcctgggcaacagccctgagcggggccccctgcggccctttgtgcctgagcaggagctgctgcggagcctgcggctgtgccccccccaccccacagcccggctgctgctggccgctgaccccggcggcagccctgcccagaggaggaggaccaggtag

SEQ ID NO: 89173 - DNA, 933 bp, Artificial Sequence
  derived and/or modified sequence
atggagttcccctttgatgtggatgccctcttccctgagcgcatcaccgtgctggaccagcacctgcggcccccagcccggcggcccggcaccaccaccccagcccgggtggacctgcagcagcagatcatgaccatcattgatgagctgggcaaggccagcgccaaggcccagaacctgagcgcccccatcaccagcgccagcaggatgcagagcaacagacatgtggtgtacatcctgaaggacagcagcgcccggcctgctgggaagggggccatcatcggcttcatcaaggtgggctacaagaagctgtttgtgctggatgaccgggaggcccacaatgaggtggagcccctgtgcatcctggacttctacatccatgaatctgtgcagagacatggccacggccgggagctgttccagtacatgctgcagaaggagcgggtggagccccaccagctggccatcgaccggcccagccagaagctgctgaagttcctgaacaagcactacaacctggagaccaccgtgccccaggtgaacaactttgtgatctttgagggcttctttgcccaccagcaccccccagccaggaagctgccccccaagagagctgagggggacatcaagccctacagcagcagtgaccgggagttcctgaaggtggccgtggagcccccctggcccctgaacagagccccccggcgggccaccccaccagcccaccccccacccaggagcagcagcctgggcaacagccctgagcggggccccctgcggccctttgtgcctgagcaggagctgctgcggagcctgcggctgtgccccccccaccccacagcccggctgctgctggccgctgaccccggcggcagccctgcccagaggaggaggaccagcagcctgcccaggtctgaggagagccgctactag

SEQ ID NO: 89174 - DNA, 903 bp, Artificial Sequence
  derived and/or modified sequence
atggagttccccttcgacgtggacgccctgttccccgagcggatcactgttctagaccagcatttaagacctcccgcgagaagaccaggcaccacaaccccagctcgcgtggatctccagcaacaaatcatgactataatagatgaactcggaaaggcttccgccaaggcacagaatctttcagcacctatcacatcggcttcccggatgcaaagcaatcgacatgtcgtatatattctcaaggatagttccgcacggccagcgggcaagggagccatcataggattcattaaggttggctataagaagctcttcgtgctggacgaccgcgaagcccataacgaagtggagcccctttgtattctggacttctacattcacgagagtgtgcagcgccacgggcacggcagggagctttttcagtatatgctgcagaaggaacgcgtagaaccacatcaattggctatagaccgaccatctcagaaactgctgaaatttctcaacaaacactataacttagaaacaaccgttcctcaagttaacaatttcgtcatattcgaaggattctttgcccaccagcacccacctgcacgaaagttacctcctaagagggcggaaggagatatcaagccctactcttctagcgatcgcgagtttctgaaggtagcagtcgaaccaccttggccactgaaccgcgccccaagaagggccacaccccctgcacaccctcccccgcgaagtagcagcctcggcaatagccccgaaagagggccactgcggccattcgtgccagagcaggagcttctgaggtccctgcggttgtgtccaccacatccaaccgcccggctcttgcttgcagcagaccctggaggctccccagcacagaggcgacgaacgcggtag

SEQ ID NO: 89175 - DNA, 933 bp, Artificial Sequence
  derived and/or modified sequence
atggagttccccttcgacgtggacgccctgttccccgagcggatcaccgtcctggaccaacacctgaggcctcctgctcgccgacctggtaccactactcccgcaagagtggacctccagcaacagataatgactataattgacgagctgggaaaagcaagcgccaaagcacagaacctctcagctccaataacctcagcatcgcggatgcagtctaacagacacgtcgtttacatcctgaaggactccagcgctcgacctgctggcaaaggcgccatcatcgggtttattaaagtcggctacaaaaagttgttcgtgctcgacgatagggaagcacacaacgaagtggagcccctttgcatactcgatttttatatacatgaatctgtgcagcgccacggacatggccgcgaattgtttcagtacatgttgcagaaagaaagagtggaaccacatcagctggcaatagacagaccatctcaaaaactcctcaaattcctaaacaagcattataatcttgaaaccacagtgcctcaggtgaacaacttcgtaatctttgagggattctttgctcatcagcatcccccagcgagaaaactgccccccaagagagcggagggcgatattaagccttatagctcaagcgaccgcgagttcctgaaggtggccgtcgagccaccttggcccctcaatcgggctcctcggcgtgctacaccgcccgcacatccccctccccggtcctcttctctcgggaatagtcccgagcgcggccctttgcgaccctttgtcccagagcaagagctgctgaggagtctccgcttatgcccccctcaccctacagccaggcttctccttgctgccgaccccgggggttctccagctcagcgacgtcggacgagcagcctgcctcgctcagaggagagccgctattag

SEQ ID NO: 89176 - DNA, 903 bp, Artificial Sequence
  derived and/or modified sequence
atggagttccccttcgacgtggacgccctgttccccgagcggatcacggtgctggaccaacatcttcgtccccctgcccggcgtcctggaaccacgactcccgcccgcgtggatctgcagcagcaaatcatgaccattatagacgagttaggcaaagcctccgccaaggcacagaacctgagcgcccctatcacctctgcctcaagaatgcagtcgaatcgacacgtggtctacatcctcaaggactcctcagcaaggcctgcaggaaaaggggccataattggctttattaaagttgggtataaaaaactgttcgtactggatgatcgagaggcccacaacgaggtggaaccactttgcatcttagacttttatatccatgaatcagtgcagaggcatggacacggcagagaactgttccagtatatgctccaaaaagagagggtagaacctcaccagctggcaattgaccgccccagccaaaagctcctgaaattcttaaacaaacattataatctcgaaaccacggtcccccaggttaataacttcgtcatttttgaagggttctttgcccaccagcatcctcccgcccgcaagttgcctcccaaaagagccgagggagacattaagccctattcatccagcgatcgcgagtttctgaaagtagctgtggagcctccgtggccattgaatagggccccccgccgtgcgacaccacccgcccatcccccccctagatcctccagtttgggcaattcccctgagagagggccactccgccctttcgtgcccgagcaagagcttctcaggtccctgcggctctgccccccgcaccctactgctaggctcctcctggcagctgaccccggaggttctcccgcacagaggaggcgcacacgctag

SEQ ID NO: 89177 - DNA, 933 bp, Artificial Sequence
  derived and/or modified sequence
atggagttccccttcgacgtggacgccctgttccccgagcggatcacagtgttggaccagcatttgaggcctccagcacggcggcccggcaccaccacaccagctagggtggacctacagcaacagataatgaccatcatcgatgagctaggcaaagcttctgccaaagcccagaatcttagcgcacctatcacctctgcgtcccggatgcaaagcaaccggcacgtggtgtacatccttaaagactcttctgcccgtccagcaggaaaaggggctatcataggcttcattaaggttgggtacaaaaaactgttcgtcctggacgatagggaagcgcataacgaagtagagcccttgtgtattctagatttctacattcacgaatcagtgcagagacacgggcatgggagggagctctttcagtacatgctccaaaaggaacgcgtggagcctcatcaattagccatcgatagaccctctcagaagcttcttaaattcttgaacaaacactacaatttagagaccacggtcccacaggttaataacttcgttatatttgaaggcttttttgcccatcagcaccctccggctcgtaagctaccacccaaacgggccgagggagatatcaagccttactcatctagcgaccgagagtttctgaaagtcgctgtggagccgccttggcctctgaaccgtgccccccgaagagcaaccccacccgctcacccaccacctaggagttcatccctgggcaatagccccgaaaggggaccattgagaccattcgtgccagagcaggagctgttgaggtccctgagactttgccctccgcaccctactgcccgactgttgctggcagccgacccaggtgggagccccgcccagcgacgccgcacatcttcccttccccgctcggaggagtcacgttattag

SEQ ID NO: 89178 - DNA, 903 bp, Artificial Sequence
  derived and/or modified sequence
atggagttccccttcgacgtggacgccctgttccccgagcggatcaccgtgctggaccagcaccttagacctccagcaaggaggccaggcacaacaactcccgcgcgcgtcgatctgcaacagcaaattatgacaatcattgacgaattgggaaaggcgagtgcgaaggcccagaacctctctgcacctatcacctccgcctctcgaatgcaaagcaataggcacgtcgtatatattctgaaagattcaagtgcccgccccgccggtaagggcgccatcattggattcatcaaggtcggctacaagaaactctttgtgctggacgatagagaagcccataacgaggtggagccattgtgcatcctggacttctacatccacgaatcagtacaaaggcacggtcacggacgcgaactgtttcagtatatgctgcagaaggagcgcgtagagccgcaccagttagcgatcgaccgccctagtcagaagctgctcaagtttctaaataagcactacaatctcgaaactaccgtgccccaagtcaacaattttgtgatatttgagggcttcttcgctcaccagcatcctcctgccagaaaactgccaccaaagagagctgaaggagatattaaaccgtactcctctagcgacagggaattcctgaaagtggccgtcgaacctccttggcctctgaacagggcacccaggcgagctactccaccagcccaccctcccccccgatccagcagtctgggaaactcgcccgaaagggggcccctcaggccatttgtgcccgaacaggaattattgaggagtttacggctgtgcccgccacaccctacagcaaggctgctgctggccgctgatccaggcggatcccccgctcagcggagacggacaaggtag

SEQ ID NO: 89179 - DNA, 903 bp, Artificial Sequence
  derived and/or modified sequence
atggagttccccttcgacgtggacgccctgttccccgagcggatcacagtgttggaccaacacctcaggccacctgctcgcaggcccggcacgactacacccgcacgggtcgacttgcaacaacaaatcatgaccattattgacgagttaggaaaggcatccgccaaagcccaaaacctgtcagcgcctatcacctccgcctctcgcatgcagtccaaccggcacgtggtgtacatattaaaggatagcagcgcacggcctgccggtaagggcgcaatcattggattcattaaagtgggttacaagaaactgttcgttttggatgatagagaggctcacaatgaagtcgaaccactgtgcatcctggacttttacattcatgaatcggttcagcgccacggacatggacgcgagctctttcagtatatgctgcaaaaagagcgggtggagcctcaccaacttgcaatagaccgccctagtcaaaaattgctaaaatttctcaacaagcattacaacctagagacaactgtccctcaggtcaacaactttgtcattttcgaaggattcttcgcccatcaacatcctcccgctagaaagctgccgcccaaacgagctgaaggggacatcaagccctacagctcttcagacagagagtttctaaaggttgccgtcgagcccccttggcccctaaacagggcacccagaagagcgacgccccccgctcaccccccaccccggagctcaagccttgggaacagtcccgagaggggcccactgaggcccttcgtgccagaacaggaactccttagaagcttacggttgtgccctcctcatcctacagccaggttgctgctcgctgcagacccagggggaagccccgctcagagaaggaggactcgatag

SEQ ID NO: 89180 - DNA, 903 bp, Artificial Sequence
  derived and/or modified sequence
atggagttccccttcgacgtggacgccctgttccccgagcggatcaccgttctggatcaacatctgagaccgccggcacggaggcctggcaccacaacacctgccagggtcgatctacagcagcaaattatgacaataatcgacgagctgggaaaggccagcgccaaagctcaaaacctgagcgcccctatcacatctgccagccgcatgcagtcaaaccgtcacgtggtttatatcttgaaagacagctccgccaggcctgcaggaaagggggccattattggctttatcaaggttggatataaaaagctgttcgtgcttgacgaccgcgaggcacacaacgaggttgagccactttgtatccttgacttttacattcatgagagtgtgcagaggcacggccatgggagagagctgttccagtatatgctccagaaagagagggtcgagccacaccagttagccatagatagaccctcccaaaaactgctcaaatttcttaacaagcattataatcttgagaccaccgtgccccaggttaacaatttcgttatctttgagggattcttcgctcatcagcacccacccgccaggaagttgccacccaagagagctgagggcgacattaaaccatactcatctagcgaccgcgagtttctaaaggtcgcagtggaaccaccctggccattgaacagggcgccccgacgcgcgacaccacctgcccacccgccgcctagatcaagtagtctcggaaatagccccgaacgcgggcctcttcgcccttttgtcccagagcaagaattgctccgatctctgcgcttatgtcctcctcacccaacggctcgcctgttattggccgcggatccaggcgggtcaccagcccagaggaggaggaccagatag

SEQ ID NO: 89181 - DNA, 933 bp, Artificial Sequence
  derived and/or modified sequence
atggagttccccttcgacgtggacgccctgttccccgagcggatcaccgtactggaccagcatcttaggccacctgcccggaggcccggtactaccacacctgctcgcgtggacctacagcagcagattatgacaataatcgatgaactggggaaggccagcgcgaaagcacagaacctttcagctcctataacaagtgcatcccgcatgcagagcaatcgccatgtcgtttatatcctgaaggattcctccgccagacccgcgggcaagggcgccatcatcggcttcattaaagtcgggtacaaaaaactatttgtgctcgacgacagggaggcacacaatgaagtggaaccgctgtgcatactcgacttctatatccacgagagcgtgcaacgacatgggcacgggagggagcttttccaatacatgttacaaaaggagcgggtggagccccaccaactcgccatcgacagaccaagtcagaaactcctgaaattcctcaataaacactataatctcgaaacgacagtgccccaggtcaataacttcgtaatttttgaggggttttttgcacatcagcatccacctgcaaggaaattgcctcctaaaagagccgaaggcgacattaaaccctacagctcatcagatcgagagttcttgaaggttgccgttgagccgccgtggccccttaaccgtgctcctagaagagccacaccgcctgcccacccgcccccccgatcatccagcctgggtaactcacccgaacgcgggcccttgcgcccctttgtccctgagcaggaactgctcagaagtttgagactctgtccaccccatcctactgcaaggctgctgctagccgcagatcctggtgggtcccctgcccagcggagacgcactagctcccttccccgctcagaggagtctcgctattag

SEQ ID NO: 89182 - DNA, 933 bp, Artificial Sequence
  derived and/or modified sequence
atggagttccccttcgacgtggacgccctgttccccgagcggatcactgtcctggatcaacatctgcgcccacctgcgaggaggcccggaaccacaactccagccagagtcgacctgcagcagcaaattatgacaataattgacgagctcggaaaagcatccgctaaggcacagaacctttccgcaccgattacttctgcctcgaggatgcaaagcaaccgtcacgttgtatatattttaaaagactcaagcgcacgccctgctgggaaaggagctattatcggcttcattaaagtaggatataaaaagctgttcgtcctcgatgacagagaagcacacaacgaagtcgagcctctgtgcattctggacttctacatccatgaaagcgtgcagaggcacggccatgggcgggaattattccagtacatgctccagaaggagagagtcgaaccccatcaactggcaattgaccgccccagccaaaagctattaaaatttctgaacaaacattataacttagagacaactgtgcctcaggttaacaacttcgtgatatttgagggatttttcgctcaccagcatccaccagctcggaagctgccgcccaaaagagcagaaggggacattaagccatactcatcctctgacagggagtttctcaaggtggctgtggaaccaccctggcctttgaatcgcgctcctcgaagggccacaccacctgcccatccaccccctcggagttcatctttggggaattcgcccgaacgaggacccctgcgccctttcgttcctgaacaagagctgctccgcagcctccgtctgtgtccaccccacccgacagcgcgcttgttgttggcggccgaccccggcgggtctcctgcacagagaagaaggacctcatcattacctaggtcagaagagtctaggtactag

SEQ ID NO: 89183 - DNA, 903 bp, Artificial Sequence
  derived and/or modified sequence
atggagttccccttcgacgtggacgccctgttccccgagcggatcacagtgctagaccaacacctcagaccacctgcccggcgtccagggacaacaacacccgctagggtggatctgcaacagcagattatgacaatcatcgatgagctgggaaaggcaagtgcgaaagcccagaacttaagcgcacccataacttctgcctcaagaatgcagtcaaatcgacatgtggtctatatattaaaggactcatctgcccgaccggcaggaaaaggagccatcatagggttcatcaaggtcggatacaagaaactgtttgtattagatgatagagaagcccataacgaggttgaaccgctgtgcatcctcgatttttacattcatgagagtgtacaaaggcacggacacggtagagagctgttccagtatatgttgcagaaggagcgtgtcgagccacaccagcttgccattgatagaccctcccagaaactgctgaagtttctgaataagcactacaatctggagactaccgtgccacaggtgaacaattttgtcatcttcgaaggttttttcgctcatcagcacccaccagcacgaaaattgccaccaaagagagcagagggcgatattaagccttatagttccagcgatcgagaattccttaaagtggccgtggagccaccttggccactcaatagagctccccgccgagccacaccgcctgctcacccgcctcctaggagctcttcactaggcaatagccccgaacgcgggccactgagaccttttgtgcctgagcaggagctgctgcggtctctacgcctctgccctccccacccaaccgcccggctgctgctggctgcagacccagggggcagtccagcacaacggcgacgcacccggtag

SEQ ID NO: 89184 - DNA, 933 bp, Artificial Sequence
  derived and/or modified sequence
atggagttccccttcgacgtggacgccctgttccccgagcggatcactgtgctagaccaacacctgagaccccccgccaggcgccccggcaccactacccccgcccgggtggatctgcaacagcagattatgaccatcatagatgaacttggaaaagccagcgctaaagcccagaatctttccgcccccatcaccagcgcctcccggatgcaatcgaataggcacgtagtgtatatcctaaaggactcctcggctagacccgccgggaagggggctattatcggtttcattaaagtgggttacaagaagctgttcgtcctcgacgatcgagaggctcacaacgaggttgagcccctttgcattctggatttttatatccacgagtctgtacagcgacatgggcatggacgggagctctttcagtacatgctgcaaaaggaaagggtagagccccatcaactggccatcgataggccctcccagaaactactgaagttcctcaataagcactataacctagagaccacagtcccacaggttaataactttgttatcttcgaaggatttttcgcacatcagcatccccctgcccgaaagctgccccctaaacgcgcagagggtgatattaagccttatagcagtagtgacagggaatttctcaaggtggccgtggagcctccttggcctctgaaccgcgctccccgccgagccaccccaccggcccaccctccgcccagatcttcttccctgggcaactctcccgagaggggaccactcaggcccttcgtgccagaacaggaactgctgagaagtcttaggttatgtcctccacaccccacggcccggctgctgctggcagcggatcctggagggagccccgcccagcgacgaaggacctcgtccctgccgcgtagcgaggagagtagatactag

SEQ ID NO: 89185 - DNA, 933 bp, Artificial Sequence
  derived and/or modified sequence
atggagttccccttcgacgtggacgccctgttccccgagcggatcacagtgcttgaccagcacctgcggccacccgcgcggaggcccggaacaactacccccgcccgtgtggacctccagcaacagattatgaccataatcgacgagctcggaaaggcttccgctaaagcccaaaatttaagtgcaccgataacttccgcgagccgaatgcaatctaatcggcatgtggtgtacatccttaaggactcaagcgctaggccggccggaaagggcgccatcatcggttttatcaaggtaggctacaaaaagttgtttgtgctggacgacagggaggcacacaacgaggtggagcctttgtgcatccttgacttttatatacacgaatctgtacagaggcacggacacggccgtgaactgtttcagtacatgctacagaaggaaagggttgagccgcatcagctggctattgatagaccatcccagaagcttctcaaatttctgaataaacactacaaccttgagactactgtaccccaggtgaacaatttcgtcatcttcgaaggattttttgcccaccagcacccacctgcccgaaaattacctcccaagcgcgctgaaggggatataaagccttactcgtcttcagaccgggaatttctgaaggtggcagtggagcctccatggccgctgaacagggcacctcgccgggccactcccccagcccacccccccccccgtagttcgtctctcgggaatagcccagaacgaggaccattgaggccatttgtgccagaacaggagctcctgaggtcactgcgcctctgccccccccacccaacagcccgcctgctgctggccgccgacccagggggctcccccgctcagcgcaggcggactagctctctgccaagaagcgaggagtctcggtactag

SEQ ID NO: 89186 - DNA, 903 bp, Artificial Sequence
  derived and/or modified sequence
atggagttccccttcgacgtggacgccctgttccccgagcggatcactgtcctggatcagcatctgcgtccccctgcccgacgtccagggacaacgacacctgctcgagtggacctgcagcagcagatcatgactattattgatgaactaggcaaggcctccgccaaagctcagaacctgagtgctcccatcacatccgcgtcacgaatgcaatcgaataggcacgttgtatatatcctcaaggactcttcagcccggcccgccggaaaaggagcgataatcgggttcatcaaagttggttacaaaaaactgttcgtcttggacgatcgagaggcccataatgaggttgagcccctgtgcatcctggacttttacatccatgagtccgtgcaaaggcatggtcatgggagggaactatttcagtacatgctgcaaaaggagagggtggagcctcaccaacttgcgatagatcggcctagtcagaaactactgaagtttctgaacaagcactacaacctggagactaccgtgccccaggtcaacaactttgtaatttttgagggatttttcgcgcaccagcatccacccgctaggaagctcccgcccaagcgcgctgagggagatattaaaccctattcttcgtctgatcgagaatttctgaaagtagcagttgagccaccctggcctttgaacagggcaccacggagggcgacgccaccggcccacccaccgccacgcagcagtagccttggaaactcacccgagaggggcccccttcggcctttcgtccctgagcaggaattgctcaggagcctgcggctctgtcccccacacccaactgcccgcttgttactcgccgcagatcctggaggatcccccgcccagcgccgacgcactcgctag

SEQ ID NO: 89187 - DNA, 933 bp, Artificial Sequence
  derived and/or modified sequence
atggagttccccttcgacgtggacgccctgttccccgagcggatcaccgtccttgaccaacacctgaggcccccagcccgccgacctggcactactactccagctagggtagacttgcagcagcagataatgactattatcgacgaactcgggaaagcgtctgcgaaggcacagaaccttagcgctcctatcacaagtgcaagccggatgcagtctaatagacatgtcgtctacattcttaaggattccagcgcaagaccagccggcaaaggtgctatcatcggattcatcaaggtgggatataagaagctttttgtactggatgaccgggaggcgcacaacgaagtggaacctctgtgtatcctggatttctatattcacgagtccgtgcaacgacatggacatggacgagaactgttccaatacatgttgcagaaagagagggtggaaccacatcagctggcaatcgatcgtccaagtcagaagctgctcaagttcctgaacaagcattataatctcgaaactaccgtgcctcaggtgaataatttcgtgattttcgaaggcttctttgctcaccagcatcctccagctcgcaagctccctcctaagcgggcagagggcgacataaagccgtactcctcatccgatcgcgagttcctcaaagtcgctgttgaaccgccctggcccttgaaccgagccccacgtcgtgctacgccaccagcgcatcctccccccaggtctagcagtcttggcaactctccggagaggggcccacttaggcccttcgtgcctgaacaggagttgcttagatcgctcagactgtgccccccccaccccaccgctcgactgctgttggcagccgaccctggcgggtcccccgctcaacgccgccggacatcatccctgcccagatcagaagaatcccgatactag

SEQ ID NO: 89188 - DNA, 903 bp, Artificial Sequence
  derived and/or modified sequence
atggagttccccttcgacgttgacgcattgtttcctgagcgcattaccgtgctagaccagcatcttcgtccgcctgcaagaaggccaggaacgaccaccccagctcgcgtggatttgcagcagcagataatgacgatcattgatgagctgggaaaagcatccgctaaggcccagaatctgtcggccccaattacctccgccagcaggatgcaatctaatcgtcatgtagtgtatattcttaaggatagtagtgcacgtccggcaggaaaaggagccattatcggcttcattaaagtgggatacaagaagctgttcgtactcgacgaccgtgaagcacataacgaggtggagcccctttgtatcttggacttttacatccacgagtctgtgcagagacacggtcatgggagagagcttttccaatatatgctgcaaaaggaacgggttgaaccacatcaactcgccattgaccgccctagtcagaaattactcaagttcctgaacaaacattacaacttagagaccacggtcccgcaggtcaacaatttcgtcatcttcgaagggttttttgcccaccaacatcccccagccaggaaactcccccctaagagagcggagggcgacattaagccatacagcagcagcgacagggagttcctcaaggttgccgtcgagcccccttggcctctaaaccgtgccccaagacgtgccacccctccagcccatccaccccctcgatccagtagtcttgggaactcccctgagcggggtcccctgcgaccgttcgtgccggagcaagaactcttgcgcagcctgcgtctttgtccaccccacccaaccgcacgactccttctggccgctgatccgggaggctctccggctcagagacgcaggactcgatag

SEQ ID NO: 89189 - DNA, 933 bp, Artificial Sequence
  derived and/or modified sequence
atggaattcccattcgacgttgacgctttgttcccagaacggatcacagtgctggatcagcatctgcggccacccgcacgccgtccaggcacaactacccccgcacgtgtggatttgcagcaacagatcatgaccatcattgatgagttgggaaaggctagcgccaaggcacagaatctctccgcacctattactagcgcctccaggatgcagtccaataggcatgttgtgtacatactgaaggacagttccgcgagacctgctggaaagggtgcaatcatcgggttcattaaagtcggctacaagaagctgttcgtgttagacgatagggaggctcacaatgaagtggagcccttatgcatattagatttttatatccatgagagcgtgcagcgccacggtcacggcagggagctcttccagtacatgcttcagaaggaaagagtagaaccccaccagcttgctattgatagaccctcacagaaactactgaagtttctcaacaaacattacaacctggaaacaactgtgccccaggtgaacaactttgtcattttcgagggattctttgctcaccaacatccgccagctagaaagcttccgcctaaacgcgctgagggcgatataaagccttatagctcaagtgacagggagttcctcaaagtcgccgtagagccaccttggccacttaacagggccccaaggagagcaacgcccccagcgcacccaccccctcggagctcctccctgggcaactccccagaaagaggaccactgcggccttttgtgccagaacaggagcttttgcgcagtctgaggctgtgcccccctcaccccactgccagattactcttggccgctgatcctggtggatcacctgcccaaaggcgacggacctcaagcttacctagatcggaagaaagtagatactag

SEQ ID NO: 89190 - DNA, 903 bp, Artificial Sequence
  derived and/or modified sequence
atggagttccccttcgatgtggatgcgctcttcccggaacggatcacagtgctggaccagcatctgcgtccaccagccaggcgcccaggcactactactcccgcaagagttgacctccagcagcagatcatgactataatagatgaactggggaaggccagtgccaaggcacagaacctttctgcgcctatcacatctgctagccgaatgcagagcaacaggcacgtggtatatatcttgaaggatagcagcgctcgcccagctggaaaaggggcaattattgggtttattaaggttggctacaagaaactgtttgttttagatgatcgcgaagcccacaacgaagtggagcccctgtgcatcctcgatttttatattcacgaatccgttcagaggcatggccacggacgtgaactgttccagtacatgttgcagaaggagagggtcgagccccaccagttggctatcgatagaccaagccaaaagcttctaaagtttttgaacaaacactacaatctggaaacaaccgtcccacaggtgaataatttcgtgatctttgaggggttctttgcacaccagcacccgcctgcacgcaagctgccacccaagcgggcagaaggcgacatcaaaccctattcttcctccgaccgcgaatttctcaaagtggccgtggaacccccttggcctctgaatcgtgcccctagacgggctactccacctgcccacccccctcccaggtcatcatcacttggaaatagtcctgagagaggtccattgcggcctttcgtgcccgagcaagaacttctccgcagtcttagactttgtcctccacatcccaccgcaaggctgttactggccgcagaccctgggggatcccctgcacaaagacgaaggacaagatag

SEQ ID NO: 89191 - DNA, 933 bp, Artificial Sequence
  derived and/or modified sequence
atggagttcccgttcgatgtcgacgccctgtttcctgagagaatcaccgtgctggaccagcacctccggcctcctgcgaggagacccggaacaaccacccctgccagggtggatttacagcaacagatcatgaccattattgatgaacttggtaaggccagcgcaaaggcccagaaccttagtgcacctatcacgtccgccagtcgcatgcagtccaacagacacgtagtatacattctcaaggactcatctgctcgccctgccggtaagggcgcaattatcgggttcatcaaggtgggatacaagaaactgttcgttctggatgaccgcgaagcccacaatgaagtcgagccgctgtgtattcttgatttttatatccacgagtccgtccagaggcacggtcatggaagagagctgttccagtacatgctgcagaaggagcgggtggagccgcaccaactggcaatcgaccggccttctcagaaactgctgaaattcctaaataaacactataatctcgagaccacggttcctcaggtcaacaacttcgttatttttgaggggttttttgcccatcagcatcccccagcgaggaagctgccccctaagagagccgagggtgacattaaaccttattcttcttcagacagagaattcctgaaagtggcggttgagccaccttggccactgaatagggccccacggagagctacgccccctgcccaccccccacctcggtcttctagcctgggaaacagtccagagcggggacccctgcgcccttttgtccccgagcaggagcttttgagatcactgcgactctgcccaccacatcctacagctagactgttactcgccgcagacccagggggatcccctgcccaacgacgacgtacctcaagcctgccacgctcagaggaaagccgctactag

SEQ ID NO: 89192 - DNA, 903 bp, Artificial Sequence
  derived and/or modified sequence
atggagttcccatttgacgttgacgctttgtttcccgagcgcattaccgtccttgatcaacatctacgtccccctgctaggaggcccggaacaaccactcccgcacgagtggatctgcagcaacagattatgaccattatcgacgaactcgggaaggcctctgcaaaagctcagaacctcagcgctcctattacatccgcatcacgaatgcaaagtaacagacacgtggtttacatcctcaaggacagctccgctcggcctgctgggaagggcgctattatagggttcatcaaagtgggttacaagaagctgtttgtgttggacgaccgtgaggcgcacaatgaagtcgagcctctctgcatcctggatttctacatccatgaaagcgtgcagcgccacggccatggaagagaactgttccaatatatgcttcagaaagaacgggttgaaccccatcaactggcaatcgacagaccctctcagaagcttttgaagtttctgaataaacattacaacttggagaccaccgttccacaagtcaataattttgttatatttgagggcttctttgcccatcaacatccgccagcccgaaaactcccccctaagcgagctgaaggggatatcaaaccctattcctcctcggaccgtgaattcctgaaagtagctgtcgagcccccttggcctcttaacagagctccacgacgggcaacccctcccgctcacccaccccctagaagtagctctttaggaaactcacctgagcggggaccacttcgtccctttgtaccagaacaggagctactccgaagcttgaggttgtgcccacctcatccaaccgcccgtctattattggccgcagatccgggaggcagtcctgcccagaggaggcgaactcggtag

SEQ ID NO: 89193 - DNA, 903 bp, Artificial Sequence
  derived and/or modified sequence
atggagtttcctttcgacgtagacgccctttttcccgagagaatcacagtgctggatcaacacctgcgccctcccgctcgacggcctggaacgaccacacctgccagagtggatctgcagcagcagatcatgaccataattgatgaactaggtaaggcaagtgcaaaagcccaaaatctcagcgccccaattacttcggcttctagaatgcaaagtaataggcacgtggtctatattctgaaggatagttccgcaagacccgcaggaaaaggggctatcatcgggtttattaaagtcgggtacaaaaagctgttcgttctcgatgaccgcgaagctcataacgaagtcgagcctctgtgtatccttgatttttacatccacgagagtgtgcagagacatggccatggtcgtgaactgttccaatatatgcttcaaaaagaaagagtcgagcctcatcagcttgccatagaccgaccatcgcagaagttactgaagttcttgaataagcattacaatctggagacgaccgtcccacaggtgaataattttgttatttttgagggcttctttgcccatcagcaccctccagccaggaagttgccacctaagagggccgagggcgatattaaaccctactcctcctccgaccgcgaattcctcaaagtggccgtcgaacccccttggccactgaatagagccccacggagggctaccccgccagcccacccccctcccaggtcatcctccttgggaaatagtccagagcggggaccactacgcccattcgtacccgagcaggagctcctgcgcagtcttagattgtgcccaccccaccccaccgctcggctcctgttggctgccgatcctggaggatcacccgctcagcgaaggagaactaggtag

SEQ ID NO: 89194 - DNA, 903 bp, Artificial Sequence
  derived and/or modified sequence
atggaatttccttttgatgttgacgctctgttccctgagagaattaccgtgcttgatcagcacttaaggccacccgctcgcaggccagggaccacgacccctgcacgtgtcgaccttcaacagcaaatcatgaccatcattgacgaactgggaaaggctagtgcaaaagcccaaaacctgtctgctccaattacctccgcctcacggatgcaatccaaccggcacgtggtttacatcctgaaggacagttcagcacggcctgctgggaagggggcaatcatcggtttcatcaaggttggatataagaaactgttcgttctcgacgatcgcgaagctcacaacgaggtcgaacccttgtgtatcctcgacttctatatccatgaatctgtacagaggcatgggcacggacgggagctgtttcaatacatgcttcagaaagaaagagtggaaccccaccagcttgccatagacaggccatcccagaagctgctgaaattcttgaataaacattataacctagagactacagtgcctcaggtcaacaattttgtgatcttcgagggcttcttcgcacatcagcatcctccggctagaaaacttccacctaagcgggcagaaggggacatcaagccttatagctcctccgaccgcgaatttttgaaagtggcggtggaaccaccctggccgctcaatagagcacctcggagagccacaccccctgcccacccacccccaaggagtagcagcctcggtaatagccctgaacggggacctcttcgacctttcgtgcccgagcaggaacttctgcgcagtctccgcctgtgccccccacatccaacggctcggctgcttctggcagctgatcctgggggatcaccagcacagcggaggcggactcgatag

SEQ ID NO: 89195 - DNA, 933 bp, Artificial Sequence
  derived and/or modified sequence
atggaatttcccttcgatgttgatgccctgttcccagagcgcataacagtcctcgaccagcacctgcgacccccagccaggagaccaggaacgactacgcctgccagggtggacctacagcaacaaatcatgaccattatcgatgaattggggaaagcgagcgccaaggctcagaacctatctgcacctataactagtgctagtcggatgcagtccaaccgccacgttgtctatattcttaaagactccagcgccaggccagcgggtaagggggcaatcatcggcttcatcaaggttggctacaaaaagctcttcgtgctcgacgacagagaagctcataacgaagttgaacccctgtgtattctcgatttctacattcatgagagcgttcagcgtcacggccacggaagagagctcttccagtacatgctgcagaaggagcgggttgaaccccaccagctcgccatcgatagaccttcacagaaactgctcaaatttctcaataagcactataacttggagacaactgtacctcaggtgaataattttgtaatttttgaagggttctttgcacaccagcatcctcctgctcgaaagctgccccctaagcgcgctgagggtgatatcaagccctactcttcatcagacagagaatttctgaaagttgccgtcgagccaccttggccacttaaccgcgctccaagacgtgccacaccacccgcacatcctccacccagatcttctagcttgggaaatagtcctgaacggggacccctgaggcctttcgtgcctgagcaggaattgctgaggtcattgagactgtgtcccccacacccgaccgctcggctactactcgctgcagacccagggggttccccggctcagaggcgccgaactagttctctccctcgctcagaggaaagccggtattag

SEQ ID NO: 89196 - DNA, 933 bp, Artificial Sequence
  derived and/or modified sequence
atggagttcccgttcgatgttgacgccctgttccctgaacgcataaccgtcctcgaccaacatttgcggcctccagccaggaggcccggaaccactacaccagcccgtgtagatctccagcagcagatcatgaccattatagacgagctgggaaaggcttcagccaaggctcagaatctgtcagctcccatcaccagcgcttcccgcatgcagagcaacaggcatgtggtgtacatcctgaaggactcatctgccaggccggctggtaagggggctatcataggcttcattaaggttggttataaaaaactctttgtactggatgaccgtgaagcccacaatgaggttgagcccctttgtattctggacttctacattcatgaatctgttcagcgacacgggcatggccgtgagctcttccagtatatgctgcagaaagagagggtggagccacaccaactcgcgatagaccgtccaagccaaaaactcctcaaattcttgaataaacactacaacctggagactactgttccccaggtcaataacttcgtcattttcgagggtttctttgcccaccagcaccctcctgcacgtaagttacccccaaaacgagcagaaggagacattaaaccgtatagcagctccgatagggagtttctgaaggtcgccgtggagcccccttggccattaaatagggctccgcgtagggccacccctcccgcacatccaccaccacggtccagctccctgggcaactcacccgagcggggtcccctgcgccctttcgtccccgaacaggagctgttaagaagcctgcgtctgtgccctccccaccctacagcccgtctgctgctcgccgctgaccctgggggatcccccgctcagcggcgacgaacctccagccttcctaggtccgaagaatcccgatattag

SEQ ID NO: 89197 - DNA, 903 bp, Artificial Sequence
  derived and/or modified sequence
atggaatttccatttgatgtggacgcgctgttcccagagaggattactgttctggatcagcatctgcgcccaccagctcgacggccaggaacaacaaccccagcgagagtagacttacagcaacagatcatgaccatcatcgacgagctgggcaaggccagtgccaaggcccagaatctgtcagccccaatcacttctgcaagtcgtatgcaatccaatcggcacgtggtctacatcctgaaggattcaagcgcacgcccagccggaaagggcgctatcatcgggtttattaaagtaggttataaaaagctgttcgtgctggatgatcgtgaggctcacaacgaagttgagcctctttgtatcctcgatttttatatccacgagagcgtgcagcggcatggccacggaagagagctttttcagtatatgctgcagaaggagcgggtcgagcctcaccagctagctatcgataggccgagtcagaaactcttaaaattccttaacaaacactacaaccttgagaccacagtgccccaagtcaataactttgtgattttcgaagggttcttcgctcatcagcatccacccgctcgaaagttacctccaaaacgggctgagggcgacattaaaccatatagctcttccgacagggagtttctgaaagtggcagtcgagccaccttggcctcttaaccgggcacctaggagagcaacccctcccgctcaccccccacctcggagctcatctttgggcaacagtccggaaagaggcccattgcgtccttttgtgcctgagcaggagctgttgcgctcactgcgattgtgtccccctcacccaaccgccagactgctcttggccgctgaccctgggggttcaccggctcagcgcagacgcaccaggtag

SEQ ID NO: 89198 - DNA, 933 bp, Artificial Sequence
  derived and/or modified sequence
atggaattcccttttgatgtggatgccctgttccccgagcggatcaccgtgctggatcagcaccttcgtcccccagctcgacgaccaggaaccactacccctgctagggtcgatctgcaacaacagataatgacaattattgacgaattaggaaaggcatcagcgaaggcacaaaacctttcggcgccaattacgagcgcctcccggatgcagagtaatagacatgtcgtgtatatactgaaagactccagtgcaaggccagccggaaagggggcaattattgggttcatcaaggtaggctataaaaagctcttcgttctggatgatcgggaagcccacaatgaggtcgagccactgtgcatcttagatttttatattcatgaatctgtccaacgacacggtcacggacgcgaactgttccaatatatgttgcagaaggaaagggtggagccgcaccaactggccatcgaccgtccctcccaaaagctgctgaagttcctgaataagcactacaatctcgaaacaaccgttccccaagtgaataactttgtgatcttcgagggatttttcgcccaccagcatccacctgccaggaagctgcctccaaagcgcgctgagggtgatatcaagccctacagctcttctgacagagaatttcttaaggtagccgttgagcctccctggcccctgaaccgggcacctaggcgcgctacccctcccgctcacccaccccctcgtagctccagtctgggaaactcccccgaacgtggtcctctccggccatttgtcccagaacaagagctgcttagatctttgcggctgtgccccccacacccaacagcacgattgcttctggctgccgatcccggtggaagccctgcccagaggcgcagaacatcttccctgcctaggagcgaagagtcccggtattag

SEQ ID NO: 89199 - DNA, 933 bp, Artificial Sequence
  derived and/or modified sequence
atggaattcccgtttgacgtagacgcactttttccggagcgcattaccgtcctcgatcagcatctgcgtcccccagcacggagacctggaaccacaacacctgcaagggttgacctgcagcagcagattatgaccatcattgacgaattaggaaaagcttccgccaaagcacaaaacctgtccgcacctatcacctcagcgtcccgcatgcaatcaaacaggcacgtcgtgtacatcctgaaagacagcagtgctagacccgctggaaagggcgctattatcgggttcatcaaggttggatataaaaaactattcgttcttgacgatcgggaggctcacaacgaggtggaaccactttgcatactcgatttttacatacatgagtctgtccaaaggcacggccacggaagggagctgttccagtatatgttgcagaaggagcgagtggaacctcatcagctggctatagataggccatcccaaaagttactaaagtttcttaacaagcactataacctggaaactaccgtgccacaggtgaacaacttcgttatttttgagggcttcttcgcccaccagcatccgcctgcgaggaaactgccacccaagagggccgagggggatattaaaccttacagctctagcgatagagaattcctgaaagttgccgtggagcccccttggcccttaaacagagctccacgtagagccacgccccctgcccatccaccccctcgtagctcctccttagggaacagtcccgaaagaggccctttgaggcctttcgttccggagcaagaactcctcaggtccctgcgactgtgtccaccacatccaactgcgcgtctcctgctcgctgccgatcctgggggtagccccgcacagcgcagacgcacatcctccctgccccgtagcgaggaaagccggtattag

SEQ ID NO: 89200 - DNA, 903 bp, Artificial Sequence
  derived and/or modified sequence
atggagttccctttcgatgtagatgccctgtttccggagaggattaccgtgctcgatcagcacctaaggcccccagcccgaagacctggaacgacaacccccgctagagtcgacctgcaacagcaaattatgacaatcattgatgagctggggaaagcctcagctaaggcgcagaatctcagtgctccaatcacctccgcctcccggatgcagtccaaccgccacgtagtatacattctcaaggattcaagcgcaaggccagctgggaaaggcgctataattggatttattaaggtcgggtacaaaaaactgttcgtcctggacgacagagaagcacataacgaagttgagccactgtgtatcctggatttctacatccatgagtccgtccagcgtcatggtcacggccgtgaactgtttcagtatatgctgcagaaagaaagggtggagcctcatcagctcgccatcgacaggccatctcagaagctgctgaagtttttgaataaacactataacctggagacaaccgtaccccaggtgaataatttcgtcatctttgagggcttctttgcccatcagcatccaccggcacgcaaactgccgccaaaacgggctgaaggagacatcaaaccctatagctctagcgaccgagagttcctcaaggtagctgtcgagccaccttggcctttgaatcgagcgccacggagggccacgcctccagcacacccgccaccgagatcgagctccctaggaaatagccctgagcgaggtccgctgaggcccttcgttccagaacaggagttgctgaggtcactccgactgtgtccacctcaccctaccgcacggttgctccttgcagcagaccctgggggatcgcccgcacagagacgcagaacacgttag

SEQ ID NO: 89201 - DNA, 933 bp, Artificial Sequence
  derived and/or modified sequence
atggagttcccatttgacgtagacgcattgtttcccgagcggataaccgtgttggatcagcatcttaggcctccagcccgtcgccctggaaccaccacccccgcacgcgtcgacctgcagcagcagattatgacaattattgatgagctcgggaaggcatctgctaaggcgcagaacctgtctgctcccatcacatcggcatcaaggatgcaatccaatcgacatgtcgtgtatattcttaaagacagctcagcccgtcccgcagggaaaggcgcaataatcgggttcattaaggtggggtataagaagctgttcgtgctagacgatagggaagcgcacaacgaggtggaacccctgtgcatcctggacttctatatccacgaatccgttcaacgacatggacacggcagagaactcttccagtatatgcttcagaaggagagagtggagccacatcagctggccatcgatagacccagtcagaaactcttgaaatttctgaacaagcactacaacctggagactaccgtgccccaggtgaacaactttgttattttcgagggattctttgctcaccagcacccgcctgcaaggaagctgcctccaaagagagccgagggcgatatcaaaccgtacagctcgtcagatcgcgagttcctgaaagtcgccgtcgaaccgccatggccactaaatcgggctccaaggagagccacccccccagcccaccctcccccacgctcaagttccctggggaactccccagaacgcggaccgcttaggcccttcgtgcccgaacaagagttattgaggtccctccgcctgtgtccgcctcatcccactgccaggctgctcctagcagccgacccaggcggatcacccgcacagcgaagacgcacttcctctctccctcgcagtgaggagtcgcgctactag

SEQ ID NO: 89202 - protein, 277 aa, Artificial Sequence
  derived and/or modified sequence
MVRLPLQCVLWGCLLTAVHPEPPTACREKQYLINSQCCSLCQPGQKLVSDCTEFTETECLPCGESEFLDTWNRETHCHQHKYCDPNLGLRVQQKGTSETDTICTCEEGWHCTSEACESCVLHRSCSPGFGVKQIATGVSDTICEPCPVGFFSNVSSAFEKCHPWTSCETKDLVVQQAGTNKTDVVCGPQDRLRALVVIPIIFGILFAILLVLVFIKKVAKKPTNKAPHPKQEPQEINFPDDLPGSNTAAPVQETLHGCQPVTQEDGKESRISVQERQ

SEQ ID NO: 89203 - protein, 208 aa, Artificial Sequence
  derived and/or modified sequence
MPAIPAHGAELEFVQIIIIVVVMMVMVVVITCLLSHYKLSARSFISRHSQGRRREDALSSEGCLWPSESTVSGNGIPEPQVYAPPRPTDRLAVPPFAQRERFHRFQPTYPYLQHEIDLPPTISLSDGEEPPPYQGPCTLQLRDPEQQLELNRESVRAPPNRTIFDSDLMDSARLGGPCPPSSNSGISATCYGSGGRMEGPPPTYSEVI

SEQ ID NO: 89204 - DNA, 627 bp, Artificial Sequence
  derived and/or modified sequence
atgccagcaatcccagctcacggagctgaactcgagtttgtccagatcattattatcgtggtggtgatgatggtaatggtcgtcgtcattacatgtctgctgtcccactataaattgagtgctcggtctttcatttccaggcactctcagggacggaggagggaggacgccctgtcttccgagggatgcctgtggcccagtgaatcgactgtttcagggaacggtatcccagagcctcaggtatatgcaccaccccgaccaaccgaccgtctggccgtgccaccttttgcccagcgagaaagattccacaggtttcagccaacatatccttatctgcagcatgaaattgaccttccccctaccatatctttgtctgacggagaagaaccaccgccataccaaggcccatgcaccttgcagttgagagacccagaacagcagcttgagctcaacagggaatcagtgcgtgcccccccaaatcgcactatttttgactctgatcttatggatagcgctcgcttgggcggaccctgccccccctcaagcaattccggaatctcggccacgtgctatgggagtggaggccgaatggaaggtccgccccccacatattcagaagtgatctag

SEQ ID NO: 89205 - DNA, 627 bp, Artificial Sequence
  derived and/or modified sequence
atgcctgccatcccagcccatggagctgagctggagtttgtgcagatcatcatcatcgtggtggtgatgatggtgatggtggtggtgatcacctgcctgctgagccactacaagctgagcgcccgctccttcatcagccgccacagccagggcagaagaagagaagatgccctgagcagcgagggctgcctgtggcccagcgagagcacagtgtctggaaatggcatccctgagccccaggtgtatgccccaccccggcccacagaccggctggccgtgcccccatttgcccagcgggagcgcttccaccgcttccagcccacctacccctacctgcagcacgagattgacctgccccccaccatcagcctgagtgatggagaggagcccccaccctaccagggcccctgcaccctgcagctgcgggaccctgagcagcagctggagctgaaccgggagagcgtgcgggccccacccaacagaaccatctttgacagcgacctgatggattctgcccggctgggcggcccctgcccccccagcagcaacagcggcatcagcgccacctgctacggcagcggcggccgcatggagggccccccacccacctacagcgaggtgatctag

SEQ ID NO: 89206 - DNA, 627 bp, Artificial Sequence
  derived and/or modified sequence
atgcccgccatccccgcccacggcgccgagctggagttcgtgcagatcatcatcatagtcgttgtgatgatggtgatggtggtcgtgataacatgcctgctgagtcactataagctgtcagcccgcagcttcatctcgaggcacagtcagggtaggcggagagaggatgccttgtcatccgaaggttgtctatggccttctgagagcactgtcagcgggaatggaatcccggaaccccaagtgtatgcccctccaaggcccacggacaggcttgccgttcctccctttgcccaaagggagcggttccacagatttcagcctacttatccctatttgcagcacgaaattgacctgcctcccacgatctcactgagcgatggggaggagccccccccttatcagggcccctgtactctccaattacgggatcctgaacagcagctcgaacttaatcgcgagtcagtccgcgcccccccgaaccgcaccattttcgacagtgatttgatggattctgcccgcttgggaggtccatgccctccatcttcaaattctggcatctcagccacatgttatgggagtggcggacgaatggagggcccaccccccacctattctgaggtgatttag

SEQ ID NO: 89207 - DNA, 627 bp, Artificial Sequence
  derived and/or modified sequence
atgccagctattcctgcacacggggctgaactggagttcgtacaaattattatcattgtggtagtcatgatggtaatggttgtcgtgatcacttgcctgcttagccactataaactctccgctagaagcttcatctcgcggcactcgcagggtcggcgacgcgaagacgccttgtcgagcgaaggatgtctgtggccatctgagagcaccgtaagtggcaacggcattccggagccgcaggtttatgcgccaccccgtccgacagataggctggccgtgcctcctttcgcgcagagagagcgttttcaccggtttcaacctacctacccttaccttcaacacgaaatcgatcttcctcctacaatttccctgagcgatggggaggaacctcccccttaccaaggaccatgcactctgcagctgcgggatccagaacagcagctcgaacttaacagggagtctgttcgagcccctccaaataggacgatctttgacagcgacctcatggatagtgctaggttggggggtccttgccccccaagctccaatagtggaatcagtgctacctgttacgggtctggtggccgaatggaggggccaccacctacttattctgaggttatctag

SEQ ID NO: 89208 - DNA, 4519 bp, Artificial Sequence
  derived and/or modified sequence
tggtcgtcctccttgggttcgggtgaaagcgcttgggggttcagtgggccatgatccccgagctgctggagaactgaaggcggacagtctcctgcgaaaccagcggagctggagtttgttcagatcatcatcatcgtggtggtgatgatggtgatggtggtggtgatcacgtgcctgctgagccactacaagctgtctgcacggtccttcatcagccggcacagccaggggcggaggagagaagatgccctgtcctcagaaggatgcctgtggccctcggagagcacagtgtcaggcaacggaatcccagagccgcaggtctacgccccgcctcggcccaccgaccgcctggccgtgccgcccttcgcccagcgggagcgcttccaccgcttccagcccacctatccgtacctgcagcacgagatcgacctgccacccaccatctcgctgtcagacggggaggagcccccaccctaccagggcccctgcaccctccagcttcgggaccccgagcagcagctggaactgaaccgggagtcggtgcgcgcacccccaaacagaaccatcttcgacagtgacctgatggatagtgccaggctgggcggcccctgcccccccagcagtaactcgggcatcagcgccacgtgctacggcagcggcgggcgcatggaggggccgccgcccacctacagcgaggtcatcggccactacccggggtcctccttccagcaccagcagagcagtgggccgccctccttgctggaggggacccggctccaccacacacacatcgcgcccctagagagcgcagccatctggagcaaagagaaggataaacagaaaggacaccctctctagggtccccaggggggccgggctggggctgcgtaggtgaaaaggcagaacactccgcgcttcttagaagaggagtgagaggaaggcggggggcgcagcaacgcatcgtgtggccctcccctcccacctccctgtgtataaatatttacatgtgatgtctggtctgaatgcacaagctaagagagcttgcaaaaaaaaaaagaaaaaagaaaaaaaaaaaccacgtttctttgttgagctgtgtcttgaaggcaaaagaaaaaaaatttctacagtagtctttcttgtttctagttgagctgcgtgcgtgaatgcttattttcttttgtttatgataatttcacttaactttaaagacatatttgcacaaaacctttgtttaaagatctgcaatattatatatataaatatatataagataagagaaactgtatgtgcgagggcaggagtatttttgtattagaagaggcctattaaaaaaaaaagttgttttctgaactagaagaggaaaaaaatggcaatttttgagtgccaagtcagaaagtgtgtattaccttgtaaagaaaaaaattacaaagcaggggtttagagttatttatataaatgttgagattttgcactattttttaatataaatatgtcagtgcttgcttgatggaaacttctcttgtgtctgttgagactttaagggagaaatgtcggaatttcagagtcgcctgacggcagagggtgagcccccgtggagtctgcagagaggccttggccaggagcggcgggctttcccgaggggccactgtccctgcagagtggatgcttctgcctagtgacaggttatcaccacgttatatattccctaccgaaggagacaccttttcccccctgacccagaacagcctttaaatcacaagcaaaataggaaagttaaccacggaggcaccgagttccaggtagtggttttgcctttcccaaaaatgaaaataaactgttaccgaaggaattagtttttcctcttcttttttccaactgtgaaggtccccgtggggtggagcatggtgcccctcacaagccgcagcggctggtgcccgggctaccagggacatgccagagggctcgatgacttgtctctgcagggcgctttggtggttgttcagctggctaaaggttcaccggtgaaggcaggtgcggtaactgccgcactggaccctaggaagccccaggtattcgcaatctgacctcctcctgtctgtttcccttcacggatcaattctcacttaagaggccaataaacaacccaacatgaaaaggtgacaagcctgggtttctcccaggataggtgaaagggttaaaatgagtaaagcagttgagcaaacaccaacccgagcttcgggcgcagaattcttcaccttctcttcccctttccatctcctttccccgcggaaacaacgcttcccttctggtgtgtctgttgatctgtgttttcatttacatctctcttagactccgctcttgttctccaggttttcaccagatagatttggggttggcgggacctgctggtgacgtgcaggtgaaggacaggaaggggcatgtgagcgtaaatagaggtgaccagaggagagcatgaggggtggggctttgggacccaccggggccagtggctggagcttgacgtctttcctccccatgggggtgggagggcccccagctggaagagcagactcccagctgctaccccctcccttcccatgggagtggctttccattttgggcagaatgctgactagtagactaacataaaagatataaaaggcaataactattgtttgtgagcaacttttttataacttccaaaacaaaaacctgagcacagttttgaagttctagccactcgagctcatgcatgtgaaacgtgtgctttacgaaggtggcagctgacagacgtgggctctgcatgccgccagcctagtagaaagttctcgttcattggcaacagcagaacctgcctctccgtgaagtcgtcagcctaaaatttgtttctctcttgaagaggattctttgaaaaggtcctgcagagaaatcagtacaggttatcccgaaaggtacaaggacgcacttgtaaagatgattaaaacgtatctttcctttatgtgacgcgtctctagtgccttactgaagaagcagtgacactcccgtcgctcggtgaggacgttcccggacagtgcctcactcacctgggactggtatcccctcccagggtccaccaagggctcctgcttttcagacaccccatcatcctcgcgcgtcctcaccctgtctctaccagggaggtgcctagcttggtgaggttactcctgctcctccaacctttttttgccaaggtttgtacacgactcccatctaggctgaaaacctagaagtggaccttgtgtgtgtgcatggtgtcagcccaaagccaggctgagacagtcctcatatcctcttgagccaaactgtttgggtctcgttgcttcatggtatggtctggatttgtgggaatggctttgcgtgagaaaggggaggagagtggttgctgccctcagccggcttgaggacagagcctgtccctctcatgacaactcagtgttgaagcccagtgtcctcagcttcatgtccagtggatggcagaagttcatggggtagtggcctctcaaaggctgggcgcatcccaagacagccagcaggttgtctctggaaacgaccagagttaagctctcggcttctctgctgagggtgcaccctttcctctagatggtagttgtcacgttatctttgaaaactcttggactgctcctgaggaggccctcttttccagtaggaagttagatgggggttctcagaagtggctgattggaaggggacaagcttcgtttcaggggtctgccgttccatcctggttcagagaaggccgagcgtggctttctctagccttgtcactgtctccctgcctgtcaatcaccacctttcctccagaggaggaaaattatctcccctgcaaagcccggttctacacagatttcacaaattgtgctaagaaccgtccgtgttctcagaaagcccagtgtttttgcaaagaatgaaaagggaccccatatgtagcaaaaatcagggctgggggagagccgggttcattccctgtcctcattggtcgtccctatgaattgtacgtttcagagaaattttttttcctatgtgcaacacgaagcttccagaaccataaaatatcccgtcgataaggaaagaaaatgtcgttgttgttgtttttctggaaactgcttgaaatcttgctgtactatagagctcagaaggacacagcccgtcctcccctgcctgcctgattccatggctgttgtgctgattccaatgctttcacgttggttcctggcgtgggaactgctctcctttgcagccccatttcccaagctctgttcaagttaaacttatgtaagctttccgtggcatgcggggcgcgcacccacgtccccgctgcgtaagactctgtatttggatgccaatccacaggcctgaagaaactgcttgttgtgtatcagtaatcattagtggcaatgatgacattctgaaaagctgcaatacttatacaataaattttacaattctttggaatgag

SEQ ID NO: 89209 - DNA, 831 bp, Artificial Sequence
  derived and/or modified sequence
ctctccaggcccctgccacctgtttgcacatgaccctctacacccgccatagcaatggagaccccgcctcctgctacagttaattaatccttcttttttgcttcacaataaaaatagcatggctcttctgattgtaaaaagtgatatacactccttatttaacgaaaaattcaaagaatttgataaatgacaggcgaaaagtcaaaatgcctgcaattccagcacatggagcggagctggagtttgttcagatcatcatcatcgtggtggtgatgatggtgatggtggtggtgatcacgtgcctgctgagccactacaagctgtctgcacggtccttcatcagccggcacagccaggggcggaggagagaagatgccctgtcctcagaaggatgcctgtggccctcggagagcacagtgtcaggcaacggaatcccagagccgcaggtctacgccccgcctcggcccaccgaccgcctggccgtgccgcccttcgcccagcgggagcgcttccaccgcttccagcccacctatccgtacctgcagcacgagatcgacctgccacccaccatctcgctgtcagacggggaggagcccccaccctaccagggcccctgcaccctccagcttcgggaccccgagcagcagctggaactgaaccgggagtcggtgcgcgcacccccaaacagaaccatcttcgacagtgacctgatggatagtgccaggctgggcggcccctgcccccccagcagtaactcgggcatcagcgccacgtgctacggcagcggcgggcgcatggaggggccgccgcccacctacagcgaggtcatcg

SEQ ID NO: 89210 - DNA, 627 bp, Artificial Sequence
  derived and/or modified sequence
atgcccgccatccccgcccacggcgccgagctggagttcgtgcagatcatcatcatcgtggtggtgatgatggtgatggtggtggtgatcacctgcctgctgagccactacaagctgagcgccagaagcttcatcagcagacacagccagggcagaagaagagaggacgccctgagcagcgagggctgcctgtggcccagcgagagcaccgtgagcggcaacggcatccccgagccccaggtgtacgccccccccagacccaccgacagactggccgtgccccccttcgcccagagagagagattccacagattccagcccacctacccctacctgcagcacgagatcgacctgccccccaccatcagcctgagcgacggcgaggagccccccccctaccagggcccctgcaccctgcagctgagagaccccgagcagcagctggagctgaacagagagagcgtgagagccccccccaacagaaccatcttcgacagcgacctgatggacagcgccagactgggcggcccctgcccccccagcagcaacagcggcatcagcgccacctgctacggcagcggcggcagaatggagggccccccccccacctacagcgaggtgatctag

SEQ ID NO: 89211 - protein, 395 aa, Artificial Sequence
  derived and/or modified sequence
MDLGIPDLLDAWLEPPEDIFSTGSVLELGLHCPPPEVPVTRLQEQGLQGWKSGGDRGCGLQESEPEDFLKLFIDPNEVYCSEASPGSDSGISEDPCHPDSPPAPRATSSPMLYEVVYEAGALERMQGETGPNVGLISIQLDQWSPAFMVPDSCMVSELPFDAHAHILPRAGTVAPVPCTTLLPCQTLFLTDEEKRLLGQEGVSLPSHLPLTKAEERVLKKVRRKIRNKQSAQDSRRRKKEYIDGLESRVAACSAQNQELQKKVQELERHNISLVAQLRQLQTLIAQTSNKAAQTSTCVLILLFSLALIILPSFSPFQSRPEAGSEDYQPHGVTSRNILTHKDVTENLETQVVESRLREPPGAKDANGSTRTLLEKMGGKPRPSGRIRSVLHADEM

SEQ ID NO: 89212 - protein, 217 aa, Artificial Sequence
  derived and/or modified sequence
MDLGIPDLLDAWLEPPEDIFSTGSVLELGLHCPPPEVPVTRLQEQGLQGWKSGGDRGCGLQESEPEDFLKLFIDPNEVYCSEASPGSDSGISEDPCHPDSPPAPRATSSPMLYEVVYEAGALERMQGETGPNVGLISIQLDQWSPAFMVPDSCMVSELPFDAHAHILPRAGTVAPVPCTTLLPCQTLFLTDEEKRLLGQEGVSLPSHLPLTKVTCFP

SEQ ID NO: 89213 - protein, 182 aa, Artificial Sequence
  derived and/or modified sequence
MDLGIPDLLDAWLEPPEDIFSTGSVLELGLHCPPPEVPVTRLQEQGLQGWKSGGDRGCGLQESEPEDFLKLFIDPNEVYCSEASPGSDSGISEDPCHPDSPPAPRATSSPMLYEVVYEAGALERMQGETGPNVGLISIQLDQWSPAFMVPDSCMVSELPFDAHAHILPRAGTVAPVPCTTLV

SEQ ID NO: 89214 - DNA, 1747 bp, Artificial Sequence
  derived and/or modified sequence
ccatgatctccctcttgcaaaagcgagggctacagaacaggcattcaggagtcctgtgctccagtcacagccttttctgttcttcagctaggagacaccaaaccctcaggaagatttactatagctaagagaaaactgcagcagaaagggcgcggctacctacttcttaaattccgtttgtggaccctcagactcttagtcccctactcccagatacagcggccctaccgtggctcctggcaaggtggcatccacttttgtagtaagcatggatctcggaatccctgacctgctggacgcgtggctggagcccccagaggatatcttctcgacaggatccgtcctggagctgggactccactgcccccctccagaggttccggtaactaggctacaggaacagggactgcaaggctggaagtccggtggggaccgtggctgtggccttcaagagagtgagcctgaagatttcttgaagcttttcattgatcccaatgaggtgtactgctcagaagcatctcctggcagtgacagtggcatctctgaggacccctgccatccagacagtccccctgcccccagggcaaccagttctcctatgctctatgaggttgtctatgaggcaggggccctggagaggatgcagggggaaactgggccaaatgtaggccttatctccatccagctagatcagtggagcccagcatttatggtgcctgattcctgcatggtcagtgagctgccctttgatgctcatgcccacatcctgcccagagcaggcaccgtagccccagtgccctgtacaaccctgctgccctgtcaaaccctgttcctgaccgatgaggagaagcgtctgctggggcaggaaggggtttccctgccctctcacctgcccctcaccaaggcagaggagagggtcctcaagaaggtcaggaggaaaatccgtaacaagcagtcagctcaggacagtcggcggcggaagaaggagtacattgatgggctggagagcagggtggcagcctgttctgcacagaaccaagaattacagaaaaaagtccaggagctggagaggcacaacatctccttggtagctcagctccgccagctgcagacgctaattgctcaaacttccaacaaagctgcccagaccagcacttgtgttttgattcttcttttttccctggctctcatcatcctgcccagcttcagtccattccagagtcgaccagaagctgggtctgaggattaccagcctcacggagtgacttccagaaatatcctgacccacaaggacgtaacagaaaatctggagacccaagtggtagagtccagactgagggagccacctggagccaaggatgcaaatggctcaacaaggacactgcttgagaagatgggagggaagccaagacccagtgggcgcatccggtccgtgctgcatgcagatgagatgtgagctggaacagaccttcctggcccacttcctgatcacaaggaatcctgggcttccttatggctttgcttcccactgggattcctacttaggtgtctgccctcaggggtccaaatcacttcaggacaccccaagagatgtcctttagtctctgcctgaggcctagtctgcatttgtttgcatatatgagagggtacctcaaatacttctgttatgtatctgtgattttatttcttctttgggtatagggttgaggggaaataagttttgagtgagaaataaacgttttagctg

SEQ ID NO: 89215 - DNA, 1188 bp, Artificial Sequence
  derived and/or modified sequence
atggatttggggatccccgatctgctggacgcatggctcgaaccaccggaggacatcttctccaccggaagcgtgctggagctcggcttacattgcccaccacccgaggttccggtgaccaggcttcaggaacagggactgcagggatggaagtctggaggggacaggggctgcggcttgcaggaatccgaacccgaagactttctgaaactcttcatcgatcccaacgaggtttattgtagcgaggctagtcccggctcagactctgggatctcggaggacccttgccatcctgattcaccacccgcccctcgggcaacatcaagccccatgttgtacgaggtcgtctatgaggccggggccttggaaagaatgcagggagaaaccgggcccaacgtgggcctaatcagcatccagctcgatcagtggagtccagcatttatggttccagactcctgcatggtatccgagctccctttcgacgcccacgcgcatattctgccaagagcggggaccgtggctcctgtcccctgtacaacgctgctcccctgtcaaactctgttcctcacggacgaggagaagcggcttcttggacaggaaggggtaagcctaccctctcacttaccccttacaaaagccgaagaaagggttctgaaaaaagtgagaaggaaaatcagaaataaacagtccgcacaagactcaaggcgccgcaaaaaagagtacattgacgggctggaatcccgcgtggctgcctgcagcgcacagaatcaagagcttcagaagaaggtgcaagaactggagcggcacaacattagtttagtggcccaacttagacagttgcagacacttattgcccagaccagtaacaaggccgcgcagacatctacctgcgttctcatcctgctgttctccctggctctcattatcctgccatctttttccccttttcagtccagaccagaagccggctcggaggattatcagccccatggtgtaacaagccgtaacatcctcacccacaaagatgtcaccgaaaaccttgaaacccaggttgtagaatctagactacgagagccccccggagcaaaagatgcaaacggttcgaccaggacactgcttgaaaaaatgggaggcaagcccagaccctccggacgtatccgtagtgtcctgcatgccgatgagatgtag

SEQ ID NO: 89216 - DNA, 654 bp, Artificial Sequence
  derived and/or modified sequence
atggacctgggtattccagacctgttagatgcatggctggaaccacccgaagatatcttttcgaccggatctgtgctggagctaggccttcattgcccgcctcctgaagtgcctgttacacggctccaggagcagggattgcaggggtggaagagcggtggtgatcggggttgtggcctacaggagagtgaacccgaagattttctcaagctgttcattgatccaaatgaggtgtactgcagtgaagcttctcctggaagcgatagcggaatcagcgaagatccctgccaccccgactcgcctcctgcgccccgggccacatcatctcctatgctgtatgaggtagtttacgaagccggcgccctggagcgcatgcaaggggagacgggcccaaacgtcggactgatcagcatacagctcgatcagtggtcaccagccttcatggtccctgattcttgcatggtgtccgagcttcctttcgatgcacatgcacacatactgccccgggccggaaccgtggcccctgtgccatgcaccacccttttgccatgtcagaccttgtttctgactgatgaagagaagcggctgctcggacaagagggagtaagcctcccttctcatctgcctcttactaaggtcacttgcttcccctag

SEQ ID NO: 89217 - DNA, 1188 bp, Artificial Sequence
  derived and/or modified sequence
atggacctgggcattcccgaccttctggatgcttggctcgagccgccagaagatatattctcaacgggctctgtgctggagctagggctgcactgcccacctcctgaagtgcctgttaccagactgcaggagcaaggacttcagggttggaagagcggtggcgataggggctgcgggctgcaggagtccgagccagaagacttcttgaaactgtttatagaccccaacgaggtgtattgttcagaagcttccccaggctcagactctggtatttccgaggatccttgtcatcccgattccccacccgcgccacgtgccacctcgtccccaatgctgtacgaagtggtgtatgaggcgggtgcgctggagcgcatgcagggcgagacagggcctaacgtgggtctcatatccatccagctggatcaatggtctcccgccttcatggtacccgattcttgcatggtgagtgagctgcccttcgacgcacacgcccacattcttccaagggccggaactgtcgcaccggtcccttgcactaccctcctgccttgccagactctattcttgactgacgaggagaagcgcctccttggacaggagggcgtttcactgccaagtcacctgccacttactaaagccgaagagcgcgtcctgaagaaggtgagaagaaaaatcagaaacaagcaaagcgcccaggactctcgcaggcgtaagaaagagtatattgacggactggagtccagggtcgcggcatgttctgcgcagaaccaggaactgcagaagaaagtgcaggagttagagcggcacaacatatccttggtggcacagctgcgacagctgcagaccttgatcgcacagactagcaataaagccgcacagacatctacctgtgtgctaatattgttattctcgctagctctcattatccttccttctttttcgcctttccagagcagacctgaggccggctccgaagactaccagcctcacggagtaactagtcgaaatatactcacacacaaagacgtgactgaaaatctggagacccaggtggtggagagtagactgagagaaccgcccggagccaaggatgccaatggatcaacaaggacactcctggagaagatgggcggcaaacctagaccgtccggccggatacgcagcgtgcttcacgccgatgaaatgtag

SEQ ID NO: 89218 - DNA, 1188 bp, Artificial Sequence
  derived and/or modified sequence
atggacttaggcatacctgatcttttagacgcctggttagagccgcctgaggatatttttagcacagggagcgtcctggaacttgggcttcactgcccccctcccgaggtgcctgtgaccaggctgcaggaacaggggctgcaaggatggaaatctggaggggatcggggctgcgggcttcaggaaagcgagccagaagatttcttaaagttgttcatcgaccccaacgaagtatattgttctgaagcctcacccgggtcggacagcggcatttcagaggatccttgtcatcccgacagcccgcccgcccctagagccacgagctctcccatgctgtatgaggtggtatatgaggcaggcgcgctcgagagaatgcagggtgaaactggcccaaacgtggggctgataagcatacagttagaccaatggagccccgctttcatggtaccggacagctgtatggtttcagaactccctttcgatgcccatgcccatattctcccccgggccgggactgtggcccccgtgccttgtacaacactcctgccctgccaaaccttgttcctcactgatgaagaaaagagactgctaggccaggagggggtatccctcccatcccatctgccgctgaccaaagcggaggagcgtgtgctcaagaaggtgcgcaggaagattcgcaataagcaaagtgcccaggactctaggcggcggaaaaaggagtacattgatggtctggaaagcagggtcgccgcctgttccgcgcagaaccaggagttgcaaaagaaagtgcaggagctcgaacggcataacatatcgctggttgcccagctgaggcagctacagacacttattgcccagacctcaaataaggctgcacagaccagcacctgtgtgctgatccttttgttttcgctggccctgatcattcttcccagcttttctcctttccaatcaaggccagaggccggatctgaggattaccagccacatggggtaacctcccgcaatatattgacacacaaagacgtgactgagaatctggaaacccaggtggtggagtctcggctgcgtgaacctccaggcgccaaggatgcaaatggcagcaccaggactcttctggagaagatgggaggcaaacctcgaccctcaggcaggataaggtctgtcctgcatgctgatgaaatgtag

SEQ ID NO: 89219 - DNA, 549 bp, Artificial Sequence
  derived and/or modified sequence
atggacctgggcattcctgatcttctcgatgcatggttggagccgccggaggacatcttcagtacaggctccgttctggagctgggcctgcattgtcccccgccggaagtccctgtgacgagattgcaggagcagggcctgcaaggatggaagagcggcggagaccgcggatgtggcctgcaggaaagtgaaccggaagacttcctaaagttgttcattgatccaaacgaggtctactgtagcgaggcatcccctggtagtgatagcggtatttctgaagacccctgtcatccggacagccccccagctccccgcgctacttccagccctatgctttacgaagtggtgtatgaggcaggtgccctggaacgcatgcagggggaaacgggccctaacgttgggctgataagcatacagctcgaccagtggtcaccagcattcatggtaccagactcctgcatggtgagtgaactcccatttgacgctcacgcgcatattttaccccgtgctggaacagtcgcacccgtgccctgtacaaccttagtttag

SEQ ID NO: 89220 - DNA, 1188 bp, Artificial Sequence
  derived and/or modified sequence
atggacctgggcatcccagacctgctggatgcctggctggagcccccagaggacatcttcagcacaggctctgtgctggagctgggcctgcactgccccccacctgaggtgcctgtgacccggctgcaggagcagggcctgcagggctggaagagcggcggggaccggggctgcggcctgcaggagagcgagcctgaggacttcctgaagctgttcatcgaccccaatgaggtgtactgcagcgaggccagccctggcagtgacagcggcatcagcgaggacccctgccacccagacagccccccagccccccgggccaccagcagccccatgctgtatgaggtggtgtatgaagctggggccctggagaggatgcagggcgagaccggccccaacgtgggcctcatcagcatccagctggaccagtggagccctgccttcatggtgcctgacagctgcatggtgtctgagctgccctttgatgcccacgcccacatcctgccccgggccggcaccgtggcccctgtgccctgcaccaccctgctgccctgccagaccctcttcctgacagatgaggagaagaggctgctgggccaggagggcgtgtccctgcccagccacctgcccctgaccaaggccgaggagcgggtgctgaagaaggtgcggaggaagatccggaacaagcagagcgcccaggacagcagaagaaggaagaaggagtacattgatggcctggagagccgggtggccgcctgcagcgcccagaaccaggagctgcagaagaaggtgcaggagctggagcggcacaacatcagcctggtggcccagctgcggcagctgcagaccctcatcgcccagaccagcaacaaggccgcccagaccagcacctgtgtgctgatcctgctcttcagcctggccctgatcatcctgcccagcttcagccccttccagagcaggcctgaggccggcagcgaggactaccagccccacggcgtgaccagcaggaacatcctgacccacaaggatgtgacagagaacctggagacccaggtggtggagagccggctgcgggagcccccaggggccaaggatgccaacggcagcaccaggaccctgctggagaagatgggcggcaagccccggcccagcggccgcatccgctctgtgctgcacgcagatgagatgtag

SEQ ID NO: 89221 - DNA, 654 bp, Artificial Sequence
  derived and/or modified sequence
atggacctgggcatcccagacctgctggatgcctggctggagcccccagaggacatcttcagcacaggctctgtgctggagctgggcctgcactgccccccacctgaggtgcctgtgacccggctgcaggagcagggcctgcagggctggaagagcggcggggaccggggctgcggcctgcaggagagcgagcctgaggacttcctgaagctgttcatcgaccccaatgaggtgtactgcagcgaggccagccctggcagtgacagcggcatcagcgaggacccctgccacccagacagccccccagccccccgggccaccagcagccccatgctgtatgaggtggtgtatgaagctggggccctggagaggatgcagggcgagaccggccccaacgtgggcctcatcagcatccagctggaccagtggagccctgccttcatggtgcctgacagctgcatggtgtctgagctgccctttgatgcccacgcccacatcctgccccgggccggcaccgtggcccctgtgccctgcaccaccctgctgccctgccagaccctcttcctgacagatgaggagaagaggctgctgggccaggagggcgtgtccctgcccagccacctgcccctgaccaaggtgacctgcttcccctag

SEQ ID NO: 89222 - DNA, 549 bp, Artificial Sequence
  derived and/or modified sequence
atggacctgggcatcccagacctgctggatgcctggctggagcccccagaggacatcttcagcacaggctctgtgctggagctgggcctgcactgccccccacctgaggtgcctgtgacccggctgcaggagcagggcctgcagggctggaagagcggcggggaccggggctgcggcctgcaggagagcgagcctgaggacttcctgaagctgttcatcgaccccaatgaggtgtactgcagcgaggccagccctggcagtgacagcggcatcagcgaggacccctgccacccagacagccccccagccccccgggccaccagcagccccatgctgtatgaggtggtgtatgaagctggggccctggagaggatgcagggcgagaccggccccaacgtgggcctcatcagcatccagctggaccagtggagccctgccttcatggtgcctgacagctgcatggtgtctgagctgccctttgatgcccacgcccacatcctgccccgggccggcaccgtggcccctgtgccctgcaccaccctggtgtag

SEQ ID NO: 89223 - DNA, 1188 bp, Artificial Sequence
  derived and/or modified sequence
atggacctgggcatccccgacctgctggacgcctggctggagcccccggaagatatattttcaactggcagcgtgcttgaactgggacttcactgtcctccgcctgaagttcccgttactcggctacaggagcaggggttgcaggggtggaaaagcggtggagacaggggatgtggcttgcaggagtccgaacctgaagacttcctgaaattgtttatcgatcccaacgaggtgtattgttcagaggccagtcctgggtctgactccggcatcagtgaggatccttgtcatcctgatagtcccccagcccctcgcgcaacgagctcaccaatgctgtatgaagtggtatacgaggcaggagctctcgaacgaatgcaaggggaaactggacctaacgtaggcctgatcagtatacagctcgaccagtggagcccggccttcatggtgcccgacagctgtatggtgagcgaactcccattcgatgcccacgcacacattctgccacgcgctggcaccgtcgcgccagttccctgtaccactctcctgccctgtcaaactctgttcttgaccgacgaggaaaaacggttactcggccaggagggcgtatcgttgcccagccatttgccactcacaaaagcagaggagagggttcttaagaaagtaaggcgtaaaatcagaaacaaacagtcagcgcaggattccaggaggaggaaaaaggagtacatcgatggattggagagcagggtggccgcttgcagcgcccaaaatcaagaactccagaagaaggtgcaggaacttgagcgccataacatctccctggtggcccaactgagacaactacagaccttaattgcccaaaccagcaacaaggctgctcaaaccagcacttgcgtcctaattcttctcttcagcctagccttgataattctgccttctttctcaccattccagtctcgcccggaggccggaagtgaggactaccagccccacggtgttacctcccgtaatatcctaacccataaggacgtaaccgaaaacctggagacccaagtggtggagtctaggctgcgcgagcccccaggggcaaaggacgctaacggctcaacgcgcacgctactggaaaaaatggggggcaagcctcgaccatcagggaggattcgctccgtacttcacgctgacgagatgtag

SEQ ID NO: 89224 - DNA, 654 bp, Artificial Sequence
  derived and/or modified sequence
atggacctgggcatccccgacctgctggacgcctggctggagcccccagaggacatcttcagtacggggtcagtgctcgagctcgggctgcactgtccgccccctgaggtaccagtcaccagacttcaggagcaaggtctacaggggtggaagtccggtggagatagaggctgcggactacaggaatcagaaccagaggactttctcaaacttttcattgacccgaatgaggtttactgcagcgaggcttctccgggaagtgattccggaataagcgaggacccctgtcatccggactcacctccagcacccagagctacctccagtccgatgctctacgaggtcgtctatgaggccggagcactcgagcggatgcaaggggagaccgggccaaatgtgggcctcatatccatccagctggatcagtggagccccgcgtttatggtcccagattcctgcatggtttcagaactgcccttcgacgcccatgcccatatcctcccccgggcgggtacggtggctccggtcccttgcacgaccctgcttccctgccagactttgttcctgaccgatgaagagaaacggctactcgggcaggagggcgtctctttgccgtctcaccttccactgaccaaagttacttgtttcccctag

SEQ ID NO: 89225 - DNA, 1188 bp, Artificial Sequence
  derived and/or modified sequence
atggacctgggcatccccgacctgctggacgcctggctggagccccctgaagacattttcagcacaggctcagtacttgaactcggtcttcactgccccccccccgaagtccccgtgactagacttcaggagcagggcctgcagggttggaagagtgggggggataggggatgtggattacaggaatccgaacctgaggattttttgaaactttttattgaccctaatgaggtttactgctccgaggcctcgcctggaagcgatagcggtataagcgaagacccttgtcatcctgattccccgccggccccaagggcaacatcttcccctatgttgtacgaggtggtgtacgaagcaggtgctttagaaaggatgcagggtgaaacaggtcccaacgtgggtctgatcagcatacagctagatcagtggagccctgcttttatggttcccgactcgtgcatggtgagtgagctgccctttgatgcccacgcccacatcttacctagggccggcaccgtcgctccagtgccgtgcacaactcttctcccttgccagacgctcttcttgaccgatgaggagaagcggctactcggtcaagagggagtctcactgccatcccacctgcctctgacaaaggccgaagagagggttctgaaaaaagtgcgcaggaagatccgaaacaagcagtcagctcaggatagtcgcagacgaaagaaggagtacatcgatgggcttgagagtcgcgtggctgcatgctccgctcagaaccaggaattgcagaaaaaagtccaggaattggagagacacaacattagcctggtggcccaactgagacaactccagacactgatagctcagaccagcaacaaagctgcccagacctccacgtgcgtcctgattttactgttctccctggcactcattattctgccaagtttctctcctttccaatcgagaccagaggccgggagcgaggattatcagccgcatggtgtcacctccaggaacatcctcactcacaaggacgtcaccgaaaatttggagacacaggtggtggagtcaagactaagagaaccccccggcgccaaagatgcgaacggatctactaggactttgctcgaaaagatgggagggaagccgcgaccatctggcagaatccgcagcgtcctgcacgccgacgaaatgtag

SEQ ID NO: 89226 - DNA, 1188 bp, Artificial Sequence
  derived and/or modified sequence
atggacctgggcatccccgacctgctggacgcctggctggagccccccgaagatattttcagcacaggcagcgttctggagctgggattgcactgcccccccccagaggttccagtgacaaggctgcaggagcagggcttgcagggttggaagtccggaggtgacagaggctgtggtctccaggagtccgagcctgaagactttttgaagctcttcattgaccccaatgaagtgtactgttccgaagcttcaccgggctcagatagtggaattagcgaagacccttgccacccggattctccacccgctcccagggccacatcgagcccgatgttgtacgaagtggtgtatgaggccggggctctggagagaatgcagggggagaccgggccaaacgtggggctcatttctatccagttagaccagtggagccctgcgttcatggtccctgactcttgcatggtgagcgagctaccattcgatgctcatgctcatatcctcccaagagctggtacagttgccccagttccttgcactaccctcctcccttgtcagaccctcttcctgaccgatgaggagaaacgtctcctcgggcaggagggagtcagtctcccttcacatctgcccctgacaaaagcggaggagagggtgctgaagaaagtgaggaggaagatacggaataagcagagcgcccaggatagtcgccgtcgaaagaaggaatatattgacggcctagagagtcgcgtggcggcctgcagcgcccagaatcaagaattgcagaagaaagtccaggagttggagagacataacatctccttggtggctcagctgagacagctccagacactcatcgcgcagacatcaaataaagccgctcagacctccacttgcgtacttatcctgctgttttccctggccctgattattttgcctagcttctctccttttcagagccgtcccgaggccggcagcgaggactaccagccccacggcgtgactagtcgaaacatcctgacacacaaggacgtcacagaaaatctggagactcaggttgtcgaaagcaggctccgggagccgcccggggccaaggacgccaacggcagcacaagaacgctcctggagaagatgggcggcaaaccaaggcccagcgggcggattcgctctgttttacacgcagatgaaatgtag

SEQ ID NO: 89227 - DNA, 549 bp, Artificial Sequence
  derived and/or modified sequence
atggacctgggcatccccgacctgctggacgcctggctggagccccccgaggatattttttctaccggcagcgtccttgagctaggcttgcactgtcctcctccagaggtaccggttacgaggctccaggagcagggactgcaggggtggaagagtggcggggaccgggggtgtggactccaagaatctgaacctgaggatttcctgaagctgtttattgaccctaacgaagtctactgctccgaggcctctccgggttccgatagtggtatctcagaggacccctgtcaccccgactcccccccggcacctcgggccacaagcagtcccatgctctacgaggtcgtgtacgaagccggcgcccttgaaagaatgcagggagaaaccggtccaaacgtgggcctgattagcatccaactggaccagtggtctccagccttcatggtcccggattcttgtatggtgtccgaactccctttcgatgcccacgctcacatcctgccgcgggccggtacagtggcccctgtgccgtgcactacgctcgtttag

SEQ ID NO: 89228 - DNA, 1188 bp, Artificial Sequence
  derived and/or modified sequence
atggatctggggatccctgacctactcgacgcttggttagaaccgccagaggacattttttcaacgggttccgtgctcgagttgggtctgcattgtcctccacccgaagttcctgtgacacgcctccaggagcaggggctccaaggctggaaatctgggggagatcgtggctgtggcctgcaggagtccgaaccagaggatttcctaaagctgtttatagaccctaatgaagtgtactgctcagaggcgtctcctggaagcgattccggcatatctgaggatccgtgtcaccccgacagcccacccgctccccgtgccacttcttcccctatgttgtacgaagttgtctatgaggcaggagctctcgagcgcatgcagggggaaaccgggcctaacgtgggcttgattagcatccagctcgatcagtggagtccagcatttatggtacctgactcctgcatggtaagcgaattgccattcgatgcgcacgcacatatcttgcctcgcgcaggaacagtggcccctgtgccttgtacaaccctcttgccatgtcagactctgttcctcaccgacgaggagaaacggctgttgggccaggagggggtgtctctgccctcacatctccccctaacaaaagcagaagagcgtgttttgaaaaaggtcagaagaaagatcagaaacaaacagtcagcacaggacagcagacgacggaagaaagagtatatagacgggctcgaaagcagagtggccgcttgctctgctcaaaatcaggagctgcaaaagaaagtccaggaactggagcggcacaatatcagcctggttgcgcagctgcgccagctccaaaccttgattgcccagacatccaacaaggccgctcagacctcgacctgtgtgctgatcctactatttagcctggctctgatcatcctgccatcgttttctccttttcaaagtaggcccgaggccggatccgaggactatcagccccacggggtgacatctcgcaatatcctgactcacaaggatgtgacagagaacctggagacccaggtggtcgaatcacgcctaagagaaccaccaggcgctaaggacgccaatggctctacaagaactcttctagaaaagatggggggtaaaccgaggcctagtggtcggatcaggagcgtgttgcacgccgacgaaatgtag

SEQ ID NO: 89229 - DNA, 654 bp, Artificial Sequence
  derived and/or modified sequence
atggacctaggcataccagacctgcttgacgcctggctagaaccaccagaggatatcttcagtacgggcagtgtactggaactggggttacactgtccgcctcccgaggtcccagtgacgagacttcaagagcaaggactccaagggtggaagtctggaggcgatcgaggttgtggtttgcaggaaagtgagcccgaagactttctcaagctattcattgaccctaacgaggtgtattgctccgaagctagcccgggatctgattcagggatttccgaggatccctgccaccctgactctccacctgccccacgggctacttcatctccaatgctgtatgaagttgtgtacgaagccggtgccctggagcgaatgcagggcgaaacaggaccgaatgtgggccttatatcaatacaactagatcagtggtcacctgcttttatggtgccagattcatgcatggtttcagaattgccgtttgatgcccacgcccacatcttgcctcgagccggaacagttgctccggtgccttgcacaactcttctgccctgtcagaccctcttcctcacagatgaagagaaacgacttctcgggcaagagggcgtgagtctgcccagccacctgcccctgacaaaggtgacttgttttccttag

SEQ ID NO: 89230 - DNA, 1188 bp, Artificial Sequence
  derived and/or modified sequence
atggatttgggcatcccggacctattagatgcctggttggagcctcctgaggatatcttcagcacaggcagcgtactcgagctgggattgcactgtccacctcctgaggtccctgtcactaggctccaggaacagggactgcagggatggaagtccggaggcgatcggggatgtggtctgcaggagtccgaacccgaagacttcctcaaactctttatcgatcccaatgaggtgtactgctccgaggcttcccccggttcagacagcggaattagtgaggatccctgccaccctgattcgccaccagctcctcgcgctacctcctctcccatgctgtacgaagtggtatatgaggctggtgcactcgagagaatgcagggggagacgggcccaaacgttggcctcatctcgattcagttggaccaatggtcgccggcttttatggtgcccgactcttgcatggttagcgagttgccatttgatgcgcacgcccacattttaccaagggcaggaaccgtagcccctgtcccttgtacgacactgctaccctgtcagaccttgtttctcacagatgaagagaaacgcctgctgggccaggagggtgtttcactcccgtctcacctgcccttaactaaggcagaagaacgtgtgctgaagaaagtgcggcgtaaaattcgcaacaagcagagcgcccaggactcccgacgccgtaaaaaagagtatatcgacgggttagaatctagagtcgccgcttgttcggcccagaaccaggaattgcagaagaaggtgcaggaactggagcgacataatatctccttggtagctcaacttcgccagctgcagacgttgattgcgcaaacttctaacaaggccgcacagacaagtacctgtgttctgatccttctgtttagcctcgctctcataatcctccccagcttcagcccgttccaatcccggccagaggccggttcagaggactaccagccacatggtgttacatctcgaaatatactaacacacaaagacgtcaccgaaaacctggaaacacaggtagttgaaagtcgtctccgtgaaccgccaggagccaaggacgccaatggctctaccagaaccctgctggagaagatgggcggaaagcctcggcctagtggacgaatcagaagcgtgctgcacgctgatgagatgtag

SEQ ID NO: 89231 - DNA, 1188 bp, Artificial Sequence
  derived and/or modified sequence
atggatctgggtataccagacctgctagatgcctggctcgaacctccggaagacatcttcagcactggctctgtcttagagctcggcctgcattgtccccctcccgaagttcctgtgaccagactacaagagcagggcctccagggatggaagtccggtggagaccggggatgcggcctgcaagagtctgagcctgaagatttcttaaaactgttcatcgatccaaacgaggtctactgctccgaagcttcgccaggatccgattctggaatcagcgaagacccttgtcaccctgattcccccccagcccctcgcgctacttcatctcctatgctttatgaagttgtgtacgaagccggtgccctggagcgcatgcagggagagaccggacctaatgttggcctcatttccatacaactggatcagtggagtccggcattcatggttcccgattcctgcatggtcagtgagcttccctttgacgcccacgcacatatcctgccacgggcaggcaccgtggcacccgtgccgtgtacaactctactaccctgtcaaacactgttccttaccgatgaagagaagaggttgctgggtcaggaaggtgtgtcactgccatcccacttacccttgacaaaagcagaagaacgtgttcttaagaaagtgaggcggaagattagaaataaacagagtgcccaggacagtagacgcaggaaaaaggagtatattgacggcctggagagtcgggtggccgcttgttcggcacagaatcaggaattgcagaagaaagtgcaggaattagaaaggcacaacattagcctggtggcccagctacgccagctccagacacttatagcacagacttctaacaaggccgcacagacctctacgtgcgttctgattctgttgttctcactggcacttattatactcccttctttttccccattccagtccaggcctgaggctggcagcgaagactatcagcctcatggcgttaccagtaggaacatcctcactcataaggacgttacagaaaatcttgaaacccaggttgtcgagagtagactaagggagccgccaggagcgaaagacgccaacggaagcaccagaacactattggagaagatggggggtaagccccgtccatcaggtagaattaggtccgttttgcatgccgacgagatgtag

SEQ ID NO: 89232 - DNA, 549 bp, Artificial Sequence
  derived and/or modified sequence
atggatttgggcatccctgacttattggacgcctggttggagccacctgaggacatatttagcacgggctcagtgcttgagctgggcttacattgtccaccacctgaggtaccagtcactcggctgcaggagcagggcctacaaggatggaagtcaggtggggatcggggttgtgggttgcaggaatcagaaccagaggactttttaaaactgtttatagatcccaatgaagtctattgtagtgaagccagtccaggatccgatagcgggatatccgaggatccatgtcatccagactcacccccagcccctcgggcaaccagctctcctatgctttatgaggtggtttatgaggccggagccttagaacgaatgcagggggagacaggtccaaatgtggggctcatatctatccagctggatcagtggagtcccgcattcatggtgcctgattcttgcatggtgagcgaactgccattcgacgcacatgcacatatcctgcccagagctggcacagtagctccagtgccctgcaccacgctggtatag

SEQ ID NO: 89233 - DNA, 1750 bp, Artificial Sequence
  derived and/or modified sequence
ccatgatctccctcttgcaaaagcgagggctacagaacaggcattcaggagtcctgtgctccagtcacagccttttctgttcttcagctaggagacaccaaaccctcaggaagatttactatagctaagagaaaactgcagcagaaagggcgcggctacctacttcttaaattccgtttgtggaccctcagactcttagtcccctactcccagatacagcggccctaccgtggctcctggcaaggtggcatccacttttgtagtaagcatggatctcggaatccctgacctgctggacgcgtggctggagcccccagaggatatcttctcgacaggatccgtcctggagctgggactccactgcccccctccagaggttccggtaactaggctacaggaacagggactgcaaggctggaagtccggtggggaccgtggctgtggccttcaagagagtgagcctgaagatttcttgaagcttttcattgatcccaatgaggtgtactgctcagaagcatctcctggcagtgacagtggcatctctgaggacccctgccatccagacagtccccctgcccccagggcaaccagttctcctatgctctatgaggttgtctatgaggcaggggccctggagaggatgcagggggaaactgggccaaatgtaggccttatctccatccagctagatcagtggagcccagcatttatggtgcctgattcctgcatggtcagtgagctgccctttgatgctcatgcccacatcctgcccagagcaggcaccgtagccccagtgccctgtacaaccctgctgccctgtcaaaccctgttcctgaccgatgaggagaagcgtctgctggggcaggaaggggtttccctgccctctcacctgcccctcaccaaggcagaggagagggtcctcaagaaggtcaggaggaaaatccgtaacaagcagtcagctcaggacagtcggcggcggaagaaggagtacattgatgggctggagagcagggtggcagcctgttctgcacagaaccaagaattacagaaaaaagtccaggagctggagaggcacaacatctccttggtagctcagctccgccagctgcagacgctaattgctcaaacttccaacaaagctgcccagaccagcacttgtgttttgattcttcttttttccctggctctcatcatcctgcccagcttcagtccattccagagtcgaccagaagctgggtctgaggattaccagcctcacggagtgacttccagaaatatcctgacccacaaggacgtaacagaaaatctggagacccaagtggtagagtccagactgagggagccacctggagccaaggatgcaaatggctcaacaaggacactgcttgagaagatgggagggaagccaagacccagtgggcgcatccggtccgtgctgcatgcagatgagatgtgagctggaacagaccttcctggcccacttcctgatcacaaggaatcctgggcttccttatggctttgcttcccactgggattcctacttaggtgtctgccctcaggggtccaaatcacttcaggacaccccaagagatgtcctttagtctctgcctgaggcctagtctgcatttgtttgcatatatgagagggtacctcaaatacttctgttatgtatctgtgattttatttcttctttgggtatagggttgaggggaaataagttttgagtgagaaataaacgttttagctgaaa

SEQ ID NO: 89234 - DNA, 950 bp, Artificial Sequence
  derived and/or modified sequence
agaaagaaaaggtgtagtgtttggggaggtcaacgggctatgctggcttgacagggctgggctcttcagaacagaagcatggatctcggaatccctgacctgctggacgcgtggctggagcccccagaggatatcttctcgacaggatccgtcctggagctgggactccactgcccccctccagaggttccggtaactaggctacaggaacagggactgcaaggctggaagtccggtggggaccgtggctgtggccttcaagagagtgagcctgaagatttcttgaagcttttcattgatcccaatgaggtgtactgctcagaagcatctcctggcagtgacagtggcatctctgaggacccctgccatccagacagtccccctgcccccagggcaaccagttctcctatgctctatgaggttgtctatgaggcaggggccctggagaggatgcagggggaaactgggccaaatgtaggccttatctccatccagctagatcagtggagcccagcatttatggtgcctgattcctgcatggtcagtgagctgccctttgatgctcatgcccacatcctgcccagagcaggcaccgtagccccagtgccctgtacaaccctgctgccctgtcaaaccctgttcctgaccgatgaggagaagcgtctgctggggcaggaaggggtttccctgccctctcacctgcccctcaccaaggtaacatgcttcccctaagggtatcccaacccaggggcctcaccatgacctctgaggggccaatatcccaggagaagcattggggagttgggggcaggtgaaggacccaggactcacacatcctgggcctccaaggcagaggagagggtcctcaagaaggtcaggaggaaaatccgtaacaagcagtcagctcaggacagtcggcggcggaagaaggagtacattgatgggctgga

SEQ ID NO: 89235 - DNA, 1557 bp, Artificial Sequence
  derived and/or modified sequence
agaaagaaaaggtgtagtgtttggggaggtcaacgggctatgctggcttgacagggctgggctcttcagaacagaagcatggatctcggaatccctgacctgctggacgcgtggctggagcccccagaggatatcttctcgacaggatccgtcctggagctgggactccactgcccccctccagaggttccggtaactaggctacaggaacagggactgcaaggctggaagtccggtggggaccgtggctgtggccttcaagagagtgagcctgaagatttcttgaagcttttcattgatcccaatgaggtgtactgctcagaagcatctcctggcagtgacagtggcatctctgaggacccctgccatccagacagtccccctgcccccagggcaaccagttctcctatgctctatgaggttgtctatgaggcaggggccctggagaggatgcagggggaaactgggccaaatgtaggccttatctccatccagctagatcagtggagcccagcatttatggtgcctgattcctgcatggtcagtgagctgccctttgatgctcatgcccacatcctgcccagagcaggcaccgtagccccagtgccctgtacaaccctgctgccctgtcaaaccctgttcctgaccgatgaggagaagcgtctgctggggcaggaaggggtttccctgccctctcacctgcccctcaccaaggcagaggagagggtcctcaagaaggtcaggaggaaaatccgtaacaagcagtcagctcaggacagtcggcggcggaagaaggagtacattgatgggctggagagcagggtggcagcctgttctgcacagaaccaagaattacagaaaaaagtccaggagctggagaggcacaacatctccttggtagctcagctccgccagctgcagacgctaattgctcaaacttccaacaaagctgcccagaccagcacttgtgttttgattcttcttttttccctggctctcatcatcctgcccagcttcagtccattccagagtcgaccagaagctgggtctgaggattaccagcctcacggagtgacttccagaaatatcctgacccacaaggacgtaacagaaaatctggagacccaagtggtagagtccagactgagggagccacctggagccaaggatgcaaatggctcaacaaggacactgcttgagaagatgggagggaagccaagacccagtgggcgcatccggtccgtgctgcatgcagatgagatgtgagctggaacagaccttcctggcccacttcctgatcacaaggaatcctgggcttccttatggctttgcttcccactgggattcctacttaggtgtctgccctcaggggtccaaatcacttcaggacaccccaagagatgtcctttagtctctgcctgaggcctagtctgcatttgtttgcatatatgagagggtacctcaaatacttctgttatgtatctgtgattttatttcttctttgggtatagggttgaggggaaataagttttgagtgagaaataaacgttttagctg

SEQ ID NO: 89236 - DNA, 1752 bp, Artificial Sequence
  derived and/or modified sequence
cctttgtttacaaccctgccatgatctccctcttgcaaaagcgagggctacagaacaggcattcaggagtcctgtgctccagtcacagccttttctgttcttcagctaggagacaccaaaccctcaggaagatttactatagctaagagaaaactgcagcagaaagggcgcggctacctacttcttaaattccgtttgtggaccctcagactcttagtcccctactcccagatacagcggccctaccgtggctcctggcaagaagcatggatctcggaatccctgacctgctggacgcgtggctggagcccccagaggatatcttctcgacaggatccgtcctggagctgggactccactgcccccctccagaggttccggtaactaggctacaggaacagggactgcaaggctggaagtccggtggggaccgtggctgtggccttcaagagagtgagcctgaagatttcttgaagcttttcattgatcccaatgaggtgtactgctcagaagcatctcctggcagtgacagtggcatctctgaggacccctgccatccagacagtccccctgcccccagggcaaccagttctcctatgctctatgaggttgtctatgaggcaggggccctggagaggatgcagggggaaactgggccaaatgtaggccttatctccatccagctagatcagtggagcccagcatttatggtgcctgattcctgcatggtcagtgagctgccctttgatgctcatgcccacatcctgcccagagcaggcaccgtagccccagtgccctgtacaaccctgctgccctgtcaaaccctgttcctgaccgatgaggagaagcgtctgctggggcaggaaggggtttccctgccctctcacctgcccctcaccaaggcagaggagagggtcctcaagaaggtcaggaggaaaatccgtaacaagcagtcagctcaggacagtcggcggcggaagaaggagtacattgatgggctggagagcagggtggcagcctgttctgcacagaaccaagaattacagaaaaaagtccaggagctggagaggcacaacatctccttggtagctcagctccgccagctgcagacgctaattgctcaaacttccaacaaagctgcccagaccagcacttgtgttttgattcttcttttttccctggctctcatcatcctgcccagcttcagtccattccagagtcgaccagaagctgggtctgaggattaccagcctcacggagtgacttccagaaatatcctgacccacaaggacgtaacagaaaatctggagacccaagtggtagagtccagactgagggagccacctggagccaaggatgcaaatggctcaacaaggacactgcttgagaagatgggagggaagccaagacccagtgggcgcatccggtccgtgctgcatgcagatgagatgtgagctggaacagaccttcctggcccacttcctgatcacaaggaatcctgggcttccttatggctttgcttcccactgggattcctacttaggtgtctgccctcaggggtccaaatcacttcaggacaccccaagagatgtcctttagtctctgcctgaggcctagtctgcatttgtttgcatatatgagagggtacctcaaatacttctgttatgtatctgtgattttatttcttctttgggtatagggttgaggggaaataagttttgagtgagaaataaacgttttagctgaaattgt

SEQ ID NO: 89237 - DNA, 602 bp, Artificial Sequence
  derived and/or modified sequence
ggtaatgcttggggggggcctctttgtctaaacctgagggatagggctgaagaagcatggatctcggaatccctgacctgctggacgcgtggctggagcccccagaggatatcttctcgacaggatccgtcctggagctgggactccactgcccccctccagaggttccggtaactaggctacaggaacagggactgcaaggctggaagtccggtggggaccgtggctgtggccttcaagagagtgagcctgaagatttcttgaagcttttcattgatcccaatgaggtgtactgctcagaagcatctcctggcagtgacagtggcatctctgaggacccctgccatccagacagtccccctgcccccagggcaaccagttctcctatgctctatgaggttgtctatgaggcaggggccctggagaggatgcagggggaaactgggccaaatgtaggccttatctccatccagctagatcagtggagcccagcatttatggtgcctgattcctgcatggtcagtgagctgccctttgatgctcatgcccacatcctgcccagagcaggcaccgtagccccagtgccctgtacaaccctggtg

SEQ ID NO: 89238 - DNA, 1188 bp, Artificial Sequence
  derived and/or modified sequence
atggacctgggcatccccgacctgctggacgcctggctggagccccccgaggacatcttcagcaccggcagcgtgctggagctgggcctgcactgccccccccccgaggtgcccgtgaccagactgcaggagcagggcctgcagggctggaagagcggcggcgacagaggctgcggcctgcaggagagcgagcccgaggacttcctgaagctgttcatcgaccccaacgaggtgtactgcagcgaggccagccccggcagcgacagcggcatcagcgaggacccctgccaccccgacagcccccccgcccccagagccaccagcagccccatgctgtacgaggtggtgtacgaggccggcgccctggagagaatgcagggcgagaccggccccaacgtgggcctgatcagcatccagctggaccagtggagccccgccttcatggtgcccgacagctgcatggtgagcgagctgcccttcgacgcccacgcccacatcctgcccagagccggcaccgtggcccccgtgccctgcaccaccctgctgccctgccagaccctgttcctgaccgacgaggagaagagactgctgggccaggagggcgtgagcctgcccagccacctgcccctgaccaaggccgaggagagagtgctgaagaaggtgagaagaaagatcagaaacaagcagagcgcccaggacagcagaagaagaaagaaggagtacatcgacggcctggagagcagagtggccgcctgcagcgcccagaaccaggagctgcagaagaaggtgcaggagctggagagacacaacatcagcctggtggcccagctgagacagctgcagaccctgatcgcccagaccagcaacaaggccgcccagaccagcacctgcgtgctgatcctgctgttcagcctggccctgatcatcctgcccagcttcagccccttccagagcagacccgaggccggcagcgaggactaccagccccacggcgtgaccagcagaaacatcctgacccacaaggacgtgaccgagaacctggagacccaggtggtggagagcagactgagagagccccccggcgccaaggacgccaacggcagcaccagaaccctgctggagaagatgggcggcaagcccagacccagcggcagaatcagaagcgtgctgcacgccgacgagatgtag

SEQ ID NO: 89239 - DNA, 654 bp, Artificial Sequence
  derived and/or modified sequence
atggacctgggcatccccgacctgctggacgcctggctggagccccccgaggacatcttcagcaccggcagcgtgctggagctgggcctgcactgccccccccccgaggtgcccgtgaccagactgcaggagcagggcctgcagggctggaagagcggcggcgacagaggctgcggcctgcaggagagcgagcccgaggacttcctgaagctgttcatcgaccccaacgaggtgtactgcagcgaggccagccccggcagcgacagcggcatcagcgaggacccctgccaccccgacagcccccccgcccccagagccaccagcagccccatgctgtacgaggtggtgtacgaggccggcgccctggagagaatgcagggcgagaccggccccaacgtgggcctgatcagcatccagctggaccagtggagccccgccttcatggtgcccgacagctgcatggtgagcgagctgcccttcgacgcccacgcccacatcctgcccagagccggcaccgtggcccccgtgccctgcaccaccctgctgccctgccagaccctgttcctgaccgacgaggagaagagactgctgggccaggagggcgtgagcctgcccagccacctgcccctgaccaaggtgacctgcttcccctag

SEQ ID NO: 89240 - DNA, 549 bp, Artificial Sequence
  derived and/or modified sequence
atggacctgggcatccccgacctgctggacgcctggctggagccccccgaggacatcttcagcaccggcagcgtgctggagctgggcctgcactgccccccccccgaggtgcccgtgaccagactgcaggagcagggcctgcagggctggaagagcggcggcgacagaggctgcggcctgcaggagagcgagcccgaggacttcctgaagctgttcatcgaccccaacgaggtgtactgcagcgaggccagccccggcagcgacagcggcatcagcgaggacccctgccaccccgacagcccccccgcccccagagccaccagcagccccatgctgtacgaggtggtgtacgaggccggcgccctggagagaatgcagggcgagaccggccccaacgtgggcctgatcagcatccagctggaccagtggagccccgccttcatggtgcccgacagctgcatggtgagcgagctgcccttcgacgcccacgcccacatcctgcccagagccggcaccgtggcccccgtgccctgcaccaccctggtgtag

SEQ ID NO: 89241 - DNA, 744 bp, Artificial Sequence
  derived and/or modified sequence
atgcgcggaaatctggctctcgtcggagtgctgattagcctggctttcctgagcctattgccatctggacatccacagcctgccggggacgatgcttgctctgtgcagatcttggtacctggtttgaaaggcgacgccggagagaagggcgacaaaggcgcccctggccggcccggccgtgtgggacccaccggagaaaagggcgagaagggcgattcgggggatatcggtcctcctgggccgaacggtgaacccggtcttccctgtgagtgttcccagctgaggaaggctatcggtgagatggacaatcaggtatcacagctcacatccgagctaaagtttatcaagaatgcagtagcaggcgttcgtgagactgagtcaaagatttatctgctggtgaaggaggaaaaaagatacgcagatgcccagctatcctgccagggcagaggcggcactctatctatgccaaaagacgaggcggccaacggtttaatggctgcctatctggcccaggccgggctcgctcgcgtgttcatcggcattaatgatctggaaaaagaaggagctttcgtttattccgaccatagtcccatgcggactttcaataagtggcggtccggagaaccaaataacgcatacgacgaagaggactgcgtggagatggtagcctcgggcggctggaatgacgtggcatgtcataccacgatgtactttatgtgcgaatttgataaggaaaatatgtag

SEQ ID NO: 89242 - DNA, 744 bp, Artificial Sequence
  derived and/or modified sequence
atgaggggcaacctggccctggtgggcgtgctgatcagcctggccttcctgagcctgctgcccagcggccacccccagcctgctggagatgatgcctgcagcgtgcagatcctggtgcccggcctgaagggagatgctggggagaagggggacaagggggcccctggccggcccggccgggtgggccccaccggggagaagggggagaagggggacagcggggacatcggccccccaggccccaacggggagcccggcctgccctgtgagtgcagccagctgaggaaggccatcggggagatggacaaccaggtgtcccagctgaccagcgagctgaagttcatcaagaatgctgtggccggcgtgcgggagacagagagcaagatctacctgctggtgaaggaggagaagagatatgcagatgcccagctgagctgccagggccggggcggcaccctgtccatgcccaaggatgaggccgccaacggcctgatggccgcctacctggcccaggccggcctggcccgggtcttcatcggcatcaatgacctggagaaggagggcgcctttgtgtacagcgaccacagccccatgaggaccttcaacaagtggaggtctggagagcccaacaatgcctatgatgaggaggactgtgtggagatggtggccagcggcggctggaatgatgtggcctgccacaccaccatgtacttcatgtgtgaatttgacaaggagaacatgtag

SEQ ID NO: 89243 - DNA, 744 bp, Artificial Sequence
  derived and/or modified sequence
atgcggggcaacctggccctggtgggcgtgctgatcagcctggcctttctttccttactgccgagcggacatcctcaaccggctggagatgacgcctgttccgttcagattctggtacctggcctcaaaggcgatgctggggaaaaaggcgataagggcgcccctggtcgcccaggaagagtgggccccactggtgagaaaggcgaaaaaggggacagcggggacatcggacctccaggccccaacggggaaccagggttgccttgtgagtgctcccagctgagaaaagctatcggtgaaatggataatcaggtgagccagttgacttccgagttgaagttcatcaaaaacgccgttgcaggcgtgagggagaccgagagtaaaatatacctgctggtgaaggaggagaagagatatgcagacgcgcaactgtcttgtcagggccgggggggcacactgagcatgcccaaggacgaggctgccaatggtttaatggccgcttacttagcccaggctggtttggccagggtcttcattggtataaatgatctggagaaggagggcgccttcgtgtacagcgatcatagcccaatgcgcaccttcaataaatggcggagcggggaacccaataacgcctacgacgaagaagattgcgttgagatggtcgcatctggaggctggaacgatgtcgcctgccataccacgatgtacttcatgtgtgagtttgacaaagagaacatgtag

SEQ ID NO: 89244 - DNA, 744 bp, Artificial Sequence
  derived and/or modified sequence
atgcgaggaaacctggccctcgtaggtgtcctgatttccctggcttttctctctttgctaccttccggacacccccaacccgctggggacgatgcgtgttcagtgcagattttagtgcccggacttaagggagatgccggtgagaaaggggacaaaggcgcacccggacgaccgggacgcgttggaccgacgggtgaaaaaggggagaagggtgattctggggatataggaccaccaggtcctaatggggaacccggactaccttgcgaatgtagccaacttcggaaagcaatcggcgaaatggataatcaggtgtctcagcttacatccgagctcaaattcattaaaaacgctgtcgccggagtacgcgagacagagagcaaaatctacctcctcgtgaaggaggagaagcggtatgccgacgcacagcttagctgtcagggaaggggaggcacgctctccatgccgaaggacgaggccgctaacggacttatggcagcttacctagcccaggcgggactggccagagttttcataggaatcaacgatttggaaaaggaaggggcatttgtgtacagtgatcatagcccaatgcgcacttttaacaagtggcgatccggtgagccaaacaacgcctacgacgaagaggattgcgtggaaatggtagccagcggcggatggaatgatgtggcttgccatacaaccatgtactttatgtgcgaattcgacaaggagaacatgtag

SEQ ID NO: 89245 - DNA, 744 bp, Artificial Sequence
  derived and/or modified sequence
atgagaggcaacctggccctggtgggcgtgctgatcagcctggccttcctgagcctgctgcccagcggccacccccagcccgccggcgacgacgcctgcagcgtgcagatcctggtgcccggcctgaagggcgacgccggcgagaagggcgacaagggcgcccccggcagacccggcagagtgggccccaccggcgagaagggcgagaagggcgacagcggcgacatcggcccccccggccccaacggcgagcccggcctgccctgcgagtgcagccagctgagaaaggccatcggcgagatggacaaccaggtgagccagctgaccagcgagctgaagttcatcaagaacgccgtggccggcgtgagagagaccgagagcaagatctacctgctggtgaaggaggagaagagatacgccgacgcccagctgagctgccagggcagaggcggcaccctgagcatgcccaaggacgaggccgccaacggcctgatggccgcctacctggcccaggccggcctggccagagtgttcatcggcatcaacgacctggagaaggagggcgccttcgtgtacagcgaccacagccccatgagaaccttcaacaagtggagaagcggcgagcccaacaacgcctacgacgaggaggactgcgtggagatggtggccagcggcggctggaacgacgtggcctgccacaccaccatgtacttcatgtgcgagttcgacaaggagaacatgtag

SEQ ID NO: 89246 - protein, 271 aa, Artificial Sequence
  derived and/or modified sequence
MRGNLALVGVLISLAFLSLLPSGHPQPAGDDACSVQILVPGLKGDAGEKGDKGAPGRPGRVGPTGEKGDMGDKGQKGSVGRHGKIGPIGSKGEKGDSGDIGPPGPNGEPGLPCECSQLRKAIGEMDNQVSQLTSELKFIKNAVAGVRETESKIYLLVKEEKRYADAQLSCQGRGGTLSMPKDEAANGLMAAYLAQAGLARVFIGINDLEKEGAFVYSDHSPMRTFNKWRSGEPNNAYDEEDCVEMVASGGWNDVACHTTMYFMCEFDKENM

SEQ ID NO: 89247 - protein, 285 aa, Artificial Sequence
  derived and/or modified sequence
MKKQRGVGVLPALRMRGNLALVGVLISLAFLSLLPSGHPQPAGDDACSVQILVPGLKGDAGEKGDKGAPGRPGRVGPTGEKGDMGDKGQKGSVGRHGKIGPIGSKGEKGDSGDIGPPGPNGEPGLPCECSQLRKAIGEMDNQVSQLTSELKFIKNAVAGVRETESKIYLLVKEEKRYADAQLSCQGRGGTLSMPKDEAANGLMAAYLAQAGLARVFIGINDLEKEGAFVYSDHSPMRTFNKWRSGEPNNAYDEEDCVEMVASGGWNDVACHTTMYFMCEFDKENM

SEQ ID NO: 89248 - DNA, 858 bp, Artificial Sequence
  derived and/or modified sequence
atgaaaaagcagcgcggggttggcgttctgcctgcacttcgcatgcggggcaatctggctctggtaggcgtccttatatccttagcattcttgtctctcctaccgagtggccacccccaacccgcaggagacgatgcctgctcagtacaaatcctcgtgccgggactcaaaggggacgctggggaaaaaggcgacaagggagcaccaggccgtcccgggagggtagggccgactggagaaaaaggggacatgggtgacaagggccaaaaaggcagcgtcggcagacatggcaagatcggtccaatcggttctaaaggcgaaaagggggattccggggacatcggaccccccggccccaatggagagccaggactgccttgcgaatgcagccagctccgtaaggctatcggcgaaatggataatcaagtatcccagttgacctcggaactaaaatttattaagaatgcggtcgccggtgtgcgagaaacggaatccaaaatctacctgttggtgaaggaggaaaaacgatatgccgatgcccagctatcctgtcagggcagaggcggaacactctcgatgcctaaagacgaggcagccaacgggctcatggcggcttatctcgcacaagccggtttggctcgcgtttttatcggcatcaatgacctggagaaggaaggcgcctttgtttactccgatcacagccctatgcggacgtttaacaaatggaggtccggggaacctaacaacgcttacgacgaggaggactgtgtcgagatggttgcctcagggggatggaatgacgtcgcttgccataccacaatgtatttcatgtgcgaatttgataaggaaaatatgtag

SEQ ID NO: 89249 - DNA, 858 bp, Artificial Sequence
  derived and/or modified sequence
atgaagaagcagaggggcgtgggcgtgctgcctgccctgaggatgaggggcaacctggccctggtgggcgtgctgatcagcctggccttcctgagcctgctgcccagcggccacccccagcctgctggagatgatgcctgcagcgtgcagatcctggtgcccggcctgaagggagatgctggggagaagggggacaagggggcccctggccggcccggccgggtgggccccaccggggagaagggggacatgggagacaagggccagaagggctctgtgggccgccacggcaagattggccccatcggcagcaaaggagagaagggggacagcggggacatcggccccccaggccccaacggggagcccggcctgccctgtgagtgcagccagctgaggaaggccatcggggagatggacaaccaggtgtcccagctgaccagcgagctgaagttcatcaagaatgctgtggccggcgtgcgggagacagagagcaagatctacctgctggtgaaggaggagaagagatatgcagatgcccagctgagctgccagggccggggcggcaccctgtccatgcccaaggatgaggccgccaacggcctgatggccgcctacctggcccaggccggcctggcccgggtcttcatcggcatcaatgacctggagaaggagggcgcctttgtgtacagcgaccacagccccatgaggaccttcaacaagtggaggtctggagagcccaacaatgcctatgatgaggaggactgtgtggagatggtggccagcggcggctggaatgatgtggcctgccacaccaccatgtacttcatgtgtgaatttgacaaggagaacatgtag

SEQ ID NO: 89250 - DNA, 858 bp, Artificial Sequence
  derived and/or modified sequence
atgaagaagcagcggggcgtgggcgtgctgcccgccctgcggatgcgtgggaacctcgctttggtcggagttttaattagcctcgcgtttttgtctttacttcccagtggacaccctcaacccgccggggatgatgcctgttccgtgcagatcttggtcccaggcctgaagggcgacgccggtgagaaaggggataagggagctcccgggaggccaggaagggtggggccgactggtgaaaagggcgacatgggcgataaaggtcagaaggggagtgtcggccgtcatgggaagatcggcccaatcggttccaagggcgaaaaaggggactccggtgacattgggcctcccggcccaaatggagagccaggcttaccatgcgagtgttcacagttaaggaaggcaattggagagatggataatcaagtcagtcagctgacctctgagctcaagtttataaagaacgccgtagctggggtgcgagaaaccgagtctaagatctatctgctggtgaaagaagaaaaacggtatgccgacgctcaattatcctgccagggccggggaggaactctgtcaatgcctaaggacgaggcagcaaacggactgatggccgcctatctggcccaggcggggctggctagagtgttcatcggcattaacgacctggagaaggaaggagccttcgtgtactccgatcactctcccatgcgcacgttcaacaaatggaggagcggggagcccaataacgcctacgacgaggaggactgcgtcgagatggtggcttccgggggatggaacgatgttgcctgccatactacgatgtacttcatgtgtgagtttgataaggaaaacatgtag

SEQ ID NO: 89251 - DNA, 858 bp, Artificial Sequence
  derived and/or modified sequence
atgaaaaaacagaggggtgttggcgtccttcccgctcttcgcatgaggggcaatctcgccctggtgggtgtgcttattagcctcgctttcctgtcccttcttccgtccgggcatccccaaccagccggagatgacgcctgctccgtgcagattttggtcccaggcctcaaaggagacgcaggagagaaaggggataaaggtgccccaggacgcccaggtagagtgggaccgaccggggagaaaggagacatgggcgacaaaggacaaaaggggagcgtgggtcgtcacggcaaaattggccctatcgggagcaagggcgagaagggtgacagtggggacatcgggcctccagggcctaatggtgaacccggactgccttgcgagtgcagccagctgcggaaagctatcggagagatggataatcaggttagccagctgacatcagagctgaagttcataaagaacgcagttgccggtgtgcgggaaaccgaaagtaaaatatacctgttggtgaaagaggagaagcgctacgcagacgcccagctctcttgccagggcagaggcggtactctgtctatgcctaaagacgaggccgcaaacgggctaatggctgcgtacctggcacaggcgggtcttgctagggtgttcattggaatcaacgatttggagaaggaaggcgcatttgtatattctgatcatagtcccatgagaaccttcaacaagtggagatccggggaaccaaataatgcatatgatgaggaggattgcgtggagatggtggcctcagggggatggaacgatgtcgcctgccacactacgatgtactttatgtgcgagtttgataaggaaaatatgtag

SEQ ID NO: 89252 - DNA, 1259 bp, Artificial Sequence
  derived and/or modified sequence
gccatgaggcgcctgggggcagtgtcctcgcgggccagcgacgggcaggacgccccgttcgcctagcgcgtgctcaggagttggtgtcctgcctgcgctcaggatgagggggaatctggccctggtgggcgttctaatcagcctggccttcctgtcactgctgccatctggacatcctcagccggctggcgatgacgcctgctctgtgcagatcctcgtccctggcctcaaaggggatgcgggagagaagggagacaaaggcgcccccggacggcctggaagagtcggccccacgggagaaaaaggagacatgggggacaaaggacagaaaggcagtgtgggtcgtcatggaaaaattggtcccattggctctaaaggtgagaaaggagattccggtgacataggaccccctggtcctaatggagaaccaggcctcccatgtgagtgcagccagctgcgcaaggccatcggggagatggacaaccaggtctctcagctgaccagcgagctcaagttcatcaagaatgctgtcgccggtgtgcgcgagacggagagcaagatctacctgctggtgaaggaggagaagcgctacgcggacgcccagctgtcctgccagggccgcgggggcacgctgagcatgcccaaggacgaggctgccaatggcctgatggccgcatacctggcgcaagccggcctggcccgtgtcttcatcggcatcaacgacctggagaaggagggcgccttcgtgtactctgaccactcccccatgcggaccttcaacaagtggcgcagcggtgagcccaacaatgcctacgacgaggaggactgcgtggagatggtggcctcgggcggctggaacgacgtggcctgccacaccaccatgtacttcatgtgtgagtttgacaaggagaacatgtgagcctcaggctggggctgcccattgggggccccacatgtccctgcagggttggcagggacagagcccagaccatggtgccagccagggagctgtccctctgtgaagggtggaggctcactgagtagagggctgttgtctaaactgagaaaatggcctatgcttaagaggaaaatgaaagtgttcctggggtgctgtctctgaagaagcagagtttcattacctgtattgtagccccaatgtcattatgtaattattacccagaattgctcttccataaagcttgtgcctttgtccaagctatacaataaaatctttaagtagtgcagtagttaagtccaaa

SEQ ID NO: 89253 - DNA, 1303 bp, Artificial Sequence
  derived and/or modified sequence
agatttgggagaaggatttcaaatgacttcccttcgagctgcagggctatcttgggcatcttgacctccacacatttctgggagaactcctcgtgcagcaggacatcaggtggcaaaggtgatctgcccacctcagcctcccaaagtgctggaattacaggtgtgagccactgcgcctggtcttgttttccaagttgtaacgcccttcacgatgaagaaacaaagaggagttggtgtcctgcctgcgctcaggatgagggggaatctggccctggtgggcgttctaatcagcctggccttcctgtcactgctgccatctggacatcctcagccggctggcgatgacgcctgctctgtgcagatcctcgtccctggcctcaaaggggatgcgggagagaagggagacaaaggcgcccccggacggcctggaagagtcggccccacgggagaaaaaggagacatgggggacaaaggacagaaaggcagtgtgggtcgtcatggaaaaattggtcccattggctctaaaggtgagaaaggagattccggtgacataggaccccctggtcctaatggagaaccaggcctcccatgtgagtgcagccagctgcgcaaggccatcggggagatggacaaccaggtctctcagctgaccagcgagctcaagttcatcaagaatgctgtcgccggtgtgcgcgagacggagagcaagatctacctgctggtgaaggaggagaagcgctacgcggacgcccagctgtcctgccagggccgcgggggcacgctgagcatgcccaaggacgaggctgccaatggcctgatggccgcatacctggcgcaagccggcctggcccgtgtcttcatcggcatcaacgacctggagaaggagggcgccttcgtgtactctgaccactcccccatgcggaccttcaacaagtggcgcagcggtgagcccaacaatgcctacgacgaggaggactgcgtggagatggtggcctcgggcggctggaacgacgtggcctgccacaccaccatgtacttcatgtgtgagtttgacaaggagaacatgtgagcctcaggctggggctgcccattgggggccccacatgtccctgcagggttggcagggacagagcccagaccatggtgccagccagggagctgtccctctgtgaagggtggaggctcactgagtagagggctgttgtctaaactgagaaaatggcctatgcttaagaggaaaatgaaagtgttcctggggtgctgtctctgaagaagcagagtttcattacctgtattgtagccc

SEQ ID NO: 89254 - DNA, 858 bp, Artificial Sequence
  derived and/or modified sequence
atgaagaagcagagaggcgtgggcgtgctgcccgccctgagaatgagaggcaacctggccctggtgggcgtgctgatcagcctggccttcctgagcctgctgcccagcggccacccccagcccgccggcgacgacgcctgcagcgtgcagatcctggtgcccggcctgaagggcgacgccggcgagaagggcgacaagggcgcccccggcagacccggcagagtgggccccaccggcgagaagggcgacatgggcgacaagggccagaagggcagcgtgggcagacacggcaagatcggccccatcggcagcaagggcgagaagggcgacagcggcgacatcggcccccccggccccaacggcgagcccggcctgccctgcgagtgcagccagctgagaaaggccatcggcgagatggacaaccaggtgagccagctgaccagcgagctgaagttcatcaagaacgccgtggccggcgtgagagagaccgagagcaagatctacctgctggtgaaggaggagaagagatacgccgacgcccagctgagctgccagggcagaggcggcaccctgagcatgcccaaggacgaggccgccaacggcctgatggccgcctacctggcccaggccggcctggccagagtgttcatcggcatcaacgacctggagaaggagggcgccttcgtgtacagcgaccacagccccatgagaaccttcaacaagtggagaagcggcgagcccaacaacgcctacgacgaggaggactgcgtggagatggtggccagcggcggctggaacgacgtggcctgccacaccaccatgtacttcatgtgcgagttcgacaaggagaacatgtag

SEQ ID NO: 89255 - protein, 221 aa, Artificial Sequence
  derived and/or modified sequence
MWWVPPSPYGCLPCALPGDMGDKGQKGSVGRHGKIGPIGSKGEKGDSGDIGPPGPNGEPGLPCECSQLRKAIGEMDNQVSQLTSELKFIKNAVAGVRETESKIYLLVKEEKRYADAQLSCQGRGGTLSMPKDEAANGLMAAYLAQAGLARVFIGINDLEKEGAFVYSDHSPMRTFNKWRSGEPNNAYDEEDCVEMVASGGWNDVACHTTMYFMCEFDKENM

SEQ ID NO: 89256 - DNA, 666 bp, Artificial Sequence
  derived and/or modified sequence
atgtggtgggtgcctccatcaccatacggctgcctcccttgcgccctccctggcgacatgggggacaagggacagaaagggtccgtggggcggcacggaaaaatcggacctatcggtagtaagggagagaaaggcgatagtggcgacattggtccaccaggtccaaacggagagccgggactgccgtgcgaatgctctcaactccgaaaagctattggtgaaatggacaaccaggtgtcccaactgacctctgagttaaaattcatcaaaaatgcagtggctggtgtgcgcgagactgaaagcaaaatctatctcctggtgaaggaggagaagcggtatgctgatgcgcagttaagctgccagggccggggcggcacactctctatgcccaaagatgaagctgcaaacggccttatggccgcgtacttggcgcaagccggcctggccagagtgtttatcggaatcaacgacctcgagaaagagggggcgttcgtctactcagatcactctccaatgaggactttcaacaagtggcggtcaggcgaacctaacaacgcttacgacgaggaagattgtgtcgaaatggttgcaagcggcggttggaacgatgtcgcatgtcacaccactatgtactttatgtgcgaattcgacaaggaaaatatgtag

SEQ ID NO: 89257 - DNA, 666 bp, Artificial Sequence
  derived and/or modified sequence
atgtggtgggtgccccccagcccctacggctgcctgccctgtgccctgcccggggacatgggagacaagggccagaagggctctgtgggccgccacggcaagattggccccatcggcagcaaaggagagaagggggacagcggggacatcggccccccaggccccaacggggagcccggcctgccctgtgagtgcagccagctgaggaaggccatcggggagatggacaaccaggtgtcccagctgaccagcgagctgaagttcatcaagaatgctgtggccggcgtgcgggagacagagagcaagatctacctgctggtgaaggaggagaagagatatgcagatgcccagctgagctgccagggccggggcggcaccctgtccatgcccaaggatgaggccgccaacggcctgatggccgcctacctggcccaggccggcctggcccgggtcttcatcggcatcaatgacctggagaaggagggcgcctttgtgtacagcgaccacagccccatgaggaccttcaacaagtggaggtctggagagcccaacaatgcctatgatgaggaggactgtgtggagatggtggccagcggcggctggaatgatgtggcctgccacaccaccatgtacttcatgtgtgaatttgacaaggagaacatgtag

SEQ ID NO: 89258 - DNA, 666 bp, Artificial Sequence
  derived and/or modified sequence
atgtggtgggtgccccccagcccctacggctgcctgccctgcgccctccccggcgatatgggcgacaaggggcaaaaaggcagtgtcggccgccacggaaagatcggccctattgggtcaaagggggaaaagggcgactcaggcgatataggcccacccggccctaacggggaacctggtctgccttgcgaatgtagccaactccggaaagctattggcgagatggacaatcaggtgtctcagcttactagcgagctaaaatttatcaaaaatgctgtggcaggagtccgggaaacagagagcaaaatctacctcctggttaaagaagagaaacgatatgcagatgctcaactttcctgtcaaggtcgtggaggcacactgagtatgccaaaagatgaggcagcaaacgggctgatggccgcatacctcgcccaggccggtttggcgcgcgtttttattggtatcaatgatctggagaaggaaggagcattcgtgtactcagatcactcgccaatgcgtacttttaacaaatggcgcagcggagagccaaacaacgcatacgacgaggaagattgcgtggagatggtggccagcggcgggtggaacgacgtggcgtgtcacactacaatgtattttatgtgcgagttcgacaaggagaatatgtag

SEQ ID NO: 89259 - DNA, 666 bp, Artificial Sequence
  derived and/or modified sequence
atgtggtgggtaccccctagcccatacggctgtctcccgtgtgctctgccgggagacatgggtgataagggccagaagggtagcgtagggcgtcacggaaagatcggccctattggctctaaaggagagaagggagatagcggggacattggcccaccaggaccgaatggcgagcccggactaccttgtgagtgttctcaattgcggaaagcaatcggcgaaatggacaaccaggtaagccagctcaccagtgagttgaagttcattaagaacgctgtggccggagtgagagaaaccgagagcaaaatctatctgctggtcaaagaggaaaagaggtatgccgacgcacagctgtcatgccagggcagaggcggaacactgtccatgccgaaagacgaagctgcaaacggacttatggctgcttacctagcacaggcaggcctggccagagtcttcattggaattaatgatctggagaaagaaggcgcttttgtgtactccgatcactctcctatgaggacatttaataaatggaggagtggagagccgaacaatgcttacgacgaagaagactgtgtggagatggtggcaagtggtggatggaacgatgttgcatgccatactacaatgtattttatgtgcgaattcgataaggagaatatgtag

SEQ ID NO: 89260 - DNA, 1134 bp, Artificial Sequence
  derived and/or modified sequence
cagaagttttggtgaaagtggctttggccctgactttgtggtagcgtgtgtgggtttgtgagtggaaccttcagctttaggttggaaacggtggctgtggagagctggacttttggctgtggaggtcacgtccctgcccaatgtggtgggtgcctccgagtccctacggttgtcttccctgcgccctgccaggagacatgggggacaaaggacagaaaggcagtgtgggtcgtcatggaaaaattggtcccattggctctaaaggtgagaaaggagattccggtgacataggaccccctggtcctaatggagaaccaggcctcccatgtgagtgcagccagctgcgcaaggccatcggggagatggacaaccaggtctctcagctgaccagcgagctcaagttcatcaagaatgctgtcgccggtgtgcgcgagacggagagcaagatctacctgctggtgaaggaggagaagcgctacgcggacgcccagctgtcctgccagggccgcgggggcacgctgagcatgcccaaggacgaggctgccaatggcctgatggccgcatacctggcgcaagccggcctggcccgtgtcttcatcggcatcaacgacctggagaaggagggcgccttcgtgtactctgaccactcccccatgcggaccttcaacaagtggcgcagcggtgagcccaacaatgcctacgacgaggaggactgcgtggagatggtggcctcgggcggctggaacgacgtggcctgccacaccaccatgtacttcatgtgtgagtttgacaaggagaacatgtgagcctcaggctggggctgcccattgggggccccacatgtccctgcagggttggcagggacagagcccagaccatggtgccagccagggagctgtccctctgtgaagggtggaggctcactgagtagagggctgttgtctaaactgagaaaatggcctatgcttaagaggaaaatgaaagtgttcctggggtgctgtctctgaagaagcagagtttcattacctgtattgtagccccaatgtcattatgtaattattacccagaattgctcttccataaagcttgtgcctttgtccaagctatacaataaaatctttaagtagtgcagta

SEQ ID NO: 89261 - DNA, 666 bp, Artificial Sequence
  derived and/or modified sequence
atgtggtgggtgccccccagcccctacggctgcctgccctgcgccctgcccggcgacatgggcgacaagggccagaagggcagcgtgggcagacacggcaagatcggccccatcggcagcaagggcgagaagggcgacagcggcgacatcggcccccccggccccaacggcgagcccggcctgccctgcgagtgcagccagctgagaaaggccatcggcgagatggacaaccaggtgagccagctgaccagcgagctgaagttcatcaagaacgccgtggccggcgtgagagagaccgagagcaagatctacctgctggtgaaggaggagaagagatacgccgacgcccagctgagctgccagggcagaggcggcaccctgagcatgcccaaggacgaggccgccaacggcctgatggccgcctacctggcccaggccggcctggccagagtgttcatcggcatcaacgacctggagaaggagggcgccttcgtgtacagcgaccacagccccatgagaaccttcaacaagtggagaagcggcgagcccaacaacgcctacgacgaggaggactgcgtggagatggtggccagcggcggctggaacgacgtggcctgccacaccaccatgtacttcatgtgcgagttcgacaaggagaacatgtag

SEQ ID NO: 89262 - protein, 221 aa, Artificial Sequence
  derived and/or modified sequence
MWWVPPSPYGCLPCALPGDAGEKGDKGAPGRPGRVGPTGEKGEKGDSGDIGPPGPNGEPGLPCECSQLRKAIGEMDNQVSQLTSELKFIKNAVAGVRETESKIYLLVKEEKRYADAQLSCQGRGGTLSMPKDEAANGLMAAYLAQAGLARVFIGINDLEKEGAFVYSDHSPMRTFNKWRSGEPNNAYDEEDCVEMVASGGWNDVACHTTMYFMCEFDKENM

SEQ ID NO: 89263 - DNA, 666 bp, Artificial Sequence
  derived and/or modified sequence
atgtggtgggtgccgccatctccgtacggatgtttgccctgcgccctgcccggcgatgcaggagagaagggcgacaagggggcccccggaagacccggcagagtggggcccaccggcgaaaaaggcgaaaagggtgatagtggcgacatcggaccacctggccccaacggagagcccgggctgccttgtgaatgctcccagttgcggaaggccatcggtgagatggataaccaggtcagtcagctgacctccgagttgaagtttataaaaaatgccgttgcaggggtgcgcgaaacagagtcaaagatctatctcctggtaaaagaggagaaaagatatgcagatgcccagctctcctgccaaggaaggggcgggactctcagtatgcccaaggatgaagctgccaatgggctaatggcagcttatctggcccaagccggactcgccagagtctttatcggtatcaacgaccttgaaaaggaaggagcctttgtgtactccgatcactcccccatgcgcacttttaacaaatggagatctggggagcctaacaacgcctacgatgaggaggattgcgtggaaatggtagcatcgggaggttggaatgatgtggcatgtcataccaccatgtattttatgtgtgagttcgataaggaaaacatgtag

SEQ ID NO: 89264 - DNA, 666 bp, Artificial Sequence
  derived and/or modified sequence
atgtggtgggtgccccccagcccctacggctgcctgccctgtgccctgcctggagatgctggggagaagggggacaagggggcccctggccggcccggccgggtgggccccaccggggagaagggggagaagggggacagcggggacatcggccccccaggccccaacggggagcccggcctgccctgtgagtgcagccagctgaggaaggccatcggggagatggacaaccaggtgtcccagctgaccagcgagctgaagttcatcaagaatgctgtggccggcgtgcgggagacagagagcaagatctacctgctggtgaaggaggagaagagatatgcagatgcccagctgagctgccagggccggggcggcaccctgtccatgcccaaggatgaggccgccaacggcctgatggccgcctacctggcccaggccggcctggcccgggtcttcatcggcatcaatgacctggagaaggagggcgcctttgtgtacagcgaccacagccccatgaggaccttcaacaagtggaggtctggagagcccaacaatgcctatgatgaggaggactgtgtggagatggtggccagcggcggctggaatgatgtggcctgccacaccaccatgtacttcatgtgtgaatttgacaaggagaacatgtag

SEQ ID NO: 89265 - DNA, 666 bp, Artificial Sequence
  derived and/or modified sequence
atgtggtgggtgccccccagcccctacggctgcctgccctgcgccttaccaggcgacgccggggagaagggtgacaagggcgcgccgggcaggccaggacgtgtcggacccaccggcgagaaaggcgagaagggtgacagcggggacattggacctcctggcccaaacggggagccagggctcccatgcgagtgctcacagctccgcaaagccattggcgaaatggataaccaggttagtcagctgacgtctgagcttaagttcatcaagaacgcggtcgctggagttagggaaacggaatcaaagatttaccttttagtgaaagaagaaaaaaggtacgccgatgcacagctttcctgtcaaggcagagggggaacactttccatgccaaaggatgaggcggctaacgggcttatggctgcgtaccttgcccaggcaggactcgcccgcgtctttatcgggatcaatgacctggaaaaagaaggagcttttgtttactctgaccattctcccatgcgtacgttcaataagtggcgcagcggagaaccaaacaatgcctatgacgaagaagattgcgtggagatggtggcctcaggcgggtggaacgatgtggcatgccatacgacaatgtatttcatgtgtgagttcgataaggaaaatatgtag

SEQ ID NO: 89266 - DNA, 666 bp, Artificial Sequence
  derived and/or modified sequence
atgtggtgggtgcccccatccccctatgggtgtctgccgtgtgccttgcccggtgacgcgggtgagaaaggggacaaaggcgcaccgggacgccctgggagagtagggccaacaggggaaaagggggaaaagggcgacagcggtgacatcgggccacccggacctaatggtgaacccggactgccatgtgaatgttcccagctgcgcaaagccattggcgaaatggacaatcaagtgagtcagttaacatccgagctgaagttcatcaagaacgcggtggcaggcgtacgggagacagaatcgaagatttaccttctagtgaaggaggagaaacgctacgcagacgcccagttgtcctgtcaaggcagggggggaactctcagcatgcctaaggacgaggccgcaaacggactgatggccgcatacttggcccaagctggactggctcgagtgtttattggtataaacgacttggagaaggagggtgccttcgtctactctgatcatagccctatgcgcaccttcaataagtggcgaagcggggagcccaataatgcttacgacgaagaagactgcgtggaaatggtggcgtccggtggctggaatgacgtggcttgtcatacaaccatgtactttatgtgcgaattcgacaaagagaacatgtag

SEQ ID NO: 89267 - DNA, 1134 bp, Artificial Sequence
  derived and/or modified sequence
cagaagttttggtgaaagtggctttggccctgactttgtggtagcgtgtgtgggtttgtgagtggaaccttcagctttaggttggaaacggtggctgtggagagctggacttttggctgtggaggtcacgtccctgcccaatgtggtgggtgcctccgagtccctacggttgtcttccctgcgccctgccaggggatgcgggagagaagggagacaaaggcgcccccggacggcctggaagagtcggccccacgggagaaaaaggtgagaaaggagattccggtgacataggaccccctggtcctaatggagaaccaggcctcccatgtgagtgcagccagctgcgcaaggccatcggggagatggacaaccaggtctctcagctgaccagcgagctcaagttcatcaagaatgctgtcgccggtgtgcgcgagacggagagcaagatctacctgctggtgaaggaggagaagcgctacgcggacgcccagctgtcctgccagggccgcgggggcacgctgagcatgcccaaggacgaggctgccaatggcctgatggccgcatacctggcgcaagccggcctggcccgtgtcttcatcggcatcaacgacctggagaaggagggcgccttcgtgtactctgaccactcccccatgcggaccttcaacaagtggcgcagcggtgagcccaacaatgcctacgacgaggaggactgcgtggagatggtggcctcgggcggctggaacgacgtggcctgccacaccaccatgtacttcatgtgtgagtttgacaaggagaacatgtgagcctcaggctggggctgcccattgggggccccacatgtccctgcagggttggcagggacagagcccagaccatggtgccagccagggagctgtccctctgtgaagggtggaggctcactgagtagagggctgttgtctaaactgagaaaatggcctatgcttaagaggaaaatgaaagtgttcctggggtgctgtctctgaagaagcagagtttcattacctgtattgtagccccaatgtcattatgtaattattacccagaattgctcttccataaagcttgtgcctttgtccaagctatacaataaaatctttaagtagtgcagta

SEQ ID NO: 89268 - DNA, 666 bp, Artificial Sequence
  derived and/or modified sequence
atgtggtgggtgccccccagcccctacggctgcctgccctgcgccctgcccggcgacgccggcgagaagggcgacaagggcgcccccggcagacccggcagagtgggccccaccggcgagaagggcgagaagggcgacagcggcgacatcggcccccccggccccaacggcgagcccggcctgccctgcgagtgcagccagctgagaaaggccatcggcgagatggacaaccaggtgagccagctgaccagcgagctgaagttcatcaagaacgccgtggccggcgtgagagagaccgagagcaagatctacctgctggtgaaggaggagaagagatacgccgacgcccagctgagctgccagggcagaggcggcaccctgagcatgcccaaggacgaggccgccaacggcctgatggccgcctacctggcccaggccggcctggccagagtgttcatcggcatcaacgacctggagaaggagggcgccttcgtgtacagcgaccacagccccatgagaaccttcaacaagtggagaagcggcgagcccaacaacgcctacgacgaggaggactgcgtggagatggtggccagcggcggctggaacgacgtggcctgccacaccaccatgtacttcatgtgcgagttcgacaaggagaacatgtag

SEQ ID NO: 89269 - protein, 197 aa, Artificial Sequence
  derived and/or modified sequence
MWWVPPSPYGCLPCALPGEKGDSGDIGPPGPNGEPGLPCECSQLRKAIGEMDNQVSQLTSELKFIKNAVAGVRETESKIYLLVKEEKRYADAQLSCQGRGGTLSMPKDEAANGLMAAYLAQAGLARVFIGINDLEKEGAFVYSDHSPMRTFNKWRSGEPNNAYDEEDCVEMVASGGWNDVACHTTMYFMCEFDKENM

SEQ ID NO: 89270 - DNA, 594 bp, Artificial Sequence
  derived and/or modified sequence
atgtggtgggtcccacccagcccatacggctgtcttccatgcgctcttcccggagaaaagggagattcaggagatatcggacctccgggccctaacggcgagcccggtctgccttgcgagtgctcacagttacggaaagctattggcgaaatggacaatcaagtttcacagctcactagtgaactgaaatttatcaaaaacgcagtcgcgggggtccgggagacagaaagcaagatttacctgttggtgaaggaggaaaaacgttacgctgatgcacaactgtcttgccagggacgcggcggcacattgagtatgcccaaggatgaagctgccaacggactcatggcagcctacttggcgcaggcaggactagcaagagttttcattgggatcaatgacctcgaaaaagaaggggctttcgtttattcagatcacagcccaatgcgaactttcaacaaatggcgctcaggggagcccaataacgcctacgatgaagaggattgtgtggagatggttgcaagtggtgggtggaatgacgtcgcttgccacactacaatgtacttcatgtgcgagtttgataaggagaatatgtag

SEQ ID NO: 89271 - DNA, 594 bp, Artificial Sequence
  derived and/or modified sequence
atgtggtgggtgccccccagcccctacggctgcctgccctgtgccctgcctggagagaagggggacagcggggacatcggccccccaggccccaacggggagcccggcctgccctgtgagtgcagccagctgaggaaggccatcggggagatggacaaccaggtgtcccagctgaccagcgagctgaagttcatcaagaatgctgtggccggcgtgcgggagacagagagcaagatctacctgctggtgaaggaggagaagagatatgcagatgcccagctgagctgccagggccggggcggcaccctgtccatgcccaaggatgaggccgccaacggcctgatggccgcctacctggcccaggccggcctggcccgggtcttcatcggcatcaatgacctggagaaggagggcgcctttgtgtacagcgaccacagccccatgaggaccttcaacaagtggaggtctggagagcccaacaatgcctatgatgaggaggactgtgtggagatggtggccagcggcggctggaatgatgtggcctgccacaccaccatgtacttcatgtgtgaatttgacaaggagaacatgtag

SEQ ID NO: 89272 - DNA, 594 bp, Artificial Sequence
  derived and/or modified sequence
atgtggtgggtgccccccagcccctacggctgcctgccctgcgccctccccggcgaaaaaggagatagtggtgacataggccctccaggacctaacggcgagccgggcttgccctgtgaatgtagtcagcttcgcaaagctattggagagatggacaaccaggtgtctcagctcacctccgaactcaagttcatcaagaatgccgtagccggagtgcgagaaacagagtccaagatctatcttttggtaaaagaggaaaaacggtatgccgacgctcagctgtcttgccagggccgagggggcacgctgtccatgccgaaagacgaggcagcaaacggcttgatggccgcgtacctagctcaggccggcctggcgagagtgttcatcggcatcaacgacttggaaaaggaaggagcctttgtgtatagtgatcactctcccatgcggacctttaacaaatggaggagcggagaacctaacaacgcctacgatgaggaggactgtgtcgagatggtcgcctctggcggctggaatgacgtggcatgtcacacaacaatgtacttcatgtgcgagttcgacaaggagaacatgtag

SEQ ID NO: 89273 - DNA, 594 bp, Artificial Sequence
  derived and/or modified sequence
atgtggtgggtacctccgagcccctatgggtgtctcccctgcgctctaccaggcgagaagggggactccggcgacattggcccacccggaccaaacggcgaacccggtctcccttgtgagtgctcccagctacgtaaagccataggagaaatggacaatcaggtctcccagttaacatccgagctcaagttcatcaaaaacgctgtggccggtgtccgcgagaccgagagcaagatttacttactggtaaaagaggaaaagcgctacgcagacgcccaattgtcctgtcagggcaggggtgggacactcagtatgccaaaggatgaagccgcaaatgggctcatggccgcttatcttgcccaagcaggcctggctcgggtcttcatcgggattaatgaccttgaaaaagagggcgctttcgtgtattctgatcacagtcctatgagaacctttaacaaatggcggagcggtgaacccaataatgcttatgacgaagaagactgtgtcgaaatggtcgcttcaggcggatggaacgatgtggcttgccacacgacgatgtattttatgtgcgagtttgataaggagaatatgtag

SEQ ID NO: 89274 - DNA, 1062 bp, Artificial Sequence
  derived and/or modified sequence
cagaagttttggtgaaagtggctttggccctgactttgtggtagcgtgtgtgggtttgtgagtggaaccttcagctttaggttggaaacggtggctgtggagagctggacttttggctgtggaggtcacgtccctgcccaatgtggtgggtgcctccgagtccctacggttgtcttccctgcgccctgccaggtgagaaaggagattccggtgacataggaccccctggtcctaatggagaaccaggcctcccatgtgagtgcagccagctgcgcaaggccatcggggagatggacaaccaggtctctcagctgaccagcgagctcaagttcatcaagaatgctgtcgccggtgtgcgcgagacggagagcaagatctacctgctggtgaaggaggagaagcgctacgcggacgcccagctgtcctgccagggccgcgggggcacgctgagcatgcccaaggacgaggctgccaatggcctgatggccgcatacctggcgcaagccggcctggcccgtgtcttcatcggcatcaacgacctggagaaggagggcgccttcgtgtactctgaccactcccccatgcggaccttcaacaagtggcgcagcggtgagcccaacaatgcctacgacgaggaggactgcgtggagatggtggcctcgggcggctggaacgacgtggcctgccacaccaccatgtacttcatgtgtgagtttgacaaggagaacatgtgagcctcaggctggggctgcccattgggggccccacatgtccctgcagggttggcagggacagagcccagaccatggtgccagccagggagctgtccctctgtgaagggtggaggctcactgagtagagggctgttgtctaaactgagaaaatggcctatgcttaagaggaaaatgaaagtgttcctggggtgctgtctctgaagaagcagagtttcattacctgtattgtagccccaatgtcattatgtaattattacccagaattgctcttccataaagcttgtgcctttgtccaagctatacaataaaatctttaagtagtgcagta

SEQ ID NO: 89275 - DNA, 594 bp, Artificial Sequence
  derived and/or modified sequence
atgtggtgggtgccccccagcccctacggctgcctgccctgcgccctgcccggcgagaagggcgacagcggcgacatcggcccccccggccccaacggcgagcccggcctgccctgcgagtgcagccagctgagaaaggccatcggcgagatggacaaccaggtgagccagctgaccagcgagctgaagttcatcaagaacgccgtggccggcgtgagagagaccgagagcaagatctacctgctggtgaaggaggagaagagatacgccgacgcccagctgagctgccagggcagaggcggcaccctgagcatgcccaaggacgaggccgccaacggcctgatggccgcctacctggcccaggccggcctggccagagtgttcatcggcatcaacgacctggagaaggagggcgccttcgtgtacagcgaccacagccccatgagaaccttcaacaagtggagaagcggcgagcccaacaacgcctacgacgaggaggactgcgtggagatggtggccagcggcggctggaacgacgtggcctgccacaccaccatgtacttcatgtgcgagttcgacaaggagaacatgtag

SEQ ID NO: 89276 - protein, 113 aa, Artificial Sequence
  derived and/or modified sequence
MEDLLDLDEELRYSLATSRAKMGRRAQQESAQAENHLNGKNSSLTLTGETSSAKLPRCRQGGWAGDSVKASKFRRKASEEIEEYVSSILILMVSYVDLGQQCSLGGHDLFHLC

SEQ ID NO: 89277 - DNA, 342 bp, Artificial Sequence
  derived and/or modified sequence
atggaggatctgctggacctggatgaggagctgcgctactcattggcaacttcacgggcaaaaatggggcgccgagcccagcaggaatctgctcaggcagaaaaccatctcaatggaaaaaactcatcactgacattgacaggagaaactagctctgctaagctgccacgctgccgtcaggggggctgggccggcgattccgtgaaagcttctaagtttcggagaaaggcgtctgaggagatagaagaatacgtgagttcaatcctgatcttaatggtgtcctatgtcgatctcggccagcagtgtagcctgggcggtcatgacctcttccacctgtgctag

SEQ ID NO: 89278 - DNA, 848 bp, Artificial Sequence
  derived and/or modified sequence
gagatggaggatttgctcgacttggacgaggagcttcgctacagcttggctacctccagggccaagatgggtcgccgagctcaacaggagtcagcgcaggccgagaatcacctcaatggcaagaattcctctttgactctgactggagagacttcctctgctaaattacctcgctgccgacagggaggctgggcaggtgattccgtgaaggcttcgaagtttaggaggaaggcttctgaagaaatagaagagtacgtttccagtattcttattcttatggtatcctatgttgatcttggtcaacagtgcagtcttggtggtcatgatctgttccacctatgttgaacactgtgttagaagtctggggctagaattattgatgcctgctgaatccaaggtttggttaatcccgcttcctcaactgaaggtctggaccctggcattgatgcccatgtcctatctcccactgtgtggttttagaattatatgtccaggtatcagggtactggcccatgccttctgcattattgatatagatgggcagaagcaataccagcttctaagccttgccttctcataagacttatatcagaaaagaaagaagttttctagataaaggtgctgtgaaggtagggccacccagtttcctactcccaggggcggaagctgcattcatgtcatagcctctgtgatgctgtcctctggaatagtgcatcgcacagcctgtgcaaccacacacggcacacccagtggcctaattaggtttgactaagttgacagagaaaaacaggttcagggacattttcatctaggagaaagaatggatacaataaacatttgggatgttc

SEQ ID NO: 89279 - DNA, 342 bp, Artificial Sequence
  derived and/or modified sequence
atggaggacctgctggacctggatgaggagctgcgctacagcctggccaccagccgggccaagatgggccggcgggcccagcaggagagcgcccaggccgagaaccacctgaatggcaagaacagcagcctgaccctgactggagagaccagcagcgccaagctgccccgctgccggcagggcggctgggccggggacagcgtgaaggccagcaagttccggaggaaggccagcgaggagattgaggagtatgtgagcagcatcctgatcctgatggtgtcctatgtggacctgggccagcagtgcagcctgggcggccatgacctcttccacctgtgctag

SEQ ID NO: 89280 - DNA, 342 bp, Artificial Sequence
  derived and/or modified sequence
atggaggacctgctggacctggacgaggagctgcggtacagcctggcaaccagtcgagccaaaatgggccgtcgggcccagcaggagagtgcacaggcagagaaccacctaaatggaaagaactccagcctaaccttgactggggagacatcatcggccaaactgcccagatgtcggcagggcggttgggcaggcgatagtgtgaaggcctcaaaatttcggaggaaggcttccgaggaaatagaagaatatgtgagctctatcttaattctcatggtcagttatgtggacttgggtcaacagtgctccctgggaggtcacgatttgttccatttgtgttag

SEQ ID NO: 89281 - DNA, 342 bp, Artificial Sequence
  derived and/or modified sequence
atggaagatttgctcgacctcgacgaagagctgcgctactccctcgccactagcagggccaagatgggccgacgagcacaacaggagtctgcccaggctgaaaaccacctgaacggcaaaaactctagtctgacgctcacaggggaaactagtagcgcaaagctgcctcgttgtagacagggcggatgggctggcgactcggtgaaagctagcaagttccgtcggaaggcctcggaggagatcgaggaatatgtatcatccatccttatattgatggttagctatgtagatttggggcagcagtgcagcctgggtggacacgatctctttcacctttgctag

SEQ ID NO: 89282 - DNA, 342 bp, Artificial Sequence
  derived and/or modified sequence
atggaggacctgctggacctggacgaggagctgagatacagcctggccaccagcagagccaagatgggcagaagagcccagcaggagagcgcccaggccgagaaccacctgaacggcaagaacagcagcctgaccctgaccggcgagaccagcagcgccaagctgcccagatgcagacagggcggctgggccggcgacagcgtgaaggccagcaagttcagaagaaaggccagcgaggagatcgaggagtacgtgagcagcatcctgatcctgatggtgagctacgtggacctgggccagcagtgcagcctgggcggccacgacctgttccacctgtgctag

SEQ ID NO: 89283 - protein, 782 aa, Artificial Sequence
  derived and/or modified sequence
MSINLTVDIYIYLLSNARSVCGKQRSKQLYFLFSPKHYWRISHISLQRGFHTNIIRCKWTKSEAHSCSKHCYSPSNHGLHIGILKLSTSAPKGLTKVNICMSRIKSTLNSVSKAVFGNQNEMISRLAQFKPSSQILRKVSDSGWLKQKNIKQAIKSLKKYSDKSAEKSPFPEEKSHIIDKEEDIGKRSLFHYTSSITTKFGDSFYFLSNHINSYFKRKEKMSQQKENEHFRDKSELEDKKVEEGKLRSPDPGILAYKPGSESVHTVDKPTSPSAIPDVLQVSTKQSIANFLSRPTEGVQALVGGYIGGLVPKLKYDSKSQSEEQEEPAKTDQAVSKDRNAEEKKRLSLQREKIIARVSIDNRTRALVQALRRTTDPKLCITRVEELTFHLLEFPEGKGVAVKERIIPYLLRLRQIKDETLQAAVREILALIGYVDPVKGRGIRILSIDGGGTRGVVALQTLRKLVELTQKPVHQLFDYICGVSTGAILAFMLGLFHMPLDECEELYRKLGSDVFSQNVIVGTVKMSWSHAFYDSQTWENILKDRMGSALMIETARNPTCPKVAAVSTIVNRGITPKAFVFRNYGHFPGINSHYLGGCQYKMWQAIRASSAAPGYFAEYALGNDLHQDGGLLLNNPSALAMHECKCLWPDVPLECIVSLGTGRYESDVRNTVTYTSLKTKLSNVINSATDTEEVHIMLDGLLPPDTYFRFNPVMCENIPLDESRNEKLDQLQLEGLKYIERNEQKMKKVAKILSQEKTTLQKINDWIKLKTDMYEGLPFFSKL

SEQ ID NO: 89284 - DNA, 2349 bp, Artificial Sequence
  derived and/or modified sequence
atgagcatcaatctcaccgttgatatttatatttatctactctctaatgctcggagtgtttgtgggaaacagcggtctaagcagttatactttctgttcagtcctaaacactattggagaatttctcacataagcctacagaggggtttccacacaaacataatccgatgcaagtggacgaagtccgaggcccatagttgctcgaaacactgctactctcccagcaaccacggtctccacatcggcattctgaaactgagcacttccgctcctaagggcctaaccaaagtgaacatatgtatgagtagaatcaaatctacactaaatagcgttagcaaggccgtttttggcaaccaaaatgaaatgatttcgaggctggcgcagtttaaaccctcgagtcagatattgcggaaagtgagtgattctgggtggctaaaacaaaagaatatcaagcaggcaataaagagcctcaaaaaatatagtgacaaaagcgcagagaagagtcccttccccgaggaaaaatcccacatcattgacaaagaagaggacatcggtaaacgctctctgtttcactacacatcctcgataacaactaaatttggtgactctttctactttctcagcaaccacatcaatagttactttaagcgaaaagagaagatgagccaacagaaggaaaatgaacactttcgcgacaaatcagaactggaagataagaaggtcgaagaagggaaactcagatctccagatcctggtatcttagcctataaacccgggagtgagtctgtgcataccgtggacaaaccaacaagcccttcagccatcccagacgtactgcaggtgtccaccaaacagtctatcgcgaactttctgagccgacccacggaaggggtgcaggctctggttggtggttatatcggcggactggtacctaagctcaaatatgattctaaaagccagtcagaggagcaggaggaacctgcaaagaccgaccaggccgtgtctaaagaccgtaatgctgaggagaagaagagactatcattgcagagggaaaagatcatagcccgcgtctcaatcgataacaggactcgggcacttgtgcaagccctcagacgaactactgaccctaagctctgcataacccgcgtggaggagcttacctttcatctcttggagtttcccgagggaaagggcgtggctgtgaaggagcgcattatcccatacctcctcaggcttagacagattaaggatgagaccttgcaggccgcagtgagagagattctcgcgctgattgggtacgtcgatccagtgaaaggtcggggcataaggatcctatctatcgacgggggcgggaccagaggggtggttgccctgcaaactcttagaaaactggtggaactgacgcagaagccagttcatcaactgttcgactacatctgtggggtgtcgaccggagctattttagcattcatgctgggattgttccacatgccactcgatgaatgcgaagagctgtatcggaaactcggaagcgacgtcttctcacagaacgtcatagttggtacggtaaaaatgtcttggagccatgccttctatgattcacaaacgtgggagaacatcttgaaagatcgtatgggatctgctctgatgatcgagaccgccaggaatccaacatgtcccaaagtggccgccgtgtcaaccatcgtcaataggggcattacccccaaagccttcgtcttcaggaactatggtcactttcctggaataaacagccactatttgggggggtgccagtacaaaatgtggcaggcaattagagcaagtagtgccgcacccggctacttcgctgagtacgcactcggaaacgacctgcaccaagatggcggcctcctcctcaacaatccatccgcccttgccatgcatgagtgtaagtgtctttggccggacgtgcctctggagtgcatagtgtcactcggcactggccggtatgaaagtgacgtaagaaatactgtcacatatactagtctgaaaaccaagctgagtaatgtcatcaattccgcgaccgataccgaggaagttcacataatgctggacggcctccttcctccagacacctacttccggtttaatccagtaatgtgcgagaatatccccctagacgagagtcgaaacgaaaagctcgaccagctgcagctggagggtcttaaatacattgaaaggaacgagcagaaaatgaaaaaagttgccaaaatcctgtcccaggaaaaaacgactctgcagaagattaatgactggataaagcttaagacggatatgtatgagggcttgccgttcttcagtaaactctag

SEQ ID NO: 89285 - DNA, 2349 bp, Artificial Sequence
  derived and/or modified sequence
atgtccattaacctaaccgttgatatctacatctatttacttagtaacgcccggagcgtgtgcggtaagcagaggtctaaacagctttattttctattctcccctaagcactactggcgcattagccacatctcactccaacgaggcttccacacaaacattatcaggtgcaagtggactaaatcagaagcgcactcatgctcaaagcactgttactctcctagcaatcatggacttcacatcggaatccttaagctgagtacttcggcacccaagggattgaccaaggttaatatctgtatgagtagaatcaaaagcaccttaaattccgtgtcaaaagcagtcttcggaaaccagaacgaaatgatcagcagactggctcaattcaagccatcttcacagattctgagaaaagtgagtgacagtggttggcttaaacaaaagaatatcaagcaggccattaagtctttgaaaaagtatagtgataaatctgcagaaaagtcgccttttccggaagagaagtctcatatcattgacaaggaggaagacatcggcaaacgaagcctgtttcactatacttccagcattaccaccaagtttggcgactcattctactttctgtctaatcacataaactcatactttaaaagaaaagaaaaaatgtcgcaacaaaaggagaatgagcacttccgagataagtctgagctagaggataagaaggttgaagaagggaaactcagatcaccagaccctggaattctggcctacaagcccgggtccgagtccgtgcacacagtggataaaccaacctcaccctctgccatccctgacgttttgcaggtgtcaaccaagcagagtattgccaactttctgtcccggccaacagagggagtccaggccctggtggggggttacattggagggctggtccctaagcttaagtacgattctaaatctcagtctgaggagcaggaagagcctgccaaaactgatcaggcagtttcaaaggacaggaacgcagaggagaagaagaggttgagcttgcaaagagagaaaataattgccagggtgtcaatcgataatcgcacccgggctttggtgcaagcacttcgacgaacaaccgaccccaagttgtgcattactagagtggaggagctcaccttccacctgttagagttccctgaaggtaagggagtcgccgttaaggagcggatcatcccctacctcctgaggttgaggcagatcaaggacgagactttacaggccgccgtacgtgagatactggctcttatcggatatgttgatcctgtgaaaggccggggaattcgcatcctgtctatcgacggagggggaacccgtggtgtcgttgcacttcagacgctgaggaaattagtagagcttacacagaagccagtgcatcagttattcgattacatctgcggagtctccactggtgccatcttagcattcatgctcggcttattccacatgcccttggacgagtgcgaggaactttatagaaaattggggagcgacgtcttctcccagaacgtcatcgtgggaactgtgaaaatgtcctggtctcacgcattctacgactctcagacttgggagaacatactgaaggatagaatggggtctgcgctcatgatcgaaacagctagaaacccgacatgtcccaaggtagcggctgtctccacaatcgtcaatcggggtatcacccctaaggcttttgtctttaggaattacggacattttccaggaataaattcacactatttaggcggctgccagtacaagatgtggcaggccatcagggctagctctgccgctccaggttatttcgcggaatacgctctgggcaatgatctccaccaggatggaggcttgctgttgaataacccatccgccttggctatgcacgaatgcaaatgtctgtggcctgacgttccactggagtgcattgtttctcttgggacaggacgttatgagtcggatgtccggaatacagtgacctataccagcctgaagacaaagttatccaatgtcatcaatagcgccaccgacaccgaagaggtgcacatcatgctggacgggctgctgcctccggacacgtacttccggttcaacccagtgatgtgcgagaatatacctcttgatgaatcaagaaatgaaaaattggaccaattgcaactggaaggcctaaagtatatagaacggaatgaacagaagatgaagaaggtggcaaagatactcagtcaggagaagactacgcttcagaagataaacgattggatcaaattgaaaaccgacatgtatgaagggctcccctttttctcaaaactctag

SEQ ID NO: 89286 - DNA, 2349 bp, Artificial Sequence
  derived and/or modified sequence
atgagcatcaacctgaccgtagacatctatatctatctcctgtcaaatgcacgcagcgtctgtggtaagcagaggagtaagcaattgtattttttgtttagccccaaacactactggaggatctctcacatatctctccagagaggttttcataccaacatcatacgctgcaagtggacaaagtccgaggctcactcctgctcaaagcactgttactcccctagcaatcacgggctgcatattggcatactgaaattatccacatcggcccctaagggcctgacaaaggtcaatatttgcatgtcccgcatcaaatcaaccctaaattccgtgagtaaagcagtgtttgggaatcaaaacgagatgataagcagactggctcagttcaagcccagtagccagatactccgaaaagtctccgactctggctggctcaaacagaagaacatcaagcaagccataaaatcactgaagaagtattctgacaagtctgctgagaagtccccgtttcccgaggagaaaagtcacataatcgacaaggaagaagatattgggaaacggagcttatttcactacaccagcagcatcactactaaattcggcgactcgttttactttctctcaaaccatataaacagctacttcaagaggaaggagaagatgtcacagcagaaggaaaacgagcacttccgtgacaaatctgagctcgaagataaaaaagtggaggaggggaagttgcggtctcccgatccagggatcctggcctataagcccggatctgagagcgtgcataccgtcgacaagcccactagtccatccgcaatcccggacgtcctccaggtgagcacaaaacagtcgattgcaaatttcctgtcaagaccaaccgagggcgtccaagctcttgtaggagggtatattggaggattggtccccaagttgaagtatgattcaaaatcacaatccgaagaacaagaagagccagccaagacagatcaagctgtgagtaaggatagaaacgcggaagagaaaaagcgactcagtctccagagggaaaaaatcattgctcgtgtgagtatcgataacagaacgagagcgttggttcaggcactgaggcgtaccacagatcctaaattatgtattacgagggtggaggaattgacatttcacctactcgagtttcccgaagggaaaggagtcgctgtgaaggaacggatcattccttatctgctgaggctgcgccagatcaaagacgaaacactgcaggctgctgtacgcgagattctggccctgatcggctacgtcgaccccgtcaagggacgagggattcgcatcctatctatagacgggggcgggacaaggggggttgtggccctgcagacgctgcgcaagctggtggaactgacacagaaaccagtgcaccaactgttcgactatatctgcggcgtctccaccggcgccatcctagcttttatgctgggtctgtttcatatgccattggatgaatgcgaggaattatatcgcaaattgggaagcgatgtgttcagccagaacgtcattgtgggtactgtaaaaatgtcatggtcacatgctttttacgattcacagacttgggagaacatcttgaaagatcgaatgggcagtgcccttatgattgagactgcacggaacccaacctgtcccaaggtcgccgctgtgagcaccatcgtgaatcgtggcatcacccccaaggcctttgtatttcgaaactatgggcattttcccgggatcaacagccattacctgggcggatgccagtataaaatgtggcaggctattagagcgagttctgcagcccccggttattttgctgagtacgcgcttggtaacgatctgcaccaggacggtggattgctgctcaacaatccttccgctctcgcaatgcacgaatgtaaatgcctttggcctgatgtccccctggagtgtatagtatccctgggaaccggccgttacgaatctgatgtcaggaacaccgtcacctataccagtttgaaaacaaagctctctaatgtgataaactcagccacagacacagaggaagtccatatcatgctggatggcctcctcccaccagatacatatttcaggtttaatccggtaatgtgtgagaacatcccgctggatgagagtaggaacgagaagctcgaccagctgcaattagaggggctaaagtacattgaacgtaacgaacaaaagatgaaaaaggtggctaaaatcttgagtcaagagaaaactaccctccagaagatcaacgattggattaaactgaagaccgatatgtatgagggattgccgtttttttctaagctctag

SEQ ID NO: 89287 - DNA, 2349 bp, Artificial Sequence
  derived and/or modified sequence
atgagcatcaacctgactgtggacatctacatctacctgctgagcaatgcccggtctgtgtgtgggaagcagaggagcaagcagctgtacttcctgttcagccccaagcactactggaggatcagccacatcagcctgcagaggggcttccacaccaacatcatccgctgcaagtggaccaagtctgaggcccacagctgcagcaagcactgctacagccccagcaaccacggcctgcacatcggcatcctgaagctgagcaccagcgcccccaagggcctgaccaaggtgaacatctgcatgagccgcatcaagagcaccctgaacagcgtgtccaaggctgtgtttggaaaccagaatgagatgatcagccggctggcccagttcaagcccagcagccagatcctgaggaaggtgtctgacagcggctggctgaagcagaagaacatcaagcaggccatcaagagcctgaagaagtacagcgacaagtctgctgagaagagccccttccctgaggagaagagccacatcatcgacaaggaggaggacatcggcaagaggagcctcttccactacaccagcagcatcaccaccaagtttggagacagcttctacttcctgagcaaccacatcaacagctacttcaagaggaaggagaagatgagccagcagaaggaaaatgagcacttccgggacaagtctgagctggaggacaagaaggtggaggagggcaagctgcggagcccagaccccggcatcctggcctacaagccaggcagcgagagcgtgcacacagtggacaagcccaccagccccagcgccatcccagatgtgctgcaggtgtccaccaagcagagcatcgccaacttcctgagccggcccacagaaggagtgcaggccctggtgggcggctacatcggcggcctggtgcccaagctgaagtatgacagcaagagccagagcgaggagcaggaggagcccgccaagacagaccaggccgtgtccaaggacagaaatgctgaggagaagaagaggctgagcctgcagcgggagaagatcatcgcccgggtgtccattgacaacagaacccgggccctggtgcaggccctgcggaggaccacagaccccaagctgtgcatcaccagggtggaggagctgaccttccacctgctggagttccctgagggcaaaggagtggccgtgaaggagcgcatcatcccctacctgctgcggctgcggcagatcaaggatgagaccctgcaggccgctgtgcgggagatcctggccctgattggctacgtggaccctgtgaagggccggggcatccgcatcctgagcattgatggcggcggcacccggggcgtggtggccctgcagaccctgaggaagctggtggagctgacccagaagcctgtgcaccagctgtttgactacatctgtggggtgtccactggagccatcctggccttcatgctgggcctcttccacatgcccctggatgaatgtgaggagctgtacaggaagctgggcagtgatgtgttcagccagaatgtgattgtgggcaccgtgaagatgtcctggagccacgccttctatgacagccagacctgggagaacatcctgaaggacaggatgggcagcgccctgatgattgaaacagccaggaaccccacctgccccaaggtggccgctgtgtccaccatcgtgaacagaggcatcacccccaaggcctttgtgttcagaaattatggccacttccctggcatcaacagccactacctgggcggctgccagtacaagatgtggcaggccatccgggccagcagcgctgcccctggctactttgctgaatatgccctgggcaatgacctgcaccaggacggcggcctgctgctgaacaaccccagcgccctggccatgcatgagtgcaagtgcctgtggccagatgtgcccctggagtgcatcgtgtccctgggcaccggccgctatgaaagtgatgtgaggaacacagtgacctacaccagcctgaagaccaagctgagcaatgtcatcaacagcgccacagacacagaggaggtgcacatcatgctggatggcctgctgcccccagacacctacttccgcttcaaccctgtgatgtgtgagaacatccccctggatgagagcagaaatgagaagctggaccagctgcagctggagggcctgaagtacatcgagagaaatgagcagaagatgaagaaggtggccaagatcctgagccaggagaagaccaccctgcagaagatcaatgactggatcaagctgaagacagacatgtatgagggcctgcccttcttcagcaagctgtag

SEQ ID NO: 89288 - DNA, 2349 bp, Artificial Sequence
  derived and/or modified sequence
atgagcatcaacctgaccgtggacatctacatctacctgctgagcaacgcacgcagtgtgtgtgggaaacaaaggtccaagcagctgtacttcttattcagccccaagcattactggcgcatcagccatatatcactccagcgggggttccacacaaacattatccgctgcaagtggacaaaatcagaggctcacagctgtagtaaacattgttacagcccatccaaccatggacttcacattggcattttaaagctgtccacatcagctccaaagggactaacgaaggtgaacatttgtatgagcagaattaaaagcactctgaatagcgtctccaaggctgtgtttgggaaccagaatgagatgatcagccggctggcccagtttaaaccaagtagccagatcctgcggaaagtcagcgattctggctggctgaagcaaaagaacatcaaacaggcaattaagtccttaaaaaagtattccgataagagcgctgagaaaagtccctttccagaagaaaaatcccatattatcgacaaagaggaggacataggaaaacggtccctgtttcactatactagctcaataaccaccaagttcggcgatagcttttactttttgtccaatcatatcaacagttattttaagcggaaggagaagatgagtcaacagaaagagaatgaacacttccgggataagtccgaacttgaggacaagaaagtagaagagggcaagttacggtctccggatccaggtatactcgcctataagcctggctcagagtcggtccacacagtggacaaacctacaagcccaagcgcaatccccgacgtgctgcaggtttctaccaaacagagtattgccaattttttgagtcgcccaacggaaggcgttcaggcgctcgtcgggggctatatcggtggactggttcctaagctcaaatacgatagcaaaagccaatcagaagaacaagaagaacctgcgaagactgaccaggcggtcagtaaagataggaatgctgaggaaaaaaagaggctgtccctccagcgggagaagatcatcgcccgcgtgtccatcgacaataggaccagggctttagttcaagccctcagaaggaccacagatccaaaattgtgcataactagagtcgaagagcttacttttcatttgcttgagttcccagaaggcaagggtgtagccgtgaaggagcgcattatcccttacctactgaggctcagacagatcaaagatgagactctacaggcagccgtgagggagattctggcactcattgggtatgtggatccggttaagggtcgagggatccggatcctgtcaattgatggtggaggcacgagaggcgtggtagccttgcagactctacggaagttggtggaacttacacagaagcccgtgcaccaactgttcgactacatatgcggagttagtaccggtgctatactggccttcatgctggggctatttcacatgcctctggacgagtgtgaagagctctacaggaaattaggaagcgatgtgttctcccagaatgtgattgtcggcactgtgaaaatgagctggagtcacgctttctacgattcccagacatgggagaatatcctgaaagaccggatgggcagtgcactgatgatcgaaaccgcccgcaatccaacttgcccgaaagtggcagccgtgagtacaatcgttaatagaggaataactcccaaagcattcgtatttagaaactatggccacttccccggcataaattctcactaccttggagggtgccagtataaaatgtggcaagcaatacgggcaagtagtgctgcgcctggctactttgcagagtatgcccttggaaacgacctgcatcaagacggtggcctcctgcttaacaaccccagcgccctggccatgcacgaatgtaagtgcctttggcctgatgtccccctggaatgcatcgtctccctgggaacagggcgatatgaatccgatgtgaggaatacagtaacctataccagcctgaagaccaagctttcaaatgtgattaacagtgccacagataccgaggaagtccacatcatgctggacggtctgctgccaccagacacttatttcaggttcaatcccgttatgtgtgagaatatccctttagacgagagccggaacgagaagctggaccagctacagttggaaggactgaagtacatcgagcggaacgagcagaaaatgaagaaggtagctaagatcctaagccaggaaaagactaccctccagaaaattaatgactggatcaagctgaaaacagatatgtacgagggcctgcctttcttctccaaactttag

SEQ ID NO: 89289 - DNA, 2349 bp, Artificial Sequence
  derived and/or modified sequence
atgagcatcaacctgaccgtggacatctacatctacctgctgagcaatgcacgaagcgtgtgtgggaagcaacgcagtaagcagctgtatttcctattctcaccgaagcactactggagaatcagccatatttcattgcagcgcgggtttcacactaatatcatcaggtgcaagtggacaaagtccgaagcacactcgtgctcaaaacattgttattctccgagtaatcatggtctccatattgggatcctcaaactgtccacatcggccccaaaaggcctaaccaaagtgaacatctgtatgtcccggatcaaatcaactctcaactccgtcagcaaggcagtgttcggcaaccagaatgaaatgatatcaagacttgcacagttcaaaccctccagtcagatcctgaggaaggtttccgacagcggctggttaaaacagaaaaatattaagcaggccatcaagagcttgaagaaatatagtgataaatccgcggagaaaagcccgttccctgaagagaagtcccacatcatcgacaaggaggaggatattggtaagcgatcactgtttcattataccagttcaattaccaccaaattcggcgacagtttttactttttgagcaatcatatcaattcatattttaagcgcaaggaaaagatgagccagcagaaggaaaacgaacacttcagggataaatctgaactcgaagataagaaagtggaggaaggaaagctgagatcaccagaccctggcatcctggcttataagccagggtctgagtctgtccatactgtcgacaagcccacatccccctccgcgatacccgacgttctccaggtttcaacaaagcagtcaatcgcaaacttcttgtcgagaccaacggagggcgttcaggccctggtaggcggttatattggtggcctggtgcctaaactgaaatacgatagcaaaagccagagcgaggaacaggaggagccagccaaaacagaccaagctgtaagtaaagaccgcaacgcagaagaaaaaaagcggctcagcttgcaaagagagaaaatcatcgcgagggtgagcatcgacaaccgtacccgcgccctggtccaggccctgaggaggactacagaccctaaattatgtatcacaagggttgaggagctgacattccatctgttggaattcccagaaggaaagggcgtggcagtgaaggagagaattatcccttaccttcttcgattgcggcagatcaaggatgaaaccctccaggctgcagtgcgggagatcctggccctcattggctacgtcgacccagtgaagggccgcgggataagaatcctttccatagacggcggcggcactagaggagtcgtagctctgcaaaccctgcgcaaacttgtggaactgacccagaagcccgtccaccaactgttcgactacatctgtggggtgagcactggcgcaattcttgccttcatgctgggcctgtttcacatgccgttagacgagtgcgaggagctctaccgcaaacttgggagtgatgtgttctcacaaaacgttatcgtaggaaccgtgaaaatgtcgtggagccacgccttttacgactcacagacatgggaaaacattttgaaggatcggatgggatcggctctcatgatcgagaccgcccgcaatcccacctgcccaaaggtggccgctgtttcaaccatagtgaacagaggaatcaccccaaaggcattcgttttccgtaattatggccactttccaggtattaactctcattacctggggggctgccagtacaaaatgtggcaggcaatcagagccagtagtgctgcaccaggttactttgccgagtacgcactggggaatgacctgcaccaggacggcgggctgcttctcaacaatccaagcgcactagcgatgcacgaatgtaagtgcctgtggccggacgtgcccctggaatgcatcgtgagtctcgggacagggcgctatgagtcagatgtgcgaaacacagtgacctatacgtcattgaagaccaagctgagtaacgtgattaactccgcaaccgacactgaggaggtacacatcatgctggacggcctgctgccccctgatacttattttcgattcaatcccgttatgtgtgagaacatccccctcgacgaatctagaaatgagaagctggatcagctgcagctcgaaggactgaagtatattgagagaaacgaacaaaagatgaaaaaagtggcaaagatccttagccaagaaaagacaacattacagaagatcaatgactggatcaagctgaagacagatatgtacgaaggactgccctttttttccaagctctag

SEQ ID NO: 89290 - DNA, 2349 bp, Artificial Sequence
  derived and/or modified sequence
atgagcatcaacctgaccgtggacatctacatctacctgctgagcaatgctcgtagcgtatgtggcaaacagcggtctaaacaactctactttctgttcagcccaaagcactactggcggatatctcatatatcgctacagcgaggcttccacaccaatattattcggtgtaagtggactaaatctgaggcccacagctgctccaagcactgttattccccctctaaccatggcttgcacatcggaatccttaaactgagcacctccgcaccaaagggcctcacaaaggtaaatatctgcatgtcgcgcataaagtctacactgaattcagtgtccaaggccgtattcggcaaccagaacgaaatgatttctcgactcgcccagtttaagccctctagccagattcttaggaaggttagtgattccggatggttgaagcaaaagaacatcaaacaggcaattaagtccctaaagaaatattctgacaaatccgcggagaagtcccccttccccgaggagaagtcgcacatcatcgacaaagaggaagatatcggaaagcgctctctctttcactacacctccagtatcacaactaagttcggggactccttctatttcctgagtaaccatatcaattcctatttcaagcggaaagaaaaaatgtcccagcaaaaggagaatgagcattttcgcgataagagcgaactggaagacaagaaggtggaggagggaaagctccgcagcccggaccccggtattttagcctataagccgggttccgaatctgttcacaccgtggataagcctaccagcccttcagcgatccctgatgtgctgcaagttagcactaagcagagtatcgcaaacttcttaagccgccctacagaaggggtacaggccctggttggaggttacataggagggctcgttccaaagttaaagtacgattcaaagtcacagagtgaagagcaggaagagccggccaaaaccgaccaggccgtgagcaaggaccgcaacgctgaagagaagaagaggctttccctccagcgggagaagattatagcgagggtgagtatagataaccgcacacgtgccttagtccaagccctgcggcgtacaactgacccgaagctctgcatcactagagtcgaggaactgacttttcatctcttggaatttcctgagggcaaaggagttgctgtaaaggagcgtatcataccctatctgttgaggctgaggcaaatcaaggatgagaccctccaggctgcagtccgagagatactcgctctgatcggatacgtcgaccccgtgaaaggacgtgggatcagaatactgagtatagacggtggcggtacgaggggcgtggttgctctccagactttacggaagttggtagaactgacacaaaaacccgtccaccagttgtttgattacatatgcggtgtctcaacaggggcaattctggcatttatgctgggactgttccacatgcccctggacgagtgtgaagagctttacagaaagctgggaagcgatgtattttcacaaaatgtgattgtgggcacggtgaagatgtcctggagccacgctttttatgacagccagacatgggagaacatcctgaaagataggatggggtcagctctgatgatcgagactgcacgaaaccctacctgtcctaaggtggcagccgtcagcaccatcgttaaccgggggataacacccaaagcattcgtgtttcgaaattatggacattttccaggaatcaactcgcactatctgggcggatgccagtataagatgtggcaagccattagagccagtagtgccgctcctggttatttcgccgaatatgccctggggaatgatctgcaccaggatggtggcttacttctcaacaacccgagcgctctggcgatgcatgaatgtaagtgcttgtggcccgatgtgcctctggaatgtatagtgagcttgggaactggacggtacgagtctgacgtcaggaatacggtgacatacacgagcctaaagaccaagctctcaaacgtgatcaacagcgctacagataccgaagaggttcacatcatgctggatggccttctgccccctgacacatattttaggttcaacccagtgatgtgtgaaaatattcccctagacgagtcccggaatgagaaattggatcagctccagctcgagggacttaaatacatcgaacggaatgaacaaaagatgaaaaaagtggcaaaaatcttgtcccaggagaagaccacacttcagaagattaatgactggattaaactcaagactgacatgtatgaggggctgcctttctttagcaagttgtag

SEQ ID NO: 89291 - DNA, 3490 bp, Artificial Sequence
  derived and/or modified sequence
acttccgctgggggcggagcggggcggggctgagtgggtggcgacctagctgctgcgccagtgtttgtgttggaagctcagctgatgcaggccggttggagtggacgtcattgccgggaacgagcgagtcgccgctgcagccctagtgactgcggcctgcatcccgattgtcttctcctccaaggtctacatgattacctgaagtttaataagtaagaccatgaattatggcatttcttaaatgaagcgttcaagaagtgagagaatgtcatagaaaataaatgatttttaagttatgtctattaatctgactgtagatatatatatttacctccttagtaatgcaagaagtgtttgtgggaagcagagaagcaagcaactgtatttcttgttctcacctaagcattactggaggataagccacatcagtctacaaagaggttttcatacaaacataataagatgtaaatggaccaaaagtgaagcacattcttgcagtaagcactgttactctccaagcaaccatggtttacatattgggattttgaaacttagcacttctgctcccaagggacttacaaaagtgaacatttgtatgtcccgtattaaaagtactttgaactctgtttcaaaggctgtttttggcaatcaaaatgaaatgatttcacgtttagctcaatttaagccaagttcccaaattttaagaaaagtatcggatagtggctggttaaaacagaaaaacatcaaacaagccatcaaatctctgaaaaaatatagtgacaaatcagcagaaaagagtccttttccagaagagaaaagtcacattatagacaaagaagaagatataggtaaacgcagtctttttcattacacaagttctataaccacaaaatttggagactcattctactttttatcaaatcatattaattcatatttcaaacgtaaggaaaaaatgtctcaacaaaaggaaaatgaacatttccgggacaaatcagaacttgaagataaaaaggtagaagaggggaaattaagatctccagatcctggcatcctggcttataagccaggctcagaatctgtacatacggtggacaagcctacaagtccttctgcgatacctgatgttcttcaagtttcaactaaacaaagtattgctaactttctttctcgtcccacggaaggtgtacaagctttagtaggtggttatattggtggacttgtccccaaattaaagtatgattcaaagagtcagtcagaagaacaggaagagcctgctaaaactgatcaggctgtcagcaaagacagaaatgcagaggagaaaaagcgtttatctcttcagcgagaaaagattatcgcaagggtgagtattgataacaggacccgggcattagttcaggcattaagaagaacaactgacccaaagctctgcattactagggttgaagaactgacttttcatcttctagaatttcctgaaggaaaaggagtggctgtcaaggaaagaattattccatatttattacgactgagacaaattaaggatgaaactcttcaggctgcagttagagaaattttggccctaattggctatgtggatccagtgaaagggagaggaatccgaattctctcaattgatggtggaggaacaaggggcgtggttgctctccagaccctacgaaaattagttgaacttactcagaagccagttcatcagctctttgattacatttgtggtgtaagcacaggtgccatattagctttcatgttggggttgtttcatatgcccttggatgaatgtgaggaactttatcgaaaattaggatcagatgtattttcacaaaatgtcattgttggaacagtaaaaatgagttggagccatgcattttatgacagtcaaacatgggaaaacattcttaaggataggatgggatctgcactgatgattgaaacagcaagaaaccccacatgtcctaaggtagctgctgtaagtaccatagtaaatagagggataacacccaaagcttttgtgttcagaaactatggtcattttcctggaatcaactctcattatttgggaggctgtcagtataaaatgtggcaggccattagagcctcatctgctgctccaggctactttgcagaatatgcattgggaaatgatcttcatcaagatggaggtttgcttctgaataacccttcggcattagctatgcatgagtgtaaatgtctttggccagatgtgccgttagagtgcatagtatccctgggcactggacgttatgagagtgatgtgagaaacacggtaacatacacaagcttgaaaactaaactttctaatgttatcaacagtgctacagatacagaagaagtccatataatgcttgatggcctgttacctcctgacacctattttagattcaatcctgtaatgtgtgaaaacatacctctagatgaaagtcgaaatgaaaagctggatcagctgcagttggaagggttgaaatacatagaaagaaatgaacaaaaaatgaaaaaagttgcaaaaatattaagtcaagaaaaaacaactctgcagaaaattaatgattggataaaattaaaaactgatatgtatgaaggacttccattcttttcaaaattgtgatgagtatatgcttatgttctcataaatgaaggtctgtttagaagatcaaccacattcaataaggaattgtggggttcgacatgagttaactttgaaatacgtatgaattctggagaatcctgaaaaagacggtgcttcaaccagcttgcatagcacagagaatattcttggttacagaattcatatgggaactaggcttttaagatgttaataattagctaagctttagtaacccttactgtgctagtagattttagtagatattggtgttatattgtttgatgtttgaaaatatattaatatatgtgccgaacaagaaaccgaaagctatattgtactgtgtatttttactttagtcctcataatcatgttgaatttatgtgatcattgattttatttcatatggaaaagctaatttcttcttaaatttacattacctaatattctcactagctatgttctccaatccacactgccttttattgtaatatcatctaaatagatgcagaaaaatggaattttctctattaaagtattttacatttgacataaaaaagaaccagatacagttttctattcagatatgtttattttaacattgtttggttaaaaaaggtgaagttccagtcaaccactttttacccctgaaatttcaagataatgctatattaacttttccagatctaacactagcttattcttccctgttataaaatggtttgaacttactgaggagatattcctatcattaacaaaaataaactatttaaataatctgttgttaaaaggctaatgtcattttaaaattaatttttgttcataatgtagctcccctttagcctttga

SEQ ID NO: 89292 - DNA, 3530 bp, Artificial Sequence
  derived and/or modified sequence
acttccgctgggggcggagcggggcggggctgagtgggtggcgacctagctgctgcgccagtgtttgtgttggaagctcagctgatgcaggccggttggagtggacgtcattgccgggaacgagcgagtcgccgctgcagccctagtgactgcggcctgcatcccgattgtcttctcctccaaggtctacatgattacctgaagtttaataattttgcctttctagagtgttatacagctggaatcatactgctatggtccgaatgtttgtgcctctcaaaattcatgtggaaatcataaccgctaaagtgatggtattaagaggtaagaccatgaattatggcatttcttaaatgaagcgttcaagaagtgagagaatgtcatagaaaataaatgatttttaagttatgtctattaatctgactgtagatatatatatttacctccttagtaatgcaagaagtgtttgtgggaagcagagaagcaagcaactgtatttcttgttctcacctaagcattactggaggataagccacatcagtctacaaagaggttttcatacaaacataataagatgtaaatggaccaaaagtgaagcacattcttgcagtaagcactgttactctccaagcaaccatggtttacatattgggattttgaaacttagcacttctgctcccaagggacttacaaaagtgaacatttgtatgtcccgtattaaaagtactttgaactctgtttcaaaggctgtttttggcaatcaaaatgaaatgatttcacgtttagctcaatttaagccaagttcccaaattttaagaaaagtatcggatagtggctggttaaaacagaaaaacatcaaacaagccatcaaatctctgaaaaaatatagtgacaaatcagcagaaaagagtccttttccagaagagaaaagtcacattatagacaaagaagaagatataggtaaacgcagtctttttcattacacaagttctataaccacaaaatttggagactcattctactttttatcaaatcatattaattcatatttcaaacgtaaggaaaaaatgtctcaacaaaaggaaaatgaacatttccgggacaaatcagaacttgaagataaaaaggtagaagaggggaaattaagatctccagatcctggcatcctggcttataagccaggctcagaatctgtacatacggtggacaagcctacaagtccttctgcgatacctgatgttcttcaagtttcaactaaacaaagtattgctaactttctttctcgtcccacggaaggtgtacaagctttagtaggtggttatattggtggacttgtccccaaattaaagtatgattcaaagagtcagtcagaagaacaggaagagcctgctaaaactgatcaggctgtcagcaaagacagaaatgcagaggagaaaaagcgtttatctcttcagcgagaaaagattatcgcaagggtgagtattgataacaggacccgggcattagttcaggcattaagaagaacaactgacccaaagctctgcattactagggttgaagaactgacttttcatcttctagaatttcctgaaggaaaaggagtggctgtcaaggaaagaattattccatatttattacgactgagacaaattaaggatgaaactcttcaggctgcagttagagaaattttggccctaattggctatgtggatccagtgaaagggagaggaatccgaattctctcaattgatggtggaggaacaaggggcgtggttgctctccagaccctacgaaaattagttgaacttactcagaagccagttcatcagctctttgattacatttgtggtgtaagcacaggtgccatattagctttcatgttggggttgtttcatatgcccttggatgaatgtgaggaactttatcgaaaattaggatcagatgtattttcacaaaatgtcattgttggaacagtaaaaatgagttggagccatgcattttatgacagtcaaacatgggaaaacattcttaaggataggatgggatctgcactgatgattgaaacagcaagaaaccccacatgtcctaaggtagctgctgtaagtaccatagtaaatagagggataacacccaaagcttttgtgttcagaaactatggtcattttcctggaatcaactctcattatttgggaggctgtcagtataaaatgtggcaggccattagagcctcatctgctgctccaggctactttgcagaatatgcattgggaaatgatcttcatcaagatggaggtttgcttctgaataacccttcggcattagctatgcatgagtgtaaatgtctttggccagatgtgccgttagagtgcatagtatccctgggcactggacgttatgagagtgatgtgagaaacacggtaacatacacaagcttgaaaactaaactttctaatgttatcaacagtgctacagatacagaagaagtccatataatgcttgatggcctgttacctcctgacacctattttagattcaatcctgtaatgtgtgaaaacatacctctagatgaaagtcgaaatgaaaagctggatcagctgcagttggaagggttgaaatacatagaaagaaatgaacaaaaaatgaaaaaagttgcaaaaatattaagtcaagaaaaaacaactctgcagaaaattaatgattggataaaattaaaaactgatatgtatgaaggacttccattcttttcaaaattgtgatgagtatatgcttatgttctcataaatgaaggtctgtttagaagatcaaccacattcaataaggaattgtggggttcgacatgagttaactttgaaatacgtatgaattctggagaatcctgaaaaagacggtgcttcaaccagcttgcatagcacagagaatattcttggttacagaattcatatgggaactaggcttttaagatgttaataattagctaagctttagtaacccttactgtgctagtagattttagtagatattggtgttatattgtttgatgtttgaaaatatattaatatatgtgccgaacaagaaaccgaaagctatattgtactgtgtatttttactttagtcctcataatcatgttgaatttatgtgatcattgattttatttcatatggaaaagctaatttcttcttaaatttacattacctaatattctcactagctatgttctccaatccacactgccttttattgtaatatcatctaaatagatgcagaaaaatggaattttctctattaaagtattttacatttgacataaaaaagaaccagatacagttttctattcagatatgtttattttaacattgtttggttaaaaaaggtgaagttccagtcaaccactttttacccctgaaatttcaagataatgctatattaacttttccagatctaacactagcttattcttccctgttataaaatggtttgaacttactgaggagatattcctatcattaacaaaaataaactatttaaataa

SEQ ID NO: 89293 - DNA, 2349 bp, Artificial Sequence
  derived and/or modified sequence
atgagcatcaaccttactgtggacatttatatttacctgctgtctaacgccagaagcgtgtgcgggaagcagcggtcgaagcagctgtattttctatttagtcccaaacattactggcgcattagccatataagcttgcaacggggtttccatacgaacatcattaggtgcaaatggaccaagtccgaggcccatagctgttctaaacactgttattcaccaagcaatcatggtctccatatagggatcctcaagctttctacctccgccccaaaggggctgactaaagtcaacatttgcatgtctaggatcaagagcaccctgaactccgttagtaaggctgtatttggaaatcaaaacgaaatgatatcgcgactggcccagttcaagccaagttcccagattttacgtaaagtctccgattccggctggctgaagcaaaagaacatcaaacaagcaataaagtccctgaaaaaatacagcgataagagcgccgagaaatctcccttcccagaggaaaagtcacatatcatcgataaagaggaagacatcggaaagcgcagcctgtttcattatactagttcaataacaacaaaatttggggactccttctacttcctctctaatcatattaacagctattttaagcgtaaggaaaagatgtcccagcagaaggagaacgaacactttagagataaatccgaactggaggacaaaaaggtggaggagggaaagctccgttccccagacccaggaattctggcatacaaaccgggtagtgaatccgtgcataccgtggacaagcccaccagcccttctgcaatacccgacgtccttcaggtatctaccaagcagagtattgctaacttcctcagtaggcctacagaaggagttcaggccttggttgggggatatattggagggctggtgccaaagctgaagtacgactccaaatctcaatcagaagaacaggaggagcctgccaagacagaccaagcagtgtccaaagacaggaatgccgaagaaaaaaagcggctgagtctccaacgcgagaaaattatcgccagagtttctatcgataatagaacccgagcattggtccaggccctgcggagaactactgaccctaagctgtgtattacaagggtcgaagaactgactttccacctcctcgagtttccagaaggaaagggtgtcgcggttaaagaaagaataataccttacttgcttcgcttgcgacagataaaagacgagaccttgcaggccgcagttcgggaaatattggcacttattggttatgttgatccagtgaagggacgcggtatccggattttgtcaatagacggcggagggaccagaggggttgtggccctacagacactacggaagctggttgagctcactcagaagcctgtgcaccagttgtttgactatatttgtggcgtgtcaaccggcgctatcttggcttttatgttaggacttttccatatgcctttggacgagtgtgaggagttatataggaagttaggcagtgacgtcttttcacagaacgtaatcgtggggaccgtgaagatgtcatggagccacgctttctatgattcccagacctgggagaatatcctcaaggatcgcatgggctccgctctcatgatcgaaacagcacgaaatcctacgtgtcctaaagtggcagccgttagcaccatcgtgaatagggggataacccccaaggctttcgtgttccgcaactatggtcactttcctggcattaactcacactacctgggcggatgccagtacaaaatgtggcaggccattagggcatctagcgcagctcccggttatttcgctgaatatgccctggggaacgatttgcatcaggacggaggtctgttgctcaacaaccctagtgccctagccatgcacgagtgtaagtgcctgtggcccgacgtaccgcttgaatgcattgtgtcactcggcacggggaggtacgaaagtgacgttagaaataccgtcacttatacctctctcaagaccaaactcagcaatgtcataaatagtgcaactgacaccgaagaagtgcacatcatgctcgatggactcctgccccctgatacatatttccgctttaacccagtgatgtgcgagaatatcccactggacgaatcccgtaatgaaaagctggatcagctgcaactagaaggcctgaagtatatagaacgcaacgaacagaagatgaagaaagtggccaagatattatcccaggagaagaccacactccagaaaatcaacgactggatcaaactgaaaacagatatgtacgaggggctgccgtttttttcaaagctgtag

SEQ ID NO: 89294 - DNA, 2349 bp, Artificial Sequence
  derived and/or modified sequence
atgtcaatcaatctcacagtcgacatctacatctacctcctgagcaacgctagaagtgtgtgcggaaaacagcgctctaaacagctgtatttcctattctcgccaaaacactattggcgaattagccatattagcctccagcggggtttccacacgaacattatcagatgtaaatggacaaaatctgaagcacactcttgtagtaagcactgttatagcccttcaaaccatgggttgcacattggcattcttaagctctctaccagcgctcctaaggggctcaccaaggtcaacatctgtatgtcccggatcaagtctactcttaattccgtctccaaggccgtatttgggaaccagaacgagatgatttccaggctcgcccagtttaagccatcctcacagatactgcgtaaggtaagtgacagcggatggctgaaacagaaaaatatcaaacaggcaattaagagtctgaagaagtactccgacaaaagtgctgagaaaagtccttttcccgaggaaaaatcgcacattattgacaaggaagaggatattggaaagcgatcactctttcattatacttcaagtattaccaccaagtttggagactccttttactttctgagcaaccacatcaattcttactttaaacggaaggagaagatgtcacagcagaaagaaaatgagcatttccgtgataaatctgaactcgaggacaagaaggtagaggaaggaaagctacgctcccccgaccccggaattctggcttataagccaggtagcgagagcgtacacacagttgataagcctacctcgcctagcgcaattcccgacgtgctgcaagtctccacaaaacaatccatcgcaaatttcctgagccgacctacggagggagtgcaggctttggtgggtggttacatcggcggactggttccaaaactgaagtacgatagcaagtctcagtcggaagaacaggaggaaccagctaaaacagatcaggcagtatctaaggatcggaacgccgaggagaagaagaggctcagtctgcagcgagagaagatcatcgccagggtaagcatcgacaatagaactcgggctttagtgcaagcactgagacggaccaccgaccctaagctgtgcataaccagagtcgaggaattgacattccatctcctggagttccccgaaggcaaaggggtcgcagtgaaagaacgaattataccctacctgcttcgactaagacagatcaaggatgaaactcttcaggcagcagttcgagagatcctggcactgatcgggtacgttgacccagtcaagggaaggggtatacgcatattgagcattgacggcggaggaaccagaggtgtggtggctttgcagacactgagaaagttggtcgagcttactcagaaacctgtccaccagttgtttgactacatttgtggagtgtcaaccggcgctattcttgcatttatgctcggtttatttcacatgccactcgatgagtgtgaagaactttaccgtaagctagggagtgacgtctttagccaaaatgtgatagtggggaccgtcaagatgtcctggtcacacgcattttacgactcccagacttgggaaaatattcttaaggaccgcatgggatccgccttgatgattgagacggctcgcaaccccacctgtcccaaggtggctgctgtatcaacaattgtgaacagaggcataacacccaaagctttcgtgttccggaactacggtcacttcccgggaattaattcccattacctgggcggatgccagtacaagatgtggcaagcgatcagggccagcagtgctgccccagggtacttcgccgaatacgccctgggcaacgatcttcatcaggatgggggacttctcttgaacaacccctccgccctcgcgatgcatgagtgcaagtgtttatggccagatgtgcctctggaatgcattgtttcacttggtaccggtaggtacgaatccgacgtgcggaatacagtcacctacacatccctgaaaacgaaactgtcaaatgttatcaattccgcaaccgacactgaagaagtgcatattatgttggacgggctactgccaccggatacttatttccgattcaaccccgtaatgtgtgagaatatccccctcgacgagtccagaaatgaaaagctggaccagttgcaattagaaggactgaaatatatcgagagaaacgaacaaaaaatgaaaaaggtggccaaaattttgtcccaggaaaaaaccaccctgcagaagattaacgattggattaaactcaagacagatatgtacgagggcctgccgttctttagcaaactgtag

SEQ ID NO: 89295 - DNA, 2349 bp, Artificial Sequence
  derived and/or modified sequence
atgtcaataaacctcactgtagatatttacatttaccttctgtctaatgccagatcagtgtgcggtaaacagaggtccaagcagttgtacttcttgtttagccctaaacactactggcggatctcccatatttctttgcagcgcggttttcatactaacataatccggtgtaaatggactaagtcagaggcgcactcatgctccaagcactgctatagtccgtcaaaccatggcctacatatcgggatactaaagctgagcacctctgcccctaaaggcctgaccaaggttaacatctgcatgtcccggatcaagagtactctgaattctgtttctaaagctgtttttggcaaccaaaacgaaatgatctctcgcctggctcagtttaagccttccagccagatcctgcgcaaggtgagtgactctggatggctgaaacagaaaaacatcaaacaagctatcaagagccttaaaaaatactcagacaaatctgccgaaaagagtcccttccctgaggagaagtcccatattattgataaggaggaggacatcggcaagcgatctctgttccactacacctcttctatcactactaaattcggcgatagtttttactttttatccaatcacattaactcatacttcaaacgcaaggagaagatgagccagcagaaggaaaacgagcacttcagggataaatcagagcttgaggataagaaggttgaggagggcaaacttcgctccccagaccccggtatacttgcatataaaccgggatccgagtcggtgcacactgtcgataagccaaccagcccatcagccattcccgatgtgctacaggtgagtacaaaacagtcaattgccaactttttgagccggcctactgagggggtacaggcacttgtaggcggttacataggcggactggtgcccaaattgaaatacgactcaaagtcccagtctgaagagcaggaagagccagcaaagaccgatcaggccgtctccaaggatcgtaacgctgaggagaagaaacgcctctccctgcagagggaaaaaatcattgcgagagtgtctatagacaaccgcactagagccctagtgcaagccttgaggcgtaccacggatcctaaactgtgcattactcgtgtggaagagctgacatttcacctgctcgagttccccgaggggaagggcgttgctgtcaaagaacgcatcatcccttacctcctcaggcttcgccagataaaagacgaaactctgcaagcagcggtccgagaaatcctggccctgatcggatatgtcgaccctgttaagggtcgcggaatcagaattttgtccatcgacggtggcggtactagaggcgtggtagcccttcaaaccttaaggaaattggtcgagctgacccagaaacccgtgcatcagttattcgactatatctgcggcgtcagcacgggggctatcctggcatttatgctcggtctcttccacatgccattagacgagtgcgaagagctttacaggaagcttgggtccgatgtattttcacagaatgttatcgtcggaacggtgaaaatgagttggtctcacgccttctatgacagccaaacttgggaaaatatcctgaaggacagaatggggtcggcattaatgattgagacagccaggaatcccacatgtcctaaagtggcagctgtcagcaccatcgtaaaccgaggaattactcctaaagccttcgtattcagaaattatggccactttcccggaatcaactcacactacctgggagggtgtcagtataagatgtggcaagcgatccgcgctagctccgccgctcccggatattttgcggagtatgcactcggcaatgacctgcatcaagacgggggtctccttctgaacaatccctccgccctcgccatgcatgaatgcaaatgcctttggcctgacgtaccccttgagtgcatcgtgagcctgggtacgggcagatatgagagcgacgtgcgcaacacagtgacctacacatccctgaaaacaaaactgagcaacgtgatcaactcagccacagacacggaagaggtgcatattatgctcgatggattgctgccccctgatacttacttccgtttcaatcctgtcatgtgcgaaaacatcccgcttgacgagagtcgaaacgagaagctcgaccaactgcaactggagggtttaaaatacattgaacgcaacgagcagaagatgaagaaggtcgccaaaatcttgtcccaggagaagactaccctgcagaaaattaatgactggatcaagttgaaaacagatatgtacgagggccttcctttcttctccaagctgtag

SEQ ID NO: 89296 - DNA, 2349 bp, Artificial Sequence
  derived and/or modified sequence
atgagcatcaacctgaccgtggacatctacatctacctgctgagcaacgccagaagcgtgtgcggcaagcagagaagcaagcagctgtacttcctgttcagccccaagcactactggagaatcagccacatcagcctgcagagaggcttccacaccaacatcatcagatgcaagtggaccaagagcgaggcccacagctgcagcaagcactgctacagccccagcaaccacggcctgcacatcggcatcctgaagctgagcaccagcgcccccaagggcctgaccaaggtgaacatctgcatgagcagaatcaagagcaccctgaacagcgtgagcaaggccgtgttcggcaaccagaacgagatgatcagcagactggcccagttcaagcccagcagccagatcctgagaaaggtgagcgacagcggctggctgaagcagaagaacatcaagcaggccatcaagagcctgaagaagtacagcgacaagagcgccgagaagagccccttccccgaggagaagagccacatcatcgacaaggaggaggacatcggcaagagaagcctgttccactacaccagcagcatcaccaccaagttcggcgacagcttctacttcctgagcaaccacatcaacagctacttcaagagaaaggagaagatgagccagcagaaggagaacgagcacttcagagacaagagcgagctggaggacaagaaggtggaggagggcaagctgagaagccccgaccccggcatcctggcctacaagcccggcagcgagagcgtgcacaccgtggacaagcccaccagccccagcgccatccccgacgtgctgcaggtgagcaccaagcagagcatcgccaacttcctgagcagacccaccgagggcgtgcaggccctggtgggcggctacatcggcggcctggtgcccaagctgaagtacgacagcaagagccagagcgaggagcaggaggagcccgccaagaccgaccaggccgtgagcaaggacagaaacgccgaggagaagaagagactgagcctgcagagagagaagatcatcgccagagtgagcatcgacaacagaaccagagccctggtgcaggccctgagaagaaccaccgaccccaagctgtgcatcaccagagtggaggagctgaccttccacctgctggagttccccgagggcaagggcgtggccgtgaaggagagaatcatcccctacctgctgagactgagacagatcaaggacgagaccctgcaggccgccgtgagagagatcctggccctgatcggctacgtggaccccgtgaagggcagaggcatcagaatcctgagcatcgacggcggcggcaccagaggcgtggtggccctgcagaccctgagaaagctggtggagctgacccagaagcccgtgcaccagctgttcgactacatctgcggcgtgagcaccggcgccatcctggccttcatgctgggcctgttccacatgcccctggacgagtgcgaggagctgtacagaaagctgggcagcgacgtgttcagccagaacgtgatcgtgggcaccgtgaagatgagctggagccacgccttctacgacagccagacctgggagaacatcctgaaggacagaatgggcagcgccctgatgatcgagaccgccagaaaccccacctgccccaaggtggccgccgtgagcaccatcgtgaacagaggcatcacccccaaggccttcgtgttcagaaactacggccacttccccggcatcaacagccactacctgggcggctgccagtacaagatgtggcaggccatcagagccagcagcgccgcccccggctacttcgccgagtacgccctgggcaacgacctgcaccaggacggcggcctgctgctgaacaaccccagcgccctggccatgcacgagtgcaagtgcctgtggcccgacgtgcccctggagtgcatcgtgagcctgggcaccggcagatacgagagcgacgtgagaaacaccgtgacctacaccagcctgaagaccaagctgagcaacgtgatcaacagcgccaccgacaccgaggaggtgcacatcatgctggacggcctgctgccccccgacacctacttcagattcaaccccgtgatgtgcgagaacatccccctggacgagagcagaaacgagaagctggaccagctgcagctggagggcctgaagtacatcgagagaaacgagcagaagatgaagaaggtggccaagatcctgagccaggagaagaccaccctgcagaagatcaacgactggatcaagctgaagaccgacatgtacgagggcctgcccttcttcagcaagctgtag

SEQ ID NO: 89297 - protein, 720 aa, Artificial Sequence
  derived and/or modified sequence
MSINLTVDIYIYLLSNARSVCGKQRSKQLYFLFSPKHYWRISHISLQRGFHTNIIRCKWTKSEAHSCSKHCYSPSNHGLHIGILKLSTSAPKGLTKVNICMSRIKSTLNSVSKAVFGNQNEMISRLAQFKPSSQILRKVSDSGWLKQKNIKQAIKSLKKYSDKSAEKSPFPEEKSHIIDKEEDIGKRSLFHYTSSITTKFGDSFYFLSNHINSYFKRKEKMSQQKENEHFRDKSELEDKKVEEGKLRSPDPGILAYKPGSESVHTVDKPTSPSAIPDVLQVSTKQSIANFLSRPTEGVQALVGGYIGGLVPKLKYDSKSQSEEQEEPAKTDQAVSKDRNAEEKKRLSLQREKIIARVSIDNRTRALVQALRRTTDPKLCITRVEELTFHLLEFPEGKGVAVKERIIPYLLRLRQIKDETLQAAVREILALIGYVDPVKGRGIRILSIDGGGTRGVVALQTLRKLVELTQKPVHQLFDYICGVSTGAILAFMLGLFHMPLDECEELYRKLGSDVFSQNVIVGTVKMSWSHAFYDSQTWENILKDRMGSALMIETARNPTCPKVRKDGGLLLNNPSALAMHECKCLWPDVPLECIVSLGTGRYESDVRNTVTYTSLKTKLSNVINSATDTEEVHIMLDGLLPPDTYFRFNPVMCENIPLDESRNEKLDQLQLEGLKYIERNEQKMKKVAKILSQEKTTLQKINDWIKLKTDMYEGLPFFSKL

SEQ ID NO: 89298 - protein, 55 aa, Artificial Sequence
  derived and/or modified sequence
MSINLTVDIYIYLLSNARSVCGKQRSKQLYFLFSPKHYWRISHISLQRGFHTNII

SEQ ID NO: 89299 - protein, 193 aa, Artificial Sequence
  derived and/or modified sequence
MSINLTVDIYIYLLSNARSVCGKQRSKQLYFLFSPKHYWRISHISLQRGFHTNIIRCKWTKSEAHSCSKHCYSPSNHGLHIGILKLSTSAPKGLTKVNICMSRIKSTLNSVSKAVFGNQNEMISRLAQFKPSSQILRKVSDSGWLKQKNIKQAIKSLKKYSDKSAEKSPFPEEKSHIIDKEEDIGKRSLFHYT

SEQ ID NO: 89300 - protein, 717 aa, Artificial Sequence
  derived and/or modified sequence
MSINLTVDIYIYLLSNARSVCGKQRSKQLYFLFSPKHYWRISHISLQRGFHTNIIRCKWTKSEAHSCSKHCYSPSNHGLHIGILKLSTSAPKGLTKVNICMSRIKSTLNSVSKAVFGNQNEMISRLAQFKPSSQILRKVSDSGWLKQKNIKQAIKSLKKYSDKSAEKSPFPEEKSHIIDKEEDIGKRSLFHYTSSITTKFGDSFYFLSNHINSYFKRKEKMSQQKENEHFRDKSELEDKKVEEGKLRSPDPGILAYKPGSESVHTVDKPTSPSAIPDVLQVSTKQSIANFLSRPTEGVQALVGGYIGGLVPKLKYDSKSQSEEQEEPAKTDQAVSKDRNAEEKKRLSLQREKIIARVSIDNRTRALVQALRRTTDPKLCITRVEELTFHLLEFPEGKGVAVKERIIPYLLRLRQIKDETLQAAVREILALIGYVDPVKGRGIRILSIDGGGTRGVVALQTLRKLVELTQKPVHQLFDYICGVSTGAILAFMLGLFHMPLDECEELYRKLGSDVFSQNVIVGTVKMSWSHAFYDSQTWENILKDRMGSALMIETARNPTCPKDGGLLLNNPSALAMHECKCLWPDVPLECIVSLGTGRYESDVRNTVTYTSLKTKLSNVINSATDTEEVHIMLDGLLPPDTYFRFNPVMCENIPLDESRNEKLDQLQLEGLKYIERNEQKMKKVAKILSQEKTTLQKINDWIKLKTDMYEGLPFFSKL

SEQ ID NO: 89301 - DNA, 2163 bp, Artificial Sequence
  derived and/or modified sequence
atgtcgatcaacctaaccgtagacatatacatttacctgctgtcaaacgcccggagcgtgtgcggtaagcagaggtctaagcaactatatttcctgttttcaccaaagcattattggagaatttcccatatcagtctgcaacggggcttccacacaaatatcatacggtgtaagtggacaaagtctgaggcccatagctgtagcaagcattgctactccccttcgaaccatgggctccacattggtattctgaaactgtccacttcagcccccaaaggccttacaaaggtgaatatctgcatgagccggatcaagagcactctgaacagcgtgtcgaaagcagtgttcggaaaccagaatgagatgatttcaagattagcccagtttaagccttcgtcgcagattttaagaaaagtctccgattctggttggttaaaacagaagaatatcaaacaagccatcaagagcctgaagaaatacagcgataaaagtgccgagaagtcccccttccctgaggagaaatcccatattatcgacaaagaggaggacataggtaagagaagcctttttcactacacttcctccataaccacaaaatttggagacagcttctattttctcagcaaccacatcaattcctacttcaagcgcaaggaaaaaatgtcacaacagaaggagaacgagcactttagagataagagcgagctggaggacaaaaaagtcgaagaaggtaagctgcgcagccctgaccccgggattctggcctataagcctggttcagagagcgtgcacaccgtcgataagcccacgtcaccctccgccattcccgacgtgcttcaggtgtctacaaaacagtccattgcgaacttccttagccgacctactgagggtgtgcaggctctcgtcggtggttacataggcgggctcgtgccgaagttaaagtatgactctaaaagccaatctgaagaacaggaagaacccgctaagaccgatcaagcggtctcgaaggaccgcaacgcggaagagaaaaaacgccttagcttacagcgggagaaaattatcgctcgcgtgtctattgacaatcgaacacgagcgttagtacaggcccttaggagaaccactgatcctaaactgtgtattacgcgcgtggaagagttgactttccatcttcttgagttccctgagggcaaaggtgtagcagtaaaggagcggattatcccctacttgctcagactccggcaaataaaggatgagacccttcaggccgccgtaagggaaattttggcactcataggctacgtggatcccgtcaaagggcgcggcattcggattctcagcatcgatggcggcggcacccggggtgttgtggctttgcagacgctacgcaaactggtcgaactgacccagaaacccgtccatcagctcttcgattacatctgtggtgtgagtacaggggccattctggcgtttatgctcggcttattccatatgccactggacgagtgcgaagaactgtatagaaaactggggtccgacgttttcagccagaatgtgattgtaggcacagtcaagatgagttggtcccatgccttttacgatagccagacatgggaaaacatcctcaaagatcgaatggggtctgctcttatgatcgagactgcgcgtaatcctacttgccccaaggttcggaaggacggagggctgctgctcaacaatccgtccgcgctggcaatgcacgagtgtaagtgcctgtggcccgacgtgcccctagagtgcatcgtttcattgggcactggtagatacgaaagcgacgttcggaacacggtaacatacacttctctgaaaacaaaactgtcaaacgttatcaattctgccacagataccgaagaagttcacattatgctcgacgggctgctgccccctgatacttactttcgtttcaaccctgtgatgtgcgaaaatattcctctggatgagtctagaaacgagaagttagatcagctgcaactggagggactcaaatatatcgaacgaaacgaacagaaaatgaaaaaagtggctaaaatcctgtcccaggagaagacgaccctgcagaagataaatgactggattaagctaaaaacagacatgtatgaaggactgcccttctttagtaagctatag

SEQ ID NO: 89302 - DNA, 168 bp, Artificial Sequence
  derived and/or modified sequence
atgagcattaatctgaccgtcgatatctacatctacctgctgagcaacgcccggtctgtctgtgggaagcaacggtcaaaacagctatactttctgttctctccgaaacattattggagaatttcccatataagtctccagcggggcttccacacgaacataatctag

SEQ ID NO: 89303 - DNA, 582 bp, Artificial Sequence
  derived and/or modified sequence
atgtccatcaacctaactgtggacatctacatatatctcctctcaaatgcacgcagcgtgtgtggcaagcagcggtccaagcaactgtattttcttttttcccctaagcattactggcgcatctctcacatttcccttcagagaggcttccacacaaacatcatcaggtgtaaatggacgaaatcggaggcgcattcatgctcaaaacattgctactcaccttctaatcacgggttgcatataggtatcctgaagctgtcaacgagcgcacctaagggactcactaaggtgaacatttgtatgtccagaataaagagcactctaaattccgtttcgaaggcggtcttcggcaatcaaaatgaaatgattagcagacttgcacagtttaagccaagttctcaaattctgcgcaaagtgtcagacagcgggtggctcaagcagaagaatatcaagcaggcgatcaaaagcctgaagaaatatagcgataagtcagcggagaaatcccctttccccgaagagaaatcacacatcatcgataaagaggaggatattggcaaacggagcttgtttcattacacttag

SEQ ID NO: 89304 - DNA, 2154 bp, Artificial Sequence
  derived and/or modified sequence
atgtccattaacctgactgtggatatttatatctacttgctctcaaatgcgcgctccgtgtgtggcaaacaacggagcaagcaactctacttcctgttcagtccaaaacactattggaggatctctcatattagtcttcagcgaggatttcatacgaatattattaggtgcaagtggacaaagtcagaggctcacagctgctccaagcattgttacagtcctagtaaccatgggctgcatatcggcatactaaaattaagcactagtgcccctaaagggctgaccaaagtcaacatctgtatgagcagaatcaagtctactctgaattccgtttctaaggcagtctttggaaaccagaacgagatgatttctaggttagcccaatttaaaccctcttcacagattctcagaaaggtcagcgactcaggctggcttaaacaaaagaacataaagcaggctatcaaatcgcttaagaaatacagcgacaagagcgctgaaaagagtcccttcccggaggagaaatcgcatatcatcgacaaagaggaggatatcggaaagagatcgttgtttcattatacatcctctatcacgacgaagttcggtgacagtttttatttcctctcaaatcatattaacagctacttcaagaggaaggagaaaatgtcgcagcaaaaggagaacgaacactttcgggataaaagcgaactagaagataaaaaggttgaggagggcaagctgcgatcacccgatcccggtattctcgcctacaaaccagggtctgaatcagtgcacacggtagataagcctaccagcccatccgccatccccgacgtgctgcaagtgagcacaaagcagtcaatcgcaaactttctgtcccgacctacagagggtgtgcaagccctggtcgggggatacatcggcgggttggtccctaagctgaaatacgattcgaagagtcaaagtgaggaacaggaggaaccagctaaaacagaccaagctgtatcgaaggataggaacgcggaagaaaaaaaaaggctctctctgcagcgggaaaagatcatcgcaagagtctccattgataacagaactcgcgccctcgtccaagcactgagaagaactacggacccaaagctgtgcatcacaagagttgaggagctaaccttccacctgctggagttcccagagggcaagggcgttgcggtgaaagaacggatcatcccttaccttctcaggctgaggcagattaaggacgaaacactgcaggctgctgttagagagattctagcgctgattggctacgtggaccctgttaaggggcgcgggatccgaattttgtcaattgacggtggaggaaccagaggagtggttgctcttcagacactgaggaaattggtggagctaacacagaaacccgtgcatcaattatttgactacatttgcggagtgagcacaggtgccatcttggcattcatgctcggactatttcatatgcccctcgatgagtgcgaggagttataccggaagttgggaagcgacgtgttctcccagaacgtcatcgtgggaactgtcaagatgtcatggtctcacgctttctacgacagccaaacgtgggaaaatatcctgaaagatagaatgggtagcgctcttatgatagaaacagccaggaatcccacttgtcctaaggacggagggctgctgttaaataatcctagcgcactggccatgcatgagtgcaagtgcctgtggccagatgtccctctggagtgcatcgtgtctcttggaactggccgctatgaaagcgatgtcagaaacactgtaacttacacatcactgaaaaccaaattgtccaacgtgatcaactcggccactgacacagaggaagtccatatcatgttggatggacttctgccccctgacacatattttcgattcaacccagtaatgtgcgaaaacatcccactcgacgaaagtcgaaacgagaaactggatcagctgcagctggagggcctgaaatacatagagagaaatgagcagaagatgaaaaaagtggccaaaattctttcacaggagaagacaactttgcaaaagatcaacgattggatcaagctcaaaacagacatgtacgaaggactgcctttctttagcaagctgtag

SEQ ID NO: 89305 - DNA, 2163 bp, Artificial Sequence
  derived and/or modified sequence
atgagcatcaacctgactgtggacatctacatctacctgctgagcaatgcccggtctgtgtgtgggaagcagaggagcaagcagctgtacttcctgttcagccccaagcactactggaggatcagccacatcagcctgcagaggggcttccacaccaacatcatccgctgcaagtggaccaagtctgaggcccacagctgcagcaagcactgctacagccccagcaaccacggcctgcacatcggcatcctgaagctgagcaccagcgcccccaagggcctgaccaaggtgaacatctgcatgagccgcatcaagagcaccctgaacagcgtgtccaaggctgtgtttggaaaccagaatgagatgatcagccggctggcccagttcaagcccagcagccagatcctgaggaaggtgtctgacagcggctggctgaagcagaagaacatcaagcaggccatcaagagcctgaagaagtacagcgacaagtctgctgagaagagccccttccctgaggagaagagccacatcatcgacaaggaggaggacatcggcaagaggagcctcttccactacaccagcagcatcaccaccaagtttggagacagcttctacttcctgagcaaccacatcaacagctacttcaagaggaaggagaagatgagccagcagaaggaaaatgagcacttccgggacaagtctgagctggaggacaagaaggtggaggagggcaagctgcggagcccagaccccggcatcctggcctacaagccaggcagcgagagcgtgcacacagtggacaagcccaccagccccagcgccatcccagatgtgctgcaggtgtccaccaagcagagcatcgccaacttcctgagccggcccacagaaggagtgcaggccctggtgggcggctacatcggcggcctggtgcccaagctgaagtatgacagcaagagccagagcgaggagcaggaggagcccgccaagacagaccaggccgtgtccaaggacagaaatgctgaggagaagaagaggctgagcctgcagcgggagaagatcatcgcccgggtgtccattgacaacagaacccgggccctggtgcaggccctgcggaggaccacagaccccaagctgtgcatcaccagggtggaggagctgaccttccacctgctggagttccctgagggcaaaggagtggccgtgaaggagcgcatcatcccctacctgctgcggctgcggcagatcaaggatgagaccctgcaggccgctgtgcgggagatcctggccctgattggctacgtggaccctgtgaagggccggggcatccgcatcctgagcattgatggcggcggcacccggggcgtggtggccctgcagaccctgaggaagctggtggagctgacccagaagcctgtgcaccagctgtttgactacatctgtggggtgtccactggagccatcctggccttcatgctgggcctcttccacatgcccctggatgaatgtgaggagctgtacaggaagctgggcagtgatgtgttcagccagaatgtgattgtgggcaccgtgaagatgtcctggagccacgccttctatgacagccagacctgggagaacatcctgaaggacaggatgggcagcgccctgatgattgaaacagccaggaaccccacctgccccaaggtgaggaaggatggcggcctgctgctgaacaaccccagcgccctggccatgcatgagtgcaagtgcctgtggccagatgtgcccctggagtgcatcgtgtccctgggcaccggccgctatgaaagtgatgtgaggaacacagtgacctacaccagcctgaagaccaagctgagcaatgtcatcaacagcgccacagacacagaggaggtgcacatcatgctggatggcctgctgcccccagacacctacttccgcttcaaccctgtgatgtgtgagaacatccccctggatgagagcagaaatgagaagctggaccagctgcagctggagggcctgaagtacatcgagagaaatgagcagaagatgaagaaggtggccaagatcctgagccaggagaagaccaccctgcagaagatcaatgactggatcaagctgaagacagacatgtatgagggcctgcccttcttcagcaagctgtag

SEQ ID NO: 89306 - DNA, 168 bp, Artificial Sequence
  derived and/or modified sequence
atgagcatcaacctgactgtggacatctacatctacctgctgagcaatgcccggtctgtgtgtgggaagcagaggagcaagcagctgtacttcctgttcagccccaagcactactggaggatcagccacatcagcctgcagaggggcttccacaccaacatcatctag

SEQ ID NO: 89307 - DNA, 582 bp, Artificial Sequence
  derived and/or modified sequence
atgagcatcaacctgactgtggacatctacatctacctgctgagcaatgcccggtctgtgtgtgggaagcagaggagcaagcagctgtacttcctgttcagccccaagcactactggaggatcagccacatcagcctgcagaggggcttccacaccaacatcatccgctgcaagtggaccaagtctgaggcccacagctgcagcaagcactgctacagccccagcaaccacggcctgcacatcggcatcctgaagctgagcaccagcgcccccaagggcctgaccaaggtgaacatctgcatgagccgcatcaagagcaccctgaacagcgtgtccaaggctgtgtttggaaaccagaatgagatgatcagccggctggcccagttcaagcccagcagccagatcctgaggaaggtgtctgacagcggctggctgaagcagaagaacatcaagcaggccatcaagagcctgaagaagtacagcgacaagtctgctgagaagagccccttccctgaggagaagagccacatcatcgacaaggaggaggacatcggcaagaggagcctcttccactacacctag

SEQ ID NO: 89308 - DNA, 2154 bp, Artificial Sequence
  derived and/or modified sequence
atgagcatcaacctgactgtggacatctacatctacctgctgagcaatgcccggtctgtgtgtgggaagcagaggagcaagcagctgtacttcctgttcagccccaagcactactggaggatcagccacatcagcctgcagaggggcttccacaccaacatcatccgctgcaagtggaccaagtctgaggcccacagctgcagcaagcactgctacagccccagcaaccacggcctgcacatcggcatcctgaagctgagcaccagcgcccccaagggcctgaccaaggtgaacatctgcatgagccgcatcaagagcaccctgaacagcgtgtccaaggctgtgtttggaaaccagaatgagatgatcagccggctggcccagttcaagcccagcagccagatcctgaggaaggtgtctgacagcggctggctgaagcagaagaacatcaagcaggccatcaagagcctgaagaagtacagcgacaagtctgctgagaagagccccttccctgaggagaagagccacatcatcgacaaggaggaggacatcggcaagaggagcctcttccactacaccagcagcatcaccaccaagtttggagacagcttctacttcctgagcaaccacatcaacagctacttcaagaggaaggagaagatgagccagcagaaggaaaatgagcacttccgggacaagtctgagctggaggacaagaaggtggaggagggcaagctgcggagcccagaccccggcatcctggcctacaagccaggcagcgagagcgtgcacacagtggacaagcccaccagccccagcgccatcccagatgtgctgcaggtgtccaccaagcagagcatcgccaacttcctgagccggcccacagaaggagtgcaggccctggtgggcggctacatcggcggcctggtgcccaagctgaagtatgacagcaagagccagagcgaggagcaggaggagcccgccaagacagaccaggccgtgtccaaggacagaaatgctgaggagaagaagaggctgagcctgcagcgggagaagatcatcgcccgggtgtccattgacaacagaacccgggccctggtgcaggccctgcggaggaccacagaccccaagctgtgcatcaccagggtggaggagctgaccttccacctgctggagttccctgagggcaaaggagtggccgtgaaggagcgcatcatcccctacctgctgcggctgcggcagatcaaggatgagaccctgcaggccgctgtgcgggagatcctggccctgattggctacgtggaccctgtgaagggccggggcatccgcatcctgagcattgatggcggcggcacccggggcgtggtggccctgcagaccctgaggaagctggtggagctgacccagaagcctgtgcaccagctgtttgactacatctgtggggtgtccactggagccatcctggccttcatgctgggcctcttccacatgcccctggatgaatgtgaggagctgtacaggaagctgggcagtgatgtgttcagccagaatgtgattgtgggcaccgtgaagatgtcctggagccacgccttctatgacagccagacctgggagaacatcctgaaggacaggatgggcagcgccctgatgattgaaacagccaggaaccccacctgccccaaggatggcggcctgctgctgaacaaccccagcgccctggccatgcatgagtgcaagtgcctgtggccagatgtgcccctggagtgcatcgtgtccctgggcaccggccgctatgaaagtgatgtgaggaacacagtgacctacaccagcctgaagaccaagctgagcaatgtcatcaacagcgccacagacacagaggaggtgcacatcatgctggatggcctgctgcccccagacacctacttccgcttcaaccctgtgatgtgtgagaacatccccctggatgagagcagaaatgagaagctggaccagctgcagctggagggcctgaagtacattgaaagaaatgagcagaagatgaagaaggtggccaagatcctgagccaggagaagaccaccctgcagaagatcaatgactggatcaagctgaagacagacatgtatgagggcctgcccttcttcagcaagctgtag

SEQ ID NO: 89309 - DNA, 2163 bp, Artificial Sequence
  derived and/or modified sequence
atgagcatcaacctgaccgtggacatctacatctacctgctgagcaatgcgcgaagtgtttgcgggaagcagcgcagtaagcagctttacttcttgttcagtcccaagcactactggagaattagccatatctcactgcagaggggtttccataccaacatcatcagatgcaagtggactaaaagcgaagcgcactcgtgtagcaaacattgctactccccttcaaatcatggtctgcacatagggattctcaaactgtccacatccgcccccaaggggttgacaaaagttaacatctgcatgtctcgaataaagagcacgctcaatagcgtgagtaaggctgttttcggaaatcagaacgagatgattagcaggctcgcccaatttaagccctcgagtcagatcctcagaaaagtgagcgacagtgggtggctgaaacaaaaaaacatcaagcaggccattaaatcactgaaaaagtacagcgataagtctgctgagaagtctcctttccctgaggagaagtcacacattatcgataaagaggaggatattgggaaacggtcactctttcactatacgagtagtatcaccacaaaattcggtgatagtttttattttctttccaatcacattaattcttactttaagaggaaggaaaagatgtcccaacagaaagaaaacgagcattttcgggacaaaagcgaactcgaggacaagaaggtcgaggagggcaaactgagatcgcccgatcccggcatcctggcctacaaacctggtagcgaatccgttcacactgttgacaagccaacctcaccgtcagccatccccgacgtgctgcaggtctccacaaagcagtcaattgccaatttcttatcccggcctacggagggcgtacaggccctggtcggtgggtatataggtggacttgtgcctaaattaaagtacgatagcaagtctcagtctgaggaacaggaagagcccgctaagactgaccaagccgtaagcaaagatcgcaacgccgaagaaaagaagaggctctctctccagagggagaaaatcatcgcccgcgtcagcatagataaccgcacccgggccctggtccaggccctccggcgaactactgatccaaaactctgcataacccgagtggaggagctcacttttcatttgctggaattcccagagggcaaaggagtggctgtgaaggaacggattataccctatctgctccgcctgcgccagatcaaagatgagactttgcaggctgctgtgagagaaatcctggcgttaattggctacgttgatccggtgaaaggacgaggaatacggatcttatctattgatggcggcgggactcggggtgtagtggcattacagaccttacggaagttagttgaactgacacaaaaacccgtacatcagcttttcgattacatctgcggggtgagtacaggcgcgattctggcattcatgctgggcctttttcatatgcccctggatgagtgtgaagagttgtatcgaaaactcggcagcgatgtcttctcccagaacgtgattgtgggaaccgtgaagatgtcctggtcacacgccttttacgacagccaaacctgggaaaacattcttaaggatcgcatgggcagcgctctgatgatcgagactgcaagaaaccccacatgccctaaagttcggaaagacggtggtcttctcctgaataatcccagcgccctggctatgcacgaatgcaaatgcctgtggcccgatgtgcctcttgagtgtatcgtttccttgggaacaggacgctacgaatcagacgtgcgcaacacggttacgtacaccagcttaaaaacgaaattaagcaatgtgattaactcagccaccgacaccgaggaggtccatattatgttggacgggctgttaccacccgacacttactttcggttcaatcccgtgatgtgcgaaaacattccgctcgatgagtctaggaatgagaaactggatcagctccagctagaaggcctaaagtatatagaaaggaacgagcagaaaatgaaaaaggttgccaaaattctgtcgcaagaaaaaaccacactccagaaaatcaacgactggatcaagttgaaaaccgacatgtacgagggtttacccttcttctcaaagctgtag

SEQ ID NO: 89310 - DNA, 168 bp, Artificial Sequence
  derived and/or modified sequence
atgagcatcaacctgaccgtggacatctacatctacctgctgagcaacgcgcggagtgtctgtggcaagcagcgctccaagcagttgtacttcctcttctcgccaaaacactattggcgcatctctcatatctctctccaacgtggctttcatactaatatcatctag

SEQ ID NO: 89311 - DNA, 582 bp, Artificial Sequence
  derived and/or modified sequence
atgagcatcaacctgaccgtggacatctacatctacctgctgagcaatgctaggagcgtttgcggcaaacagcgcagtaaacaattatactttcttttttccccgaagcattactggcgcatttcacacatctccttacagcggggattccatactaacattatccgctgcaagtggacaaaatccgaagcacatagctgctccaagcattgctacagtccgagtaaccacggccttcacatcggcattctgaagttgagcactagcgctcccaaaggactcactaaggtcaatatatgtatgagtagaatcaaaagcaccttgaatagcgtgtcaaaagccgtattcggaaaccaaaacgagatgatcagtaggctggcgcagtttaaaccctcctctcaaattctgcgaaaggtatctgacagtggatggctcaagcagaagaacataaagcaagcaatcaagtctctgaaaaagtattccgacaagtccgccgagaaaagccccttcccggaagaaaagtcccacattatcgacaaagaggaggatatcggtaaacgcagtctttttcattatacctag

SEQ ID NO: 89312 - DNA, 2154 bp, Artificial Sequence
  derived and/or modified sequence
atgagcatcaacctgaccgtggacatctacatctacctgctgagcaacgccaggagcgtgtgtgggaagcagcggtcgaaacagctgtactttctgttttccccgaaacactactggcggatctcccatatctctctgcagcgcggatttcacacaaacattattcggtgtaaatggacgaaaagcgaggcccactcttgttcgaagcattgctattctcctagcaatcatggccttcacatcggcattctgaagctttcaaccagcgccccaaaaggcctgacaaaggtgaacatttgcatgtctaggattaaatctaccctgaacagcgtgtctaaggcggttttcgggaaccagaacgagatgatatcacgcttggcccagttcaaaccgtcaagccaaatcctgcgtaaggtcagtgacagcggctggctgaaacaaaaaaacataaagcaagctataaaaagtctcaagaaatacagcgacaagtccgccgagaagagtccgttccccgaggaaaaatcacatatcattgataaggaagaagatatcggaaagcgcagtttgtttcattacacctctagtatcaccactaagtttggggatagtttttatttcctgagcaaccatatcaactcctatttcaaacgcaaagagaagatgagtcagcagaaggagaatgagcacttccgggacaaatctgagctcgaggacaaaaaggtggaagaaggaaaactgcgatctcctgaccctgggattctggcctacaaaccgggcagtgagtccgtgcacacagtggataagcctaccagcccttctgccatcccggatgtgctgcaagttagtaccaaacaatcgattgcgaacttcctctcgaggcccaccgagggggtacaagctctggttggcggctatatcggaggcctggttcctaagttaaagtacgactccaagtcccagtccgaagagcaggaagagcctgcaaaaaccgaccaagccgtatctaaagataggaacgccgaagagaaaaagcggctgtctctgcagagggagaagattattgcccgagtctccatcgacaaccggaccagagcgcttgtgcaagctttgcgaagaacaacagacccgaagctgtgtatcacacgcgtggaagagctgaccttccacctacttgagttccccgagggaaagggagtggcagtgaaggagagaattataccttacttgctgaggttgagacagatcaaagatgagacactccaggcagcggtcagagagatcctcgccttaattgggtacgtggatcctgtcaaaggcaggggcatacgaatactcagcattgacggcggcggaacaaggggggtggtggcccttcagacgctcaggaagctggtggagcttacccagaagcccgtgcaccaactgtttgattatatttgtggcgttagtacgggggccatcctggcttttatgctggggctgtttcacatgcctctggatgagtgtgaagaactgtatagaaagctggggtcagatgtgttctcccagaacgtcattgtggggacagtgaaaatgtcatggagccatgcattttacgacagccagacttgggaaaatatcctgaaagatagaatgggcagtgcactcatgattgaaaccgcgaggaaccctacctgtcctaaggatgggggcttgttgctgaacaatccgtccgcccttgccatgcatgagtgcaagtgtctttggccagatgttccactggaatgtattgtgagcctgggaactggcagatatgagtccgatgttcgtaatacggtaacctatacaagtctgaaaacaaagctgtcaaacgtaattaattctgcgactgacacggaagaagttcacataatgctggacggcctgctgccccccgacacatattttcggtttaatcctgtgatgtgcgagaacattcccctcgacgaatccaggaacgaaaagctggaccaacttcagcttgagggtctgaagtatatcgagagaaatgagcaaaagatgaaaaaagtcgcaaaaattctttcccaggaaaaaacgaccctgcagaagatcaacgactggattaagctaaagaccgatatgtatgaagggttaccgtttttcagtaaattatag

SEQ ID NO: 89313 - DNA, 3234 bp, Artificial Sequence
  derived and/or modified sequence
tggaagctcagctgatgcaggccggttggagtggacgtcattgccgggaacgagcgagtcgccgctgcagccctagtgactgcggcctgcatcccgattgtcttctcctccaaggtctacatgattacctgaagtttaataagtaagaccatgaattatggcatttcttaaatgaagcgttcaagaagtgagagaatgtcatagaaaataaatgatttttaagttatgtctattaatctgactgtagatatatatatttacctccttagtaatgcaagaagtgtttgtgggaagcagagaagcaagcaactgtatttcttgttctcacctaagcattactggaggataagccacatcagtctacaaagaggttttcatacaaacataataagatgtaaatggaccaaaagtgaagcacattcttgcagtaagcactgttactctccaagcaaccatggtttacatattgggattttgaaacttagcacttctgctcccaagggacttacaaaagtgaacatttgtatgtcccgtattaaaagtactttgaactctgtttcaaaggctgtttttggcaatcaaaatgaaatgatttcacgtttagctcaatttaagccaagttcccaaattttaagaaaagtatcggatagtggctggttaaaacagaaaaacatcaaacaagccatcaaatctctgaaaaaatatagtgacaaatcagcagaaaagagtccttttccagaagagaaaagtcacattatagacaaagaagaagatataggtaaacgcagtctttttcattacacaagttctataaccacaaaatttggagactcattctactttttatcaaatcatattaattcatatttcaaacgtaaggaaaaaatgtctcaacaaaaggaaaatgaacatttccgggacaaatcagaacttgaagataaaaaggtagaagaggggaaattaagatctccagatcctggcatcctggcttataagccaggctcagaatctgtacatacggtggacaagcctacaagtccttctgcgatacctgatgttcttcaagtttcaactaaacaaagtattgctaactttctttctcgtcccacggaaggtgtacaagctttagtaggtggttatattggtggacttgtccccaaattaaagtatgattcaaagagtcagtcagaagaacaggaagagcctgctaaaactgatcaggctgtcagcaaagacagaaatgcagaggagaaaaagcgtttatctcttcagcgagaaaagattatcgcaagggtgagtattgataacaggacccgggcattagttcaggcattaagaagaacaactgacccaaagctctgcattactagggttgaagaactgacttttcatcttctagaatttcctgaaggaaaaggagtggctgtcaaggaaagaattattccatatttattacgactgagacaaattaaggatgaaactcttcaggctgcagttagagaaattttggccctaattggctatgtggatccagtgaaagggagaggaatccgaattctctcaattgatggtggaggaacaaggggcgtggttgctctccagaccctacgaaaattagttgaacttactcagaagccagttcatcagctctttgattacatttgtggtgtaagcacaggtgccatattagctttcatgttggggttgtttcatatgcccttggatgaatgtgaggaactttatcgaaaattaggatcagatgtattttcacaaaatgtcattgttggaacagtaaaaatgagttggagccatgcattttatgacagtcaaacatgggaaaacattcttaaggataggatgggatctgcactgatgattgaaacagcaagaaaccccacatgtcctaaggtaaggaaagatggaggtttgcttctgaataacccttcggcattagctatgcatgagtgtaaatgtctttggccagatgtgccgttagagtgcatagtatccctgggcactggacgttatgagagtgatgtgagaaacacggtaacatacacaagcttgaaaactaaactttctaatgttatcaacagtgctacagatacagaagaagtccatataatgcttgatggcctgttacctcctgacacctattttagattcaatcctgtaatgtgtgaaaacatacctctagatgaaagtcgaaatgaaaagctggatcagctgcagttggaagggttgaaatacatagaaagaaatgaacaaaaaatgaaaaaagttgcaaaaatattaagtcaagaaaaaacaactctgcagaaaattaatgattggataaaattaaaaactgatatgtatgaaggacttccattcttttcaaaattgtgatgagtatatgcttatgttctcataaatgaaggtctgtttagaagatcaaccacattcaataaggaattgtggggttcgacatgagttaactttgaaatacgtatgaattctggagaatcctgaaaaagacggtgcttcaaccagcttgcatagcacagagaatattcttggttacagaattcatatgggaactaggcttttaagatgttaataattagctaagctttagtaacccttactgtgctagtagattttagtagatattggtgttatattgtttgatgtttgaaaatatattaatatatgtgccgaacaagaaaccgaaagctatattgtactgtgtatttttactttagtcctcataatcatgttgaatttatgtgatcattgattttatttcatatggaaaagctaatttcttcttaaatttacattacctaatattctcactagctatgttctccaatccacactgccttttattgtaatatcatctaaatagatgcagaaaaatggaattttctctattaaagtattttacatttgacataaaaaagaaccagatacagttttctattcagatatgtttattttaacattgtttggttaaaaaaggtgaagttccagtcaaccactttttacccctgaaatttcaagataatgctatattaacttttccagatctaacactagcttattcttccctgttataaaatggtttgaacttactgaggagatattcctatcattaacaaaaataaactatttaaataatctgttgttaaaaggctaatgtcattttaaaattaatttttgttcataatgtagctcccctttagcctttga

SEQ ID NO: 89314 - DNA, 568 bp, Artificial Sequence
  derived and/or modified sequence
aggggatgaaagagcataagcggagagggaatggtggtgctctctccttgaccatactttagttaggctcctctgagccctcttcccaactaggcctcatccttgggcccctgtcttaggcctgctgagtccagttttagcaagaatcttgcaaagtcagtttagagagtatctcctagccttgataattgatcatctccgcctgtcttcagcaagaatcttagtgttatacagctggaatcatactgctatggtccgaatgtttgtgcctctcaaaattcatgtggaaatcataaccgctaaagtgatggtattaagaggtaagaccatgaattatggcatttcttaaatgaagcgttcaagaagtgagagaatgtcatagaaaataaatgatttttaagttatgtctattaatctgactgtagatatatatatttacctccttagtaatgcaagaagtgtttgtgggaagcagagaagcaagcaactgtatttcttgttctcacctaagcattactggaggataagccacatcagtctacaaagaggttttcatacaaacataata

SEQ ID NO: 89315 - DNA, 4259 bp, Artificial Sequence
  derived and/or modified sequence
gcgagtcgccgctgcagccctagtgactgcggcctgcatcccggtaagaccatgaattatggcatttcttaaatgaagcgttcaagaagtgagagaatgtcatagaaaataaatgatttttaagttatgtctattaatctgactgtagatatatatatttacctccttagtaatgcaagaagtgtttgtgggaagcagagaagcaagcaactgtatttcttgttctcacctaagcattactggaggataagccacatcagtctacaaagaggttttcatacaaacataataagatgtaaatggaccaaaagtgaagcacattcttgcagtaagcactgttactctccaagcaaccatggtttacatattgggattttgaaacttagcacttctgctcccaagggacttacaaaagtgaacatttgtatgtcccgtattaaaagtactttgaactctgtttcaaaggctgtttttggcaatcaaaatgaaatgatttcacgtttagctcaatttaagccaagttcccaaattttaagaaaagtatcggatagtggctggttaaaacagaaaaacatcaaacaagccatcaaatctctgaaaaaatatagtgacaaatcagcagaaaagagtccttttccagaagagaaaagtcacattatagacaaagaagaagatataggtaaacgcagtctttttcattacacaagttctataaccacaaaatttggagactcattctactttttatcaaatcatattaattcatatttcaaacgtaaggaaaaaatgtctcaacaaaaggaaaatgaacatttccgggacaaatcagaacttgaagataaaaaggtagaagaggggaaattaagatctccagatcctggcatcctggcttataagccaggctcagaatctgtacatacggtggacaagcctacaagtccttctgcgatacctgatgttcttcaagtttcaactaaacaaagtattgctaactttctttctcgtcccacggaaggtgtacaagctttagtaggtggttatattggtggacttgtccccaaattaaagtatgattcaaagagtcagtcagaagaacaggaagagcctgctaaaactgatcaggctgtcagcaaagacagaaatgcagaggagaaaaagcgtttatctcttcagcgagaaaagattatcgcaagggtgagtattgataacaggacccgggcattagttcaggcattaagaagaacaactgacccaaagctctgcattactagggttgaagaactgacttttcatcttctagaatttcctgaaggaaaaggagtggctgtcaaggaaagaattattccatatttattacgactgagacaaattaaggatgaaactcttcaggctgcagttagagaaattttggccctaattggctatgtggatccagtgaaagggagaggaatccgaattctctcaattgatggtggaggaacaaggggcgtggttgctctccagaccctacgaaaattagttgaacttactcagaagccagttcatcagctctttgattacatttgtggtgtaagcacaggtgccatattagctttcatgttggggttgtttcatatgcccttggatgaatgtgaggaactttatcgaaaattaggatcagatgtattttcacaaaatgtcattgttggaacagtaaaaatgagttggagccatgcattttatgacagtcaaacatgggaaaacattcttaaggataggatgggatctgcactgatgattgaaacagcaagaaaccccacatgtcctaaggatggaggtttgcttctgaataacccttcggcattagctatgcatgagtgtaaatgtctttggccagatgtgccgttagagtgcatagtatccctgggcactggacgttatgagagtgatgtgagaaacacggtaacatacacaagcttgaaaactaaactttctaatgttatcaacagtgctacagatacagaagaagtccatataatgcttgatggcctgttacctcctgacacctattttagattcaatcctgtaatgtgtgaaaacatacctctagatgaaagtcgaaatgaaaagctggatcagctgcagttggaagggttgaaatacatagaaagaaatgaacaaaaaatgaaaaaagttgcaaaaatattaagtcaagaaaaaacaactctgcagaaaattaatgattggataaaattaaaaactgatatgtatgaaggacttccattcttttcaaaattgtgatgagtatatgcttatgttctcataaatgaaggtctgtttagaagatcaaccacattcaataaggaattgtggggttcgacatgagttaactttgaaatacgtatgaattctggagaatcctgaaaaagacggtgcttcaaccagcttgcatagcacagagaatattcttggttacagaattcatatgggaactaggcttttaagatgttaataattagctaagctttagtaacccttactgtgctagtagattttagtagatattggtgttatattgtttgatgtttgaaaatatattaatatatgtgccgaacaagaaaccgaaagctatattgtactgtgtatttttactttagtcctcataatcatgttgaatttatgtgatcattgattttatttcatatggaaaagctaatttcttcttaaatttacattacctaatattctcactagctatgttctccaatccacactgccttttattgtaatatcatctaaatagatgcagaaaaatggaattttctctattaaagtattttacatttgacataaaaaagaaccagatacagttttctattcagatatgtttattttaacattgtttggttaaaaaaggtgaagttccagtcaaccactttttacccctgaaatttcaagataatgctatattaacttttccagatctaacactagcttattcttccctgttataaaatggtttgaacttactgaggagatattcctatcattaacaaaaataaactatttaaataatctgttgttaaaaggctaatgtcattttaaaattaatttttgttcataatgtagctcccctttagcctttgaatacacctggcagcagtatgcttaaaaataagaagttagttgcctggcgcagtagctcacacctgtaatcccagcactttgggaggccgaggcaggcagatcacctgacgtcaggagtccaagaccagcctggccaacacggtgaaacctcgtctctaataaaaatacaaacattagcccggcatggtggtgcacacctatagtcccagctactcgggaggctaaggcaggagaatggcttgaacctgagagacggaggttgcagtgagccaaatagcgccagtgcactccagcctaggcgacacagcgagactccatctcaaaaaaaaaaaaaaaaaaaagaagaagttaggcttgttttaccttattaactcctttgaactgtctggatttcatggaagttggtaagatgcacttacatggaacattgttcatgccaaacaaactcatctttattgtatctatttgtcacataaatccttacatggaatgttttgatttcttaagaaaaatgaaacaaaggttagcgccccttgttttagacatacaaactaaagctagaccctgttgcccagatagtcatattgcttctttgcaatatcaattcacagaggctgtgagatgtggttcaaagagtggagtcgagagtctggatgctaatcctgcctttgctgcaagaacccttctgtttgttaccttgaggaaggcaaatgtctgtaggctttgcatatctcatttgtaaaatgaggaaaggtagctgtaaaattttctaacatccgaattatataaactttagacatagtataaaataggaaactaccaatgatttctaaagataatatagttctttcagaccacaaataatacataataacatgcaactaagaacaacttgtaaatgcaagaaaaaaacaaataattggaaatcagaatatttctgggaattcttcgtaataaagcaaatttcaagcacaataaagtaatatttatgcatatttacatatttgcacctcatcataaggtcactctagtcctaaactgatgtagttcatctgttttacagctgaagttaagtatgtcccttatttgtgcttggcttatttctttcttaaataatacattacacaagtgaa

SEQ ID NO: 89316 - DNA, 2163 bp, Artificial Sequence
  derived and/or modified sequence
atgtccataaatctgacggtggatatctacatctatctgctaagtaatgcgagatcagtgtgtggcaagcagcggagcaaacagctctactttctcttttccccgaaacactattggaggatcagccacatctccctgcaaagaggatttcatactaatattatccggtgtaagtggactaaatccgaagcgcatagctgcagtaagcattgttactcaccctctaaccacggcttgcatatcggtatcctgaagctgtccacctctgcgcctaaaggtcttaccaaagtcaacatctgcatgagcagaataaagtctacgcttaactcggtgtcaaaggccgtcttcggaaaccagaacgagatgatctctagactcgcgcaatttaagccaagcagccagattctccgcaaagtgagtgactcaggctggctcaagcagaaaaatattaagcaggccattaaatcactgaagaagtacagcgataagtcagcagagaagtccccatttcccgaggagaaaagccacattatagataaggaagaggatataggtaagagaagtctctttcactatactagtagtattaccaccaaatttggcgactcattctacttcctttctaatcacatcaactcatattttaaacggaaggaaaaaatgagccagcaaaaagagaacgaacatttcagggacaaatccgaactagaagacaagaaggtggaggaaggaaagctgcgctcccctgatcccggaatactggcctacaaacccggttcagagtcggttcatactgtggataagccgacctccccttctgcaatacccgacgtgctgcaggtgagcactaagcagagcattgctaatttcttgagcaggcccacggaaggtgtacaggcactagtcgggggatacattggcggacttgtacccaagctaaagtacgactcaaaaagtcagagtgaggaacaggaagagcccgctaaaactgatcaagctgtatcaaaagaccgcaatgcagaggagaagaaaaggctgtccctacagcgcgagaaaatcatcgctagggtttcaatcgataacaggacacgcgctctcgtgcaggctctccgacggaccaccgatcctaagctgtgtataactcgcgtcgaggagctgacatttcacctgctcgaatttccggaggggaagggagtcgctgtgaaagagaggatcatcccgtacctgctgagactcagacagataaaggacgaaacattacaggcagcggtgcgtgaaatcctggctctgattggatacgtggacccggtgaaggggagaggcattcgcatcctgtctatcgacggaggcggtacacgtggcgttgtcgcccttcagacactcaggaaacttgtggagctgacgcagaaacctgtccatcagttgtttgactacatctgtggtgtttcgaccggggctatcctcgcctttatgttaggcctcttccacatgccgcttgatgagtgtgaggaactttataggaaactgggaagtgacgttttttcccagaatgtgatcgtggggactgtgaagatgagctggagtcacgcgttctatgactctcaaacctgggagaatattctcaaggaccgaatgggctccgcactgatgatcgagacagcccgtaatccgacgtgtccaaaggtgcgaaaggacggcggactcctgttaaacaaccccagtgctctggccatgcatgagtgtaagtgtctgtggccagatgtcccactcgagtgcatcgttagcttaggcactggcaggtacgagtcagatgtgcggaacacagtgacttacacctcgctgaaaaccaagctgtctaatgtgatcaactcagccaccgacactgaggaagtgcatataatgcttgacggcctgctcccacccgatacttattttcgattcaatccagtgatgtgcgagaacattcccctggacgagagcaggaacgagaagttggatcagctccagctcgaagggctgaagtacatcgaacgtaacgagcagaaaatgaaaaaggtggccaagatcctgtctcaagagaaaaccactttacagaagatcaacgactggattaaactaaagaccgacatgtacgaaggcctaccgtttttctctaaactatag

SEQ ID NO: 89317 - DNA, 168 bp, Artificial Sequence
  derived and/or modified sequence
atgtccattaacttgaccgtcgacatatatatatatcttctgagcaatgcccgatccgtgtgtggtaaacaaaggtctaagcagctctatttcctgttttctcccaaacactactggcggatctcacatattagtctgcagcgaggcttccatacaaacataatatag

SEQ ID NO: 89318 - DNA, 582 bp, Artificial Sequence
  derived and/or modified sequence
atgagcatcaatctgaccgtggacatttatatttacctgctatcgaacgcccgatccgtctgcgggaaacagcgaagtaagcagctttacttcctctttagtccgaagcattactggcggatctcccatatctcattacagaggggcttccacacaaacataatcaggtgcaaatggactaaaagcgaagcgcattcttgctccaagcactgttactctccatcgaaccatggcttgcacataggcattctgaagttaagtacatcggcacctaaaggtcttactaaggtaaatatctgtatgagtcggattaagagtacgcttaacagtgtttccaaggcagtctttgggaatcagaacgagatgatcagcagactggcccagttcaaaccttcatcacagattctgcgaaaggtatcagattcaggctggctgaagcagaaaaacatcaaacaggctatcaaatctttgaagaagtattccgacaagtccgctgaaaagagcccattcccagaggagaagtcccacattatcgataaagaggaagatatcggcaagaggtcactgtttcactatacctag

SEQ ID NO: 89319 - DNA, 2154 bp, Artificial Sequence
  derived and/or modified sequence
atgtccataaatttaaccgttgacatttatatttatctgctgtctaacgccagaagtgtatgtgggaaacagagaagcaaacagctctacttcctgtttagtcctaaacactactggaggatctcgcacataagccttcagcgcggattccacactaacattatccgctgcaagtggaccaagtcagaagcacactcatgctccaagcactgttactcacctagcaatcacggtctgcacattggcatcctcaagctttccaccagcgcgcctaagggcttgacgaaagtgaacatttgtatgagccgtatcaagtccacattaaacagtgtgtccaaggccgtgttcggtaatcagaacgagatgatcagcaggttagcccagttcaagccaagtagtcaaattctccggaaagtctccgactctggctggctgaaacaaaagaatattaaacaggccatcaagtccctcaagaagtactcagacaaaagcgctgaaaaatccccgtttccggaggaaaaaagtcatatcatcgataaggaagaagacatcggcaagaggtccctattccactatacctcttcaataacaaccaagtttggtgacagtttctacttcttgtcaaatcatatcaactcctatttcaagcgcaaggaaaaaatgagtcagcagaaggaaaacgagcattttcgggacaaaagcgaactcgaggataagaaggtcgaagaaggcaaacttcgatccccagacccaggcatcctggcgtacaagccgggtagtgaatccgtacacacagtggataaacccacaagtccctctgcaattcccgatgtcctccaggtgtcaactaaacagagcattgccaacttcctgtctcggccaaccgagggggtgcaagccctggtgggtggatacattggagggttagtgccaaagttgaagtacgactccaagagtcaatctgaagaacaggaggaacccgcaaaaaccgatcaagccgtttcaaaggatcgtaacgctgaagagaagaagcggctgtcgctgcaaagagagaagattattgcaagagtgtctatcgacaacaggacgagggcactggtgcaagctctaagacgtacgaccgacccaaagttatgcattaccagagtcgaagagttgactttccaccttttggagttccccgaagggaagggcgtggccgtcaaagaacgcatcataccatatctcctacgcctccgacaaattaaagatgagactttacaggccgcagtgagagagatcttagcgcttatagggtatgttgaccccgtgaagggaagaggaatcaggattctatcaatagatgggggtggcactcggggtgttgtggctctgcagacgttaagaaaactagttgaacttacgcaaaaacctgtgcaccaattgtttgactacatctgtggcgtctctacaggggctatccttgccttcatgctcggtctatttcacatgccccttgatgaatgtgaggagctctatcgaaaattgggaagcgacgtcttttcacagaatgtcatagtaggcaccgtgaaaatgtcttggagccatgcgttttacgactcccaaacgtgggagaacattttaaaagatcgtatgggatctgctctgatgatcgagacagcacgcaaccctacttgccccaaggatggcggactgttactcaacaatccgagtgctctagccatgcatgagtgcaaatgcctatggcctgatgtgcccctggaatgtatcgtgtcattagggacggggaggtacgagtctgatgtcagaaacacagtcacctacacatctcttaagacgaaactaagcaatgtcattaattctgcgaccgacacggaggaggtccacattatgcttgatgggctgctgcccccagacacttatttccgcttcaacccagttatgtgtgagaacatcccactcgatgaaagtagaaacgagaaactggaccagctccagctggaaggactgaagtatattgagcgcaatgagcagaagatgaaaaaggtcgcaaaaatactgtcccaggagaagactactcttcagaagataaatgactggataaagttgaaaaccgacatgtacgagggactgccctttttcagtaaactttag

SEQ ID NO: 89320 - DNA, 2163 bp, Artificial Sequence
  derived and/or modified sequence
atgagcatcaacctgaccgtggacatctacatctacctgctgagcaacgccagaagcgtgtgcggcaagcagagaagcaagcagctgtacttcctgttcagccccaagcactactggagaatcagccacatcagcctgcagagaggcttccacaccaacatcatcagatgcaagtggaccaagagcgaggcccacagctgcagcaagcactgctacagccccagcaaccacggcctgcacatcggcatcctgaagctgagcaccagcgcccccaagggcctgaccaaggtgaacatctgcatgagcagaatcaagagcaccctgaacagcgtgagcaaggccgtgttcggcaaccagaacgagatgatcagcagactggcccagttcaagcccagcagccagatcctgagaaaggtgagcgacagcggctggctgaagcagaagaacatcaagcaggccatcaagagcctgaagaagtacagcgacaagagcgccgagaagagccccttccccgaggagaagagccacatcatcgacaaggaggaggacatcggcaagagaagcctgttccactacaccagcagcatcaccaccaagttcggcgacagcttctacttcctgagcaaccacatcaacagctacttcaagagaaaggagaagatgagccagcagaaggagaacgagcacttcagagacaagagcgagctggaggacaagaaggtggaggagggcaagctgagaagccccgaccccggcatcctggcctacaagcccggcagcgagagcgtgcacaccgtggacaagcccaccagccccagcgccatccccgacgtgctgcaggtgagcaccaagcagagcatcgccaacttcctgagcagacccaccgagggcgtgcaggccctggtgggcggctacatcggcggcctggtgcccaagctgaagtacgacagcaagagccagagcgaggagcaggaggagcccgccaagaccgaccaggccgtgagcaaggacagaaacgccgaggagaagaagagactgagcctgcagagagagaagatcatcgccagagtgagcatcgacaacagaaccagagccctggtgcaggccctgagaagaaccaccgaccccaagctgtgcatcaccagagtggaggagctgaccttccacctgctggagttccccgagggcaagggcgtggccgtgaaggagagaatcatcccctacctgctgagactgagacagatcaaggacgagaccctgcaggccgccgtgagagagatcctggccctgatcggctacgtggaccccgtgaagggcagaggcatcagaatcctgagcatcgacggcggcggcaccagaggcgtggtggccctgcagaccctgagaaagctggtggagctgacccagaagcccgtgcaccagctgttcgactacatctgcggcgtgagcaccggcgccatcctggccttcatgctgggcctgttccacatgcccctggacgagtgcgaggagctgtacagaaagctgggcagcgacgtgttcagccagaacgtgatcgtgggcaccgtgaagatgagctggagccacgccttctacgacagccagacctgggagaacatcctgaaggacagaatgggcagcgccctgatgatcgagaccgccagaaaccccacctgccccaaggtgagaaaggacggcggcctgctgctgaacaaccccagcgccctggccatgcacgagtgcaagtgcctgtggcccgacgtgcccctggagtgcatcgtgagcctgggcaccggcagatacgagagcgacgtgagaaacaccgtgacctacaccagcctgaagaccaagctgagcaacgtgatcaacagcgccaccgacaccgaggaggtgcacatcatgctggacggcctgctgccccccgacacctacttcagattcaaccccgtgatgtgcgagaacatccccctggacgagagcagaaacgagaagctggaccagctgcagctggagggcctgaagtacatcgagagaaacgagcagaagatgaagaaggtggccaagatcctgagccaggagaagaccaccctgcagaagatcaacgactggatcaagctgaagaccgacatgtacgagggcctgcccttcttcagcaagctgtag

SEQ ID NO: 89321 - DNA, 168 bp, Artificial Sequence
  derived and/or modified sequence
atgagcatcaacctgaccgtggacatctacatctacctgctgagcaacgccagaagcgtgtgcggcaagcagagaagcaagcagctgtacttcctgttcagccccaagcactactggagaatcagccacatcagcctgcagagaggcttccacaccaacatcatctag

SEQ ID NO: 89322 - DNA, 582 bp, Artificial Sequence
  derived and/or modified sequence
atgagcatcaacctgaccgtggacatctacatctacctgctgagcaacgccagaagcgtgtgcggcaagcagagaagcaagcagctgtacttcctgttcagccccaagcactactggagaatcagccacatcagcctgcagagaggcttccacaccaacatcatcagatgcaagtggaccaagagcgaggcccacagctgcagcaagcactgctacagccccagcaaccacggcctgcacatcggcatcctgaagctgagcaccagcgcccccaagggcctgaccaaggtgaacatctgcatgagcagaatcaagagcaccctgaacagcgtgagcaaggccgtgttcggcaaccagaacgagatgatcagcagactggcccagttcaagcccagcagccagatcctgagaaaggtgagcgacagcggctggctgaagcagaagaacatcaagcaggccatcaagagcctgaagaagtacagcgacaagagcgccgagaagagccccttccccgaggagaagagccacatcatcgacaaggaggaggacatcggcaagagaagcctgttccactacacctag

SEQ ID NO: 89323 - DNA, 2154 bp, Artificial Sequence
  derived and/or modified sequence
atgagcatcaacctgaccgtggacatctacatctacctgctgagcaacgccagaagcgtgtgcggcaagcagagaagcaagcagctgtacttcctgttcagccccaagcactactggagaatcagccacatcagcctgcagagaggcttccacaccaacatcatcagatgcaagtggaccaagagcgaggcccacagctgcagcaagcactgctacagccccagcaaccacggcctgcacatcggcatcctgaagctgagcaccagcgcccccaagggcctgaccaaggtgaacatctgcatgagcagaatcaagagcaccctgaacagcgtgagcaaggccgtgttcggcaaccagaacgagatgatcagcagactggcccagttcaagcccagcagccagatcctgagaaaggtgagcgacagcggctggctgaagcagaagaacatcaagcaggccatcaagagcctgaagaagtacagcgacaagagcgccgagaagagccccttccccgaggagaagagccacatcatcgacaaggaggaggacatcggcaagagaagcctgttccactacaccagcagcatcaccaccaagttcggcgacagcttctacttcctgagcaaccacatcaacagctacttcaagagaaaggagaagatgagccagcagaaggagaacgagcacttcagagacaagagcgagctggaggacaagaaggtggaggagggcaagctgagaagccccgaccccggcatcctggcctacaagcccggcagcgagagcgtgcacaccgtggacaagcccaccagccccagcgccatccccgacgtgctgcaggtgagcaccaagcagagcatcgccaacttcctgagcagacccaccgagggcgtgcaggccctggtgggcggctacatcggcggcctggtgcccaagctgaagtacgacagcaagagccagagcgaggagcaggaggagcccgccaagaccgaccaggccgtgagcaaggacagaaacgccgaggagaagaagagactgagcctgcagagagagaagatcatcgccagagtgagcatcgacaacagaaccagagccctggtgcaggccctgagaagaaccaccgaccccaagctgtgcatcaccagagtggaggagctgaccttccacctgctggagttccccgagggcaagggcgtggccgtgaaggagagaatcatcccctacctgctgagactgagacagatcaaggacgagaccctgcaggccgccgtgagagagatcctggccctgatcggctacgtggaccccgtgaagggcagaggcatcagaatcctgagcatcgacggcggcggcaccagaggcgtggtggccctgcagaccctgagaaagctggtggagctgacccagaagcccgtgcaccagctgttcgactacatctgcggcgtgagcaccggcgccatcctggccttcatgctgggcctgttccacatgcccctggacgagtgcgaggagctgtacagaaagctgggcagcgacgtgttcagccagaacgtgatcgtgggcaccgtgaagatgagctggagccacgccttctacgacagccagacctgggagaacatcctgaaggacagaatgggcagcgccctgatgatcgagaccgccagaaaccccacctgccccaaggacggcggcctgctgctgaacaaccccagcgccctggccatgcacgagtgcaagtgcctgtggcccgacgtgcccctggagtgcatcgtgagcctgggcaccggcagatacgagagcgacgtgagaaacaccgtgacctacaccagcctgaagaccaagctgagcaacgtgatcaacagcgccaccgacaccgaggaggtgcacatcatgctggacggcctgctgccccccgacacctacttcagattcaaccccgtgatgtgcgagaacatccccctggacgagagcagaaacgagaagctggaccagctgcagctggagggcctgaagtacatcgagagaaacgagcagaagatgaagaaggtggccaagatcctgagccaggagaagaccaccctgcagaagatcaacgactggatcaagctgaagaccgacatgtacgagggcctgcccttcttcagcaagctgtag

SEQ ID NO: 89324 - protein, 682 aa, Artificial Sequence
  derived and/or modified sequence
MSRIKSTLNSVSKAVFGNQNEMISRLAQFKPSSQILRKVSDSGWLKQKNIKQAIKSLKKYSDKSAEKSPFPEEKSHIIDKEEDIGKRSLFHYTSSITTKFGDSFYFLSNHINSYFKRKEKMSQQKENEHFRDKSELEDKKVEEGKLRSPDPGILAYKPGSESVHTVDKPTSPSAIPDVLQVSTKQSIANFLSRPTEGVQALVGGYIGGLVPKLKYDSKSQSEEQEEPAKTDQAVSKDRNAEEKKRLSLQREKIIARVSIDNRTRALVQALRRTTDPKLCITRVEELTFHLLEFPEGKGVAVKERIIPYLLRLRQIKDETLQAAVREILALIGYVDPVKGRGIRILSIDGGGTRGVVALQTLRKLVELTQKPVHQLFDYICGVSTGAILAFMLGLFHMPLDECEELYRKLGSDVFSQNVIVGTVKMSWSHAFYDSQTWENILKDRMGSALMIETARNPTCPKVAAVSTIVNRGITPKAFVFRNYGHFPGINSHYLGGCQYKMWQAIRASSAAPGYFAEYALGNDLHQDGGLLLNNPSALAMHECKCLWPDVPLECIVSLGTGRYESDVRNTVTYTSLKTKLSNVINSATDTEEVHIMLDGLLPPDTYFRFNPVMCENIPLDESRNEKLDQLQLEGLKYIERNEQKMKKVAKILSQEKTTLQKINDWIKLKTDMYEGLPFFSKL

SEQ ID NO: 89325 - DNA, 2049 bp, Artificial Sequence
  derived and/or modified sequence
atgtcccggatcaagtctactctaaattctgtatcaaaggccgtgtttggaaatcagaacgaaatgatcagcagactagcccagtttaagccgtcttcccagatcctgaggaaggttagcgattcaggatggttaaagcagaagaatatcaaacaggctattaaaagtctgaagaagtattccgacaaatctgctgaaaagagtccatttccagaagagaagtcccatattattgataaggaagaagatataggtaagcgcagcctatttcactacacctcttctatcacaactaagttcggggattccttctacttcctgtccaatcacattaatagttacttcaaaaggaaagagaaaatgtcccagcagaaagagaatgaacatttccgagataaaagcgaattggaggataagaaggtggaagaaggtaaactgagatcccctgatcccggaatcctcgcctacaagccaggaagtgaatctgtgcatacagtggacaagcctactagtccttccgctattcctgacgttctccaagtgtcaactaagcagtctatcgcaaacttcttatctcgacccaccgaaggtgtccaggctctagttggcggatatatcggaggtctggtgcctaagcttaaatacgacagcaaatctcagagcgaggagcaagaggagcccgccaagaccgatcaagcagtgagcaaggacaggaatgctgaagaaaagaagcgcctctcgctgcagcgagaaaaaatcatcgcacgcgtgagcatagacaacaggacccgtgccctggtgcaggctctgcgccggacaactgatcccaaactgtgtatcacacgtgtggaggagctgacctttcacctcttggagtttcctgaaggtaaaggagtggctgtaaaggagagaatcatcccctacctgctgagactccgacaaatcaaagatgaaacattacaggctgctgtgagggagatattggccttaataggatacgtcgaccccgtcaagggacggggaattagaatactgtcaatcgatgggggcgggaccaggggagttgtcgcactccagaccttacgcaagctggtggaactgacccagaagccggtccaccagttgtttgattatatctgcggcgtcagtacaggggccattttagctttcatgttagggctctttcacatgcctttggacgagtgcgaagagctgtaccgcaagcttggcagcgatgttttcagccaaaacgtgattgtcggaaccgtgaaaatgagctggtcccatgccttttatgattcacagacatgggagaacatacttaaggaccgaatggggagcgcactgatgatcgagacagccaggaacccaacttgtcccaaggtggccgctgtctcaaccatcgtgaatcggggcatcacacctaaagcctttgtgtttcggaattatgggcatttccccggtatcaatagtcactatctgggcggctgccagtataaaatgtggcaagcgattagggcaagttcagcggcccctggatattttgccgagtatgccctggggaatgacctccaccaagatggaggacttctgcttaataatccaagcgccttagcaatgcatgagtgcaagtgtctgtggcccgatgtgcctctggagtgcatcgtgagcctggggacaggtaggtacgagagcgatgtgagaaatactgtcacctacacctctctgaaaactaagctttccaacgttattaacagcgccactgatactgaagaggtgcacattatgctcgacggactgctgcccccagacacatacttcagattcaatcccgtgatgtgcgagaacatacccctggacgagagtcgtaacgagaagctggatcagctgcagctggagggcctgaagtacattgagaggaacgaacagaaaatgaaaaaggtggcgaagatactaagtcaagagaaaacaaccttacaaaagatcaatgattggatcaagctgaaaaccgacatgtacgagggcctgcccttcttcagtaaactgtag

SEQ ID NO: 89326 - DNA, 2049 bp, Artificial Sequence
  derived and/or modified sequence
atgagccgcatcaagagcaccctgaacagcgtgtccaaggctgtgtttggaaaccagaatgagatgatcagccggctggcccagttcaagcccagcagccagatcctgaggaaggtgtctgacagcggctggctgaagcagaagaacatcaagcaggccatcaagagcctgaagaagtacagcgacaagtctgctgagaagagccccttccctgaggagaagagccacatcatcgacaaggaggaggacatcggcaagaggagcctcttccactacaccagcagcatcaccaccaagtttggagacagcttctacttcctgagcaaccacatcaacagctacttcaagaggaaggagaagatgagccagcagaaggaaaatgagcacttccgggacaagtctgagctggaggacaagaaggtggaggagggcaagctgcggagcccagaccccggcatcctggcctacaagccaggcagcgagagcgtgcacacagtggacaagcccaccagccccagcgccatcccagatgtgctgcaggtgtccaccaagcagagcatcgccaacttcctgagccggcccacagaaggagtgcaggccctggtgggcggctacatcggcggcctggtgcccaagctgaagtatgacagcaagagccagagcgaggagcaggaggagcccgccaagacagaccaggccgtgtccaaggacagaaatgctgaggagaagaagaggctgagcctgcagcgggagaagatcatcgcccgggtgtccattgacaacagaacccgggccctggtgcaggccctgcggaggaccacagaccccaagctgtgcatcaccagggtggaggagctgaccttccacctgctggagttccctgagggcaaaggagtggccgtgaaggagcgcatcatcccctacctgctgcggctgcggcagatcaaggatgagaccctgcaggccgctgtgcgggagatcctggccctgattggctacgtggaccctgtgaagggccggggcatccgcatcctgagcattgatggcggcggcacccggggcgtggtggccctgcagaccctgaggaagctggtggagctgacccagaagcctgtgcaccagctgtttgactacatctgtggggtgtccactggagccatcctggccttcatgctgggcctcttccacatgcccctggatgaatgtgaggagctgtacaggaagctgggcagtgatgtgttcagccagaatgtgattgtgggcaccgtgaagatgtcctggagccacgccttctatgacagccagacctgggagaacatcctgaaggacaggatgggcagcgccctgatgattgaaacagccaggaaccccacctgccccaaggtggccgctgtgtccaccatcgtgaacagaggcatcacccccaaggcctttgtgttcagaaattatggccacttccctggcatcaacagccactacctgggcggctgccagtacaagatgtggcaggccatccgggccagcagcgctgcccctggctactttgctgaatatgccctgggcaatgacctgcaccaggacggcggcctgctgctgaacaaccccagcgccctggccatgcatgagtgcaagtgcctgtggccagatgtgcccctggagtgcatcgtgtccctgggcaccggccgctatgaaagtgatgtgaggaacacagtgacctacaccagcctgaagaccaagctgagcaatgtcatcaacagcgccacagacacagaggaggtgcacatcatgctggatggcctgctgcccccagacacctacttccgcttcaaccctgtgatgtgtgagaacatccccctggatgagagcagaaatgagaagctggaccagctgcagctggagggcctgaagtacatcgagagaaatgagcagaagatgaagaaggtggccaagatcctgagccaggagaagaccaccctgcagaagatcaatgactggatcaagctgaagacagacatgtatgagggcctgcccttcttcagcaagctgtag

SEQ ID NO: 89327 - DNA, 2049 bp, Artificial Sequence
  derived and/or modified sequence
atgagccggatcaagagcaccctgaacagcgtgagcaaggccgtgtttggcaaccagaatgaaatgataagtcggctcgcccagttcaagccttcttcccagatcctgaggaaagtatccgacagtggttggctgaaacagaaaaatatcaagcaggccatcaagtctctcaagaaatatagcgataaatccgcagagaaatcaccgttcccggaggagaagtcacatataatcgacaaggaagaggacattgggaagagaagcctgtttcactacacctcttctataactaccaaatttggcgattctttttatttcctctcaaaccacattaactcttacttcaagcgcaaggaaaagatgagtcagcagaaagaaaatgagcacttcagagacaaaagcgagttggaagataagaaagtggaagaggggaagctcaggtctcctgaccctggaattctagcttacaagcctggtagtgaaagcgtgcacactgtggacaagcccacatcaccatctgcaattccggatgtgcttcaagtgagtactaagcagagcatagccaatttcctcagtagaccaactgaaggtgttcaagctctagtcggaggctatattggtggtctcgtccccaagctcaaatatgattctaaatcacaatctgaggaacaggaagagccggcaaaaacagaccaagccgtaagtaaggaccgcaacgccgaggaaaagaagcggctcagtttgcagcgggaaaagatcatagcacgggtgtcaattgacaaccgcacccgagctctcgtccaggccctcagaagaactaccgatccaaagctgtgcatcacaagagtcgaagagctcaccttccaccttctggaattccctgaaggcaaaggggtggctgttaaggaacgcattataccgtatcttctgcgtctgcgacagattaaagatgagacactccaggcggcagtgcgagaaatcctggccttgatcggttacgtcgatcctgtgaagggtagagggatcagaattctgtccattgacggcgggggtactagaggggtggtagccttgcagacgctcagaaaactcgtggagctaactcagaagcctgtccatcagttgttcgattatatctgtggggtctctacaggagcgatcctggctttcatgctgggtctctttcatatgccccttgatgaatgcgaagaactgtatcgcaaactgggaagtgacgtgttctctcagaacgtcatcgttggaacagtgaaaatgagctggtcccacgctttctacgactcacagacttgggagaatattctgaaagaccgtatgggctctgctctcatgatagagactgctcgcaatccaacctgccctaaagtggctgcggtaagcacaatcgtaaacagaggaattacccccaaagcctttgtgtttagaaattacggacactttcctggaataaacagccactatctgggaggctgccagtacaagatgtggcaggctatcagagcaagctccgctgccccaggctacttcgcagaatatgcactgggcaacgacttgcaccaagatggcggcctcctgctgaacaatccatccgcgctcgccatgcacgagtgcaagtgtctttggccagatgtgcccctcgagtgcatcgtatctctcggtacgggtcgatatgaatctgacgtccgtaacactgttacatatacctcgctgaagacaaagctgtctaatgtgattaactcagcaaccgacactgaagaagtccacattatgttagacggtctgttaccccccgacacctattttaggttcaatcccgtgatgtgcgagaacatccctttagatgaatcccggaatgagaaactggaccagctgcagctagaaggcttaaaatatatcgagcggaacgaacagaaaatgaagaaggtggccaagatattatcacaggaaaagactacactgcagaaaattaatgattggatcaaactgaaaacagatatgtacgaagggctgcctttctttagcaaattgtag

SEQ ID NO: 89328 - DNA, 2049 bp, Artificial Sequence
  derived and/or modified sequence
atgtctagaataaagtccacattgaatagcgttagtaaagcggtgtttggaaaccaaaacgagatgatatccagactcgcccaattcaaaccaagtagccagatactcaggaaagtgtcagattcaggatggcttaagcagaagaatataaaacaagcaatcaaatcactgaagaagtacagtgataagagcgcagagaagtctccattccccgaggaaaagagccacataatcgacaaagaagaggacatcgggaagcgctctttgttccattatactagctccattacaacaaagttcggcgacagcttctactttctgtcaaaccacatcaattcatatttcaaacggaaggagaaaatgtcccagcagaaggagaacgaacacttccgggataagagtgaattggaagacaagaaagtggaggaggggaaactgaggtcccctgacccaggcatactcgcctacaagcctggatcagagagcgtccatacagtcgataagcctactagccccagtgctatccccgacgtactgcaagtcagcacaaagcagagtattgccaattttctttcccgtccaactgagggagtgcaagcccttgtcggcggatatatcgggggtttagtgccaaagctgaagtacgacagcaagagccagtctgaagaacaggaagaaccagccaagaccgaccaggctgtctccaaggatcgaaatgccgaggagaagaagcggctgtccctgcaacgtgaaaaaatcatagctcgcgttagtatcgataatcggactagagccctggtacaagctcttcgcaggaccacggaccccaagctgtgtattaccagagtcgaagagcttacgttccatctgctggaatttcccgagggcaagggtgtggcagtgaaggaaagaatcataccgtacctacttcgcctgagacagatcaaggacgagaccctccaggccgctgtccgtgagatcctggcattaattgggtatgtcgatcccgtaaaaggcagagggatacggatcctctccatcgacggtggagggacaaggggagtagtggccttgcagactttgcggaagctcgtagagctgacacagaagcctgttcatcagctcttcgactacatctgcggagtgtcaaccggcgcaattctcgccttcatgttaggactgtttcatatgccccttgacgagtgtgaggaactttatagaaagttggggagtgacgtgttctctcagaacgttattgtcggcaccgtgaaaatgtcctggtcccacgcgttctatgattcacagacctgggagaacatccttaaagacaggatgggctcagcccttatgatcgagacagcgaggaacccaacctgtcccaaagttgccgcagtgagcaccatcgtcaaccgcggaatcaccccaaaggctttcgtgttcaggaattacggacatttcccgggaattaattctcattatctcggcggatgccagtacaaaatgtggcaggcgattagggcctccagtgccgctcctggttatttcgcagagtacgccttgggcaacgatcttcatcaggatgggggactactgctcaataatccctccgcccttgcaatgcacgaatgtaagtgtctatggcccgatgttcctttggagtgcatcgtgagcctgggtacagggagatacgagagcgacgtgcggaacacggtgacatacacatccctcaaaacgaaactaagtaatgtgataaatagtgctactgacacagaagaagtgcacattatgcttgatggcctccttccacctgatacgtattttaggtttaatccggtcatgtgcgagaacatccctttagacgaaagccggaatgagaaactagaccagttgcagctggagggactgaaatacatcgaacggaacgagcagaagatgaagaaggttgccaagatcttaagtcaagagaagaccacactgcagaagatcaatgattggatcaagctcaagactgatatgtatgaggggctcccgttcttctccaaactatag

SEQ ID NO: 89329 - DNA, 2049 bp, Artificial Sequence
  derived and/or modified sequence
atgagcagaatcaagagcaccctgaacagcgtgagcaaggccgtgttcggcaaccagaacgagatgatcagcagactggcccagttcaagcccagcagccagatcctgagaaaggtgagcgacagcggctggctgaagcagaagaacatcaagcaggccatcaagagcctgaagaagtacagcgacaagagcgccgagaagagccccttccccgaggagaagagccacatcatcgacaaggaggaggacatcggcaagagaagcctgttccactacaccagcagcatcaccaccaagttcggcgacagcttctacttcctgagcaaccacatcaacagctacttcaagagaaaggagaagatgagccagcagaaggagaacgagcacttcagagacaagagcgagctggaggacaagaaggtggaggagggcaagctgagaagccccgaccccggcatcctggcctacaagcccggcagcgagagcgtgcacaccgtggacaagcccaccagccccagcgccatccccgacgtgctgcaggtgagcaccaagcagagcatcgccaacttcctgagcagacccaccgagggcgtgcaggccctggtgggcggctacatcggcggcctggtgcccaagctgaagtacgacagcaagagccagagcgaggagcaggaggagcccgccaagaccgaccaggccgtgagcaaggacagaaacgccgaggagaagaagagactgagcctgcagagagagaagatcatcgccagagtgagcatcgacaacagaaccagagccctggtgcaggccctgagaagaaccaccgaccccaagctgtgcatcaccagagtggaggagctgaccttccacctgctggagttccccgagggcaagggcgtggccgtgaaggagagaatcatcccctacctgctgagactgagacagatcaaggacgagaccctgcaggccgccgtgagagagatcctggccctgatcggctacgtggaccccgtgaagggcagaggcatcagaatcctgagcatcgacggcggcggcaccagaggcgtggtggccctgcagaccctgagaaagctggtggagctgacccagaagcccgtgcaccagctgttcgactacatctgcggcgtgagcaccggcgccatcctggccttcatgctgggcctgttccacatgcccctggacgagtgcgaggagctgtacagaaagctgggcagcgacgtgttcagccagaacgtgatcgtgggcaccgtgaagatgagctggagccacgccttctacgacagccagacctgggagaacatcctgaaggacagaatgggcagcgccctgatgatcgagaccgccagaaaccccacctgccccaaggtggccgccgtgagcaccatcgtgaacagaggcatcacccccaaggccttcgtgttcagaaactacggccacttccccggcatcaacagccactacctgggcggctgccagtacaagatgtggcaggccatcagagccagcagcgccgcccccggctacttcgccgagtacgccctgggcaacgacctgcaccaggacggcggcctgctgctgaacaaccccagcgccctggccatgcacgagtgcaagtgcctgtggcccgacgtgcccctggagtgcatcgtgagcctgggcaccggcagatacgagagcgacgtgagaaacaccgtgacctacaccagcctgaagaccaagctgagcaacgtgatcaacagcgccaccgacaccgaggaggtgcacatcatgctggacggcctgctgccccccgacacctacttcagattcaaccccgtgatgtgcgagaacatccccctggacgagagcagaaacgagaagctggaccagctgcagctggagggcctgaagtacatcgagagaaacgagcagaagatgaagaaggtggccaagatcctgagccaggagaagaccaccctgcagaagatcaacgactggatcaagctgaagaccgacatgtacgagggcctgcccttcttcagcaagctgtag

SEQ ID NO: 89330 - protein, 2007 aa, Artificial Sequence
  derived and/or modified sequence
MAQRTGLEDPERYLFVDRAVIYNPATQADWTAKKLVWIPSERHGFEAASIKEERGDEVMVELAENGKKAMVNKDDIQKMNPPKFSKVEDMAELTCLNEASVLHNLKDRYYSGLIYTYSGLFCVVINPYKNLPIYSENIIEMYRGKKRHEMPPHIYAISESAYRCMLQDREDQSILCTGESGAGKTENTKKVIQYLAHVASSHKGRKDHNIPQESPKPVKHQGELERQLLQANPILESFGNAKTVKNDNSSRFGKFIRINFDVTGYIVGANIETYLLEKSRAVRQAKDERTFHIFYQLLSGAGEHLKSDLLLEGFNNYRFLSNGYIPIPGQQDKDNFQETMEAMHIMGFSHEEILSMLKVVSSVLQFGNISFKKERNTDQASMPENTVAQKLCHLLGMNVMEFTRAILTPRIKVGRDYVQKAQTKEQADFAVEALAKATYERLFRWLVHRINKALDRTKRQGASFIGILDIAGFEIFELNSFEQLCINYTNEKLQQLFNHTMFILEQEEYQREGIEWNFIDFGLDLQPCIDLIERPANPPGVLALLDEECWFPKATDKTFVEKLVQEQGSHSKFQKPRQLKDKADFCIIHYAGKVDYKADEWLMKNMDPLNDNVATLLHQSSDRFVAELWKDEIQNIQRASFYDSVSGLHEPPVDRIVGLDQVTGMTETAFGSAYKTKKGMFRTVGQLYKESLTKLMATLRNTNPNFVRCIIPNHEKRAGKLDPHLVLDQLRCNGVLEGIRICRQGFPNRIVFQEFRQRYEILTPNAIPKGFMDGKQACERMIRALELDPNLYRIGQSKIFFRAGVLAHLEEERDLKITDIIIFFQAVCRGYLARKAFAKKQQQLSALKVLQRNCAAYLKLRHWQWWRVFTKVKPLLQVTRQEEELQAKDEELLKVKEKQTKVEGELEEMERKHQQLLEEKNILAEQLQAETELFAEAEEMRARLAAKKQELEEILHDLESRVEEEEERNQILQNEKKKMQAHIQDLEEQLDEEEGARQKLQLEKVTAEAKIKKMEEEILLLEDQNSKFIKEKKLMEDRIAECSSQLAEEEEKAKNLAKIRNKQEVMISDLEERLKKEEKTRQELEKAKRKLDGETTDLQDQIAELQAQIDELKLQLAKKEEELQGALARGDDETLHKNNALKVVRELQAQIAELQEDFESEKASRNKAEKQKRDLSEELEALKTELEDTLDTTAAQQELRTKREQEVAELKKALEEETKNHEAQIQDMRQRHATALEELSEQLEQAKRFKANLEKNKQGLETDNKELACEVKVLQQVKAESEHKRKKLDAQVQELHAKVSEGDRLRVELAEKASKLQNELDNVSTLLEEAEKKGIKFAKDAASLESQLQDTQELLQEETRQKLNLSSRIRQLEEEKNSLQEQQEEEEEARKNLEKQVLALQSQLADTKKKVDDDLGTIESLEEAKKKLLKDAEALSQRLEEKALAYDKLEKTKNRLQQELDDLTVDLDHQRQVASNLEKKQKKFDQLLAEEKSISARYAEERDRAEAEAREKETKALSLARALEEALEAKEEFERQNKQLRADMEDLMSSKDDVGKNVHELEKSKRALEQQVEEMRTQLEELEDELQATEDAKLRLEVNMQAMKAQFERDLQTRDEQNEEKKRLLIKQVRELEAELEDERKQRALAVASKKKMEIDLKDLEAQIEAANKARDEVIKQLRKLQAQMKDYQRELEEARASRDEIFAQSKESEKKLKSLEAEILQLQEELASSERARRHAEQERDELADEITNSASGKSALLDEKRRLEARIAQLEEELEEEQSNMELLNDRFRKTTLQVDTLNAELAAERSAAQKSDNARQQLERQNKELKAKLQELEGAVKSKFKATISALEAKIGQLEEQLEQEAKERAAANKLVRRTEKKLKEIFMQVEDERRHADQYKEQMEKANARMKQLKRQLEEAEEEATRANASRRKLQRELDDATEANEGLSREVSTLKNRLRRGGPISFSSSRSGRRQLHLEGASLELSDDDTESKTSDVNETQPPQSE

SEQ ID NO: 89331 - DNA, 6024 bp, Artificial Sequence
  derived and/or modified sequence
atggcccagagaaccggcctggaggaccccgagagatacctgttcgtggacagagccgtgatctacaaccccgccacccaggccgactggaccgccaagaagctggtgtggatccccagcgagagacacggcttcgaggccgccagcatcaaggaggagagaggcgacgaggtgatggtggagctggccgagaacggcaagaaggccatggtgaacaaggacgacatccagaagatgaacccccccaagttcagcaaggtggaggacatggccgagctgacctgcctgaacgaggccagcgtgctgcacaacctgaaggacagatactacagcggcctgatctacacctacagcggcctgttctgcgtggtgatcaacccctacaagaacctgcccatctacagcgagaacatcatcgagatgtacagaggcaagaagagacacgagatgcccccccacatctacgccatcagcgagagcgcctacagatgcatgctgcaggacagagaggaccagagcatcctgtgcaccggcgagagcggcgccggcaagaccgagaacaccaagaaggtgatccagtacctggcccacgtggccagcagccacaagggcagaaaggaccacaacatcccccaggagagccccaagcccgtgaagcaccagggcgagctggagagacagctgctgcaggccaaccccatcctggagagcttcggcaacgccaagaccgtgaagaacgacaacagcagcagattcggcaagttcatcagaatcaacttcgacgtgaccggctacatcgtgggcgccaacatcgagacctacctgctggagaagagcagagccgtgagacaggccaaggacgagagaaccttccacatcttctaccagctgctgagcggcgccggcgagcacctgaagagcgacctgctgctggagggcttcaacaactacagattcctgagcaacggctacatccccatccccggccagcaggacaaggacaacttccaggagaccatggaggccatgcacatcatgggcttcagccacgaggagatcctgagcatgctgaaggtggtgagcagcgtgctgcagttcggcaacatcagcttcaagaaggagagaaacaccgaccaggccagcatgcccgagaacaccgtggcccagaagctgtgccacctgctgggcatgaacgtgatggagttcaccagagccatcctgacccccagaatcaaggtgggcagagactacgtgcagaaggcccagaccaaggagcaggccgacttcgccgtggaggccctggccaaggccacctacgagagactgttcagatggctggtgcacagaatcaacaaggccctggacagaaccaagagacagggcgccagcttcatcggcatcctggacatcgccggcttcgagatcttcgagctgaacagcttcgagcagctgtgcatcaactacaccaacgagaagctgcagcagctgttcaaccacaccatgttcatcctggagcaggaggagtaccagagagagggcatcgagtggaacttcatcgacttcggcctggacctgcagccctgcatcgacctgatcgagagacccgccaacccccccggcgtgctggccctgctggacgaggagtgctggttccccaaggccaccgacaagaccttcgtggagaagctggtgcaggagcagggcagccacagcaagttccagaagcccagacagctgaaggacaaggccgacttctgcatcatccactacgccggcaaggtggactacaaggccgacgagtggctgatgaagaacatggaccccctgaacgacaacgtggccaccctgctgcaccagagcagcgacagattcgtggccgagctgtggaaggacgagatccagaacatccagagagccagcttctacgacagcgtgagcggcctgcacgagccccccgtggacagaatcgtgggcctggaccaggtgaccggcatgaccgagaccgccttcggcagcgcctacaagaccaagaagggcatgttcagaaccgtgggccagctgtacaaggagagcctgaccaagctgatggccaccctgagaaacaccaaccccaacttcgtgagatgcatcatccccaaccacgagaagagagccggcaagctggacccccacctggtgctggaccagctgagatgcaacggcgtgctggagggcatcagaatctgcagacagggcttccccaacagaatcgtgttccaggagttcagacagagatacgagatcctgacccccaacgccatccccaagggcttcatggacggcaagcaggcctgcgagagaatgatcagagccctggagctggaccccaacctgtacagaatcggccagagcaagatcttcttcagagccggcgtgctggcccacctggaggaggagagagacctgaagatcaccgacatcatcatcttcttccaggccgtgtgcagaggctacctggccagaaaggccttcgccaagaagcagcagcagctgagcgccctgaaggtgctgcagagaaactgcgccgcctacctgaagctgagacactggcagtggtggagagtgttcaccaaggtgaagcccctgctgcaggtgaccagacaggaggaggagctgcaggccaaggacgaggagctgctgaaggtgaaggagaagcagaccaaggtggagggcgagctggaggagatggagagaaagcaccagcagctgctggaggagaagaacatcctggccgagcagctgcaggccgagaccgagctgttcgccgaggccgaggagatgagagccagactggccgccaagaagcaggagctggaggagatcctgcacgacctggagagcagagtggaggaggaggaggagagaaaccagatcctgcagaacgagaagaagaagatgcaggcccacatccaggacctggaggagcagctggacgaggaggagggcgccagacagaagctgcagctggagaaggtgaccgccgaggccaagatcaagaagatggaggaggagatcctgctgctggaggaccagaacagcaagttcatcaaggagaagaagctgatggaggacagaatcgccgagtgcagcagccagctggccgaggaggaggagaaggccaagaacctggccaagatcagaaacaagcaggaggtgatgatcagcgacctggaggagagactgaagaaggaggagaagaccagacaggagctggagaaggccaagagaaagctggacggcgagaccaccgacctgcaggaccagatcgccgagctgcaggcccagatcgacgagctgaagctgcagctggccaagaaggaggaggagctgcagggcgccctggccagaggcgacgacgagaccctgcacaagaacaacgccctgaaggtggtgagagagctgcaggcccagatcgccgagctgcaggaggacttcgagagcgagaaggccagcagaaacaaggccgagaagcagaagagagacctgagcgaggagctggaggccctgaagaccgagctggaggacaccctggacaccaccgccgcccagcaggagctgagaaccaagagagagcaggaggtggccgagctgaagaaggccctggaggaggagaccaagaaccacgaggcccagatccaggacatgagacagagacacgccaccgccctggaggagctgagcgagcagctggagcaggccaagagattcaaggccaacctggagaagaacaagcagggcctggagaccgacaacaaggagctggcctgcgaggtgaaggtgctgcagcaggtgaaggccgagagcgagcacaagagaaagaagctggacgcccaggtgcaggagctgcacgccaaggtgagcgagggcgacagactgagagtggagctggccgagaaggccagcaagctgcagaacgagctggacaacgtgagcaccctgctggaggaggccgagaagaagggcatcaagttcgccaaggacgccgccagcctggagagccagctgcaggacacccaggagctgctgcaggaggagaccagacagaagctgaacctgagcagcagaatcagacagctggaggaggagaagaacagcctgcaggagcagcaggaggaggaggaggaggccagaaagaacctggagaagcaggtgctggccctgcagagccagctggccgacaccaagaagaaggtggacgacgacctgggcaccatcgagagcctggaggaggccaagaagaagctgctgaaggacgccgaggccctgagccagagactggaggagaaggccctggcctacgacaagctggagaagaccaagaacagactgcagcaggagctggacgacctgaccgtggacctggaccaccagagacaggtggccagcaacctggagaagaagcagaagaagttcgaccagctgctggccgaggagaagagcatcagcgccagatacgccgaggagagagacagagccgaggccgaggccagagagaaggagaccaaggccctgagcctggccagagccctggaggaggccctggaggccaaggaggagttcgagagacagaacaagcagctgagagccgacatggaggacctgatgagcagcaaggacgacgtgggcaagaacgtgcacgagctggagaagagcaagagagccctggagcagcaggtggaggagatgagaacccagctggaggagctggaggacgagctgcaggccaccgaggacgccaagctgagactggaggtgaacatgcaggccatgaaggcccagttcgagagagacctgcagaccagagacgagcagaacgaggagaagaagagactgctgatcaagcaggtgagagagctggaggccgagctggaggacgagagaaagcagagagccctggccgtggccagcaagaagaagatggagatcgacctgaaggacctggaggcccagatcgaggccgccaacaaggccagagacgaggtgatcaagcagctgagaaagctgcaggcccagatgaaggactaccagagagagctggaggaggccagagccagcagagacgagatcttcgcccagagcaaggagagcgagaagaagctgaagagcctggaggccgagatcctgcagctgcaggaggagctggccagcagcgagagagccagaagacacgccgagcaggagagagacgagctggccgacgagatcaccaacagcgccagcggcaagagcgccctgctggacgagaagagaagactggaggccagaatcgcccagctggaggaggagctggaggaggagcagagcaacatggagctgctgaacgacagattcagaaagaccaccctgcaggtggacaccctgaacgccgagctggccgccgagagaagcgccgcccagaagagcgacaacgccagacagcagctggagagacagaacaaggagctgaaggccaagctgcaggagctggagggcgccgtgaagagcaagttcaaggccaccatcagcgccctggaggccaagatcggccagctggaggagcagctggagcaggaggccaaggagagagccgccgccaacaagctggtgagaagaaccgagaagaagctgaaggagatcttcatgcaggtggaggacgagagaagacacgccgaccagtacaaggagcagatggagaaggccaacgccagaatgaagcagctgaagagacagctggaggaggccgaggaggaggccaccagagccaacgccagcagaagaaagctgcagagagagctggacgacgccaccgaggccaacgagggcctgagcagagaggtgagcaccctgaagaacagactgagaagaggcggccccatcagcttcagcagcagcagaagcggcagaagacagctgcacctggagggcgccagcctggagctgagcgacgacgacaccgagagcaagaccagcgacgtgaacgagacccagcccccccagagcgagtag

SEQ ID NO: 89332 - DNA, 6024 bp, Artificial Sequence
  derived and/or modified sequence
atggcgcaacgtacaggattggaggatccagaacggtacctatttgtcgatcgggcagtgatctacaatccagccacccaggcggattggacagcaaagaagctggtctggattccctcggagaggcacggcttcgaagctgccagcatcaaggaggaaagaggtgacgaagtgatggtggagctagctgaaaatggcaaaaaagctatggtgaataaagacgacatccagaaaatgaaccctcctaagtttagtaaggttgaggatatggccgaactgacatgcctgaatgaagcgtccgtgctccataacttgaaggaccgatattattctgggctaatctatacctatagtgggcttttctgtgtggtcatcaacccatacaaaaatctcccgatctatagtgaaaacattatcgagatgtatagagggaaaaagaggcatgaaatgcctccacacatttacgccatttccgagagcgcctaccggtgtatgctccaggacagagaggatcagtccatcctgtgtactggagagagcggcgctggaaagacagaaaacactaagaaagtgatccagtatctggctcacgtcgcgtcatctcacaagggccgcaaggaccataatattccacaggagtcccctaaaccggtaaaacaccagggcgaactggaacgacaactgttacaagcgaatcccattctggagagtttcggtaatgcaaaaaccgtaaaaaatgacaacagttctcgttttggaaaatttatccgcattaactttgacgtgaccgggtatatcgtgggggctaacatagagacatacctacttgaaaagtcccgcgcagttagacaggccaaggatgagcgcaccttccacatcttctaccagctgctcagcggtgccggcgagcaccttaaaagtgatcttctgctcgagggttttaacaactaccgtttcctgtctaacgggtacataccgatacccgggcagcaggataaggataactttcaggagaccatggaagcaatgcacatcatggggttctcccatgaggagatcctgagcatgcttaaggtagtgagttctgtgctccagttcggtaacatctccttcaagaaagaacgcaatacagatcaggcctccatgcccgagaatacagtcgctcagaaactgtgccatctcctgggcatgaacgtcatggagtttacaagagctatcctgacaccacgaataaaagtgggaagggattatgtgcagaaagcacagaccaaagagcaggcggacttcgccgtcgaagctctggccaaggccacatatgaacggctattccgatggctggtccaccgcatcaataaagccctggacaggacaaagagacaaggcgccagcttcatagggatcctagacatcgcaggcttcgaaatcttcgaattgaatagtttcgagcaactatgtattaattacacaaatgagaaacttcaacaactctttaatcacacgatgttcatcttagagcaggaagagtatcaacgtgagggcatcgaatggaatttcatcgatttcggccttgatctgcagccctgcatcgacctaatagagcgcccggccaatccccctggtgtgcttgccctcctcgatgaagagtgctggttccccaaggctaccgataagacttttgtggagaagcttgtgcaggagcaaggcagccattctaaattccagaaaccaaggcagctgaaggataaggcagatttctgtattatacactacgctggtaaggtggactataaggccgacgaatggctgatgaagaatatggatcctctcaatgataacgttgctaccttactccaccaatcttcagatcgcttcgtagcagaactttggaaagacgaaatccaaaacattcagagagcatctttttacgacagcgtctctgggcttcacgagcctccggtcgaccgcatagtgggcctcgaccaggtcactggaatgactgagaccgcgttcggaagcgcttacaagacaaaaaaaggtatgttccggaccgtgggccagctgtacaaagagtcactgactaagttaatggctacgctcagaaatacaaatccaaatttcgtgagatgcatcatccccaatcatgagaagagagctggaaagctcgaccctcatctcgtcctggaccagctgagatgcaacggagtactcgaagggattagaatttgtaggcagggcttccctaaccgtatcgtattccaggaatttaggcagaggtacgaaatattgacaccaaacgcaatacctaagggctttatggacgggaagcaggcctgcgagcgaatgatccgggcactggagctagacccaaatctgtaccgaatcgggcagtcaaagattttcttcagggccggcgtgctcgcccacctggaggaggaaagagacttgaagatcaccgacattatcattttcttccaggccgtgtgtaggggatacctcgcacggaaggcctttgccaaaaaacagcagcagttgtctgcccttaaggtcctgcaacggaactgtgccgcctacctcaagttacgccattggcaatggtggagggtgtttacaaaggtaaagcctctcctgcaagttacccggcaagaggaggagttgcaggccaaggacgaagagctcctgaaagttaaagaaaaacagaccaaagtcgaaggcgaattggaggagatggagcgcaaacaccagcagttgctcgaggaaaaaaacatccttgccgagcagcttcaagcggagactgaactgtttgccgaggctgaagagatgagagcccggcttgccgctaagaagcaggagctggaggagatattgcacgatctggaatcacgcgtggaagaggaagaggaacgaaatcagatcctacagaacgagaagaagaaaatgcaggcacatatccaggatctcgaggagcagctggatgaggaggagggcgcacgacagaaacttcaactggagaaggttaccgctgaggctaagatcaagaaaatggaagaggaaattcttctcttggaagaccaaaatagcaagtttattaaggagaagaagctgatggaagatcgaatcgcggagtgcagctcccagttggccgaggaggaagagaaagctaaaaatctggccaagataagaaataagcaagaggtcatgatcagcgacctggaagagcgtttgaaaaaggaggagaaaactcgccaggagttggagaaggctaagcgaaagttagatggtgagaccactgatctccaagatcagattgctgaactccaagctcaaatcgacgaacttaaacttcaattggccaagaaggaagaggagttgcagggcgctctagcccgcggggacgacgaaaccctgcacaagaataatgctctcaaagtggtgcgtgaactgcaggcccagatcgctgaactgcaagaggacttcgagtcagaaaaggcttcccgcaataaggcggaaaagcagaaaagggacttgtccgaagaactggaagctctgaagacggagctagaagacactctggatactacagcagcacagcaggagctgcggaccaagcgagaacaggaggtggccgaactgaaaaaggcacttgaggaggagactaagaatcatgaggcacaaatacaggacatgagacagaggcatgctaccgctttggaagaactttccgaacagctagagcaagccaagaggtttaaggccaatctggaaaaaaacaagcaggggctcgagactgataacaaggaactggcgtgtgaggtcaaagtcctccagcaggtaaaggcagagagcgagcataagcggaagaagttagatgcccaagtgcaggagctccacgctaaggtatccgaaggcgatcgcctcagggtggaattggccgaaaaagcgagtaagctccagaatgagctggacaacgtgagcacgctgctggaagaagctgagaagaaagggatcaagttcgcaaaagatgctgccagcttggagagtcagctccaggatacccaagagctgcttcaggaagagacacggcagaaactaaatttgtcctcaaggatacgacagctggaagaagagaaaaatagcctgcaggaacaacaagaggaagaagaagaggcacgcaaaaacctggaaaagcaggtcctggccttgcagagccagttggctgataccaaaaaaaaagtcgacgacgatcttggaacgattgagtccctggaagaagcaaagaagaagcttttgaaggatgcagaagccctcagtcagagactggaggagaaggccctcgcctatgacaaactcgagaagaccaagaatcgactgcagcaagagctggatgatctgacggtggacctggatcatcagaggcaggtagcttctaatttggagaaaaagcagaagaagttcgaccagctactagccgaagagaagtcgatttctgctcgttacgctgaggaaagggacagggccgaagcggaggctagagagaaagagacaaaggctctatccctggcccgggcgcttgaagaggctctagaggccaaggaggagtttgaacgccagaacaaacagctgagagccgatatggaggacctgatgtcaagtaaagatgacgtgggcaagaacgttcatgaactggagaaatctaagagagcactggagcaacaggttgaggagatgcggactcaattggaagagctcgaagacgaactgcaagccacagaggatgcaaaattgcggctcgaggttaacatgcaggcgatgaaagcgcaattcgaaagagacctccagactcgcgacgaacaaaacgaagaaaagaagcgactgttgattaagcaggtgcgcgaacttgaggctgagctggaggacgagagaaagcaacgcgccctggccgtggcttctaagaaaaaaatggaaatagatctgaaagacttggaagcacagatagaggccgcaaacaaggctcgggacgaggtcattaagcagctcaggaagctacaggcccagatgaaagactaccagagggagttggaagaggcccgagcctccagggatgagattttcgcgcagtctaaggagtctgagaagaaacttaagtctctcgaagccgagatcctgcaactgcaggaagagttggctagcagtgagagagcccggaggcatgcggagcaagagcgcgatgaactcgcagatgaaattacaaactccgcatcaggcaaaagtgccctgctggacgaaaagcggcgcctcgaagctaggattgcgcagctcgaggaggagttggaggaggagcagagcaacatggagctgctcaatgacagattcagaaagaccacccttcaagtcgatacgctgaacgcagagctggccgcagaaagatctgccgcccagaagtctgacaacgccaggcaacagcttgaacgtcagaacaaggagctgaaggcaaaactgcaagaactggagggagcggttaagagtaagtttaaagcaacaatttccgcgctcgaagccaagattggacaactggaagagcagctcgagcaggaggccaaggagagggctgcggcaaataaactagttaggcggacagagaagaagttgaaagagatttttatgcaggtcgaggacgagcggaggcatgccgaccagtataaagaacagatggaaaaggccaacgctcgcatgaagcagttgaaacgccaactagaagaggccgaggaggaagccacccgggccaatgcctccaggagaaagctgcagagagagttggacgacgccacggaagctaatgaaggccttagccgggaagtttcaaccctgaagaacaggctacgtcggggggggccaatctccttcagttcaagccgcagcggcagacgtcagcttcatcttgagggagctagcctggaattatccgacgacgacactgagagtaaaactagcgacgtgaatgaaacccagccaccccagtccgagtag

SEQ ID NO: 89333 - DNA, 6024 bp, Artificial Sequence
  derived and/or modified sequence
atggcccagaggacaggcctggaggaccctgagcgctacctgtttgtggacagagctgtgatctacaacccagccacccaggccgactggacagccaagaagctggtgtggatccccagcgagagacatggctttgaagctgccagcatcaaggaggagagaggagatgaggtgatggtggagctggccgagaatggcaagaaggccatggtgaacaaggatgacatccagaagatgaacccccccaagttcagcaaggtggaggacatggccgagctgacctgcctgaatgaggcctctgtgctgcacaacctgaaggaccgctactacagcggcctcatctacacctacagcggcctcttctgtgtggtgatcaacccctacaagaacctgcccatctacagcgagaacatcatcgagatgtaccggggcaagaagagacatgagatgccaccccacatctatgccatcagcgagagcgcctaccgctgcatgctgcaggaccgggaggaccagagcatcctgtgcacaggagagagcggggccggcaagacagagaacaccaagaaggtgatccagtacctggcccacgtggccagcagccacaagggcaggaaggaccacaacatcccccaggagagccccaagcctgtgaagcaccagggcgagctggagcggcagctgctgcaggccaaccccatcctggagagctttggaaatgccaagacagtgaagaatgacaacagcagcagatttgggaagttcatccgcatcaactttgatgtgacaggctacatcgtgggcgccaacatcgagacctacctgctggagaagagcagagctgtgcggcaggccaaggatgagaggaccttccacatcttctaccagctgctgtctggagctggggagcacctgaagagtgacctgctgctggagggcttcaacaactaccgcttcctgagcaatggctacatccccatccctggccagcaggacaaggacaacttccaggagaccatggaggccatgcacatcatgggcttcagccatgaggagatcctgtccatgctgaaggtggtgtcctctgtgctgcagtttggaaacatctccttcaagaaggagaggaacacagaccaggcctccatgcctgagaacacagtggcccagaagctgtgccacctgctgggcatgaatgtgatggagttcacccgggccatcctgaccccccgcatcaaggtgggccgggactatgtgcagaaggcccagaccaaggagcaggccgactttgctgtggaggccctggccaaggccacctatgagcggctcttccgctggctggtgcaccgcatcaacaaggccctggacaggaccaagaggcagggcgccagcttcatcggcatcctggacattgctggctttgagatctttgagctgaacagctttgagcagctgtgcatcaactacaccaatgagaagctgcagcagctgttcaaccacaccatgttcatcctggagcaggaggagtaccagcgggagggcatcgagtggaacttcatcgactttggcctggacctgcagccctgcatcgacctgattgaaagacctgccaaccccccaggagtgctggccctgctggatgaggagtgctggttccccaaggccacagacaagacctttgtggagaagctggtgcaggagcagggcagccacagcaagttccagaagccccggcagctgaaggacaaggctgacttctgcatcatccactacgccggcaaggtggactacaaggcagatgagtggctgatgaagaacatggaccccctgaatgacaacgtggccaccctgctgcaccagagcagtgacagatttgtggccgagctgtggaaggatgagatccagaacatccagagggccagcttctatgacagcgtgtctggcctgcacgagccccctgtggaccgcatcgtgggcctggaccaggtgacaggcatgacagaaacagccttcggcagcgcctacaagaccaagaagggcatgttcagaacagtgggccagctgtacaaggagagcctgaccaagctgatggccaccctgaggaacaccaaccccaactttgtgcgctgcatcatccccaaccacgagaagagagctgggaagctggacccccacctggtgctggaccagctgcgctgcaatggagtgctggagggcatccgcatctgccggcagggcttccccaaccgcatcgtgttccaggagttccggcagagatatgagatcctgaccccaaatgccatccccaagggcttcatggatggcaagcaggcctgtgagaggatgatccgggccctggagctggaccccaacctgtaccgcatcggccagagcaagatcttcttccgggccggcgtgctggcccacctggaggaggagcgggacctgaagatcacagacatcatcatcttcttccaggccgtgtgccggggctacctggccaggaaggcctttgccaagaagcagcagcagctgagcgccctgaaggtgctgcagaggaactgtgccgcctacctgaagctgcggcactggcagtggtggagggtcttcaccaaggtgaagcccctgctgcaggtgacccggcaggaggaggagctgcaggccaaggatgaggagctgctgaaggtgaaggagaagcagaccaaggtggagggggagctggaggagatggagaggaagcaccagcagctgctggaggagaagaacatcctggccgagcagctgcaggccgagacagagctgtttgctgaggccgaggagatgagggcccggctggccgccaagaagcaggagctggaggagatcctgcatgacctggagagccgggtggaggaggaggaggagaggaaccagatcctgcagaatgagaagaagaagatgcaggcccacatccaggacctggaggagcagctggatgaggaggagggcgcccggcagaagctgcagctggagaaggtgacagctgaggccaagatcaagaagatggaggaggagatcctgctgctggaggaccagaacagcaagttcatcaaggagaagaagctgatggaggacagaattgctgaatgtagcagccagctggccgaggaggaggagaaggccaagaacctggccaagatccggaacaagcaggaggtgatgatcagtgacctggaggagcggctgaagaaggaggagaagacccggcaggagctggagaaggccaagaggaagctggatggagagaccacagacctgcaggaccagattgctgagctgcaggcccagattgatgagctgaagctgcagctggccaagaaggaggaggagctgcagggcgccctggcccggggagatgatgagaccctgcacaagaacaatgccctgaaggtggtgcgggagctgcaggcccagattgctgagctgcaggaggactttgagagcgagaaggccagcaggaacaaggccgagaagcagaagagggacctgtctgaggagctggaggccctgaagacagagctggaggacaccctggacaccacagctgcccagcaggagctgcggaccaagcgggagcaggaggtggccgagctgaagaaggccctggaggaggagaccaagaaccacgaggcccagatccaggacatgaggcagagacatgccacagccctggaggagctgtctgagcagctggagcaggccaagcgcttcaaggccaacctggagaagaacaagcagggcctggagacagacaacaaggagctggcctgtgaggtgaaggtgctgcagcaggtgaaggccgagagcgagcacaagaggaagaagctggatgcccaggtgcaggagctgcacgccaaggtgtctgagggggaccggctgcgggtggagctggccgagaaggccagcaagctgcagaatgagctggacaacgtgtccaccctgctggaggaggccgagaagaagggcatcaagtttgccaaggatgctgccagcctggagagccagctgcaggacacccaggagctgctgcaggaggagacccggcagaagctgaacctgagcagccgcatccggcagctggaggaggagaagaacagcctgcaggagcagcaggaggaggaggaggaggccaggaagaacctggagaagcaggtgctggccctgcagagccagctggccgacaccaagaagaaggtggatgatgacctgggcaccatcgagagcctggaggaggccaagaagaagctgctgaaggatgctgaggccctgagccagaggctggaggagaaggccctggcctatgacaagctggagaagaccaagaaccggctgcagcaggagctggatgacctgactgtggacctggaccaccagaggcaggtggccagcaacctggagaagaagcagaagaagtttgaccagctgctggccgaggagaagagcatcagcgcccgctatgcagaggagcgggacagagctgaggccgaggcccgggagaaggagaccaaggccctgagcctggcccgggccctggaggaggccctggaggccaaggaggagtttgagcggcagaacaagcagctgcgggctgacatggaggacctgatgagcagcaaggatgatgtgggcaagaatgtgcatgagctggagaagagcaagagggccctggagcagcaggtggaggagatgaggacccagctggaggagctggaggatgagctgcaggccacagaagatgccaagctgcggctggaggtgaacatgcaggccatgaaggcccagtttgagcgggacctgcagaccagagatgagcagaatgaggagaagaagaggctgctgatcaagcaggtgcgggagctggaggccgagctggaggatgagaggaagcagagggccctggccgtggccagcaagaagaagatggagattgacctgaaggacctggaggcccagatcgaggccgccaacaaggccagagatgaggtgatcaagcagctgaggaagctgcaggcccagatgaaggactaccagcgggagctggaggaggcccgggccagcagagatgagatctttgcccagagcaaggagagcgagaagaagctgaagagcctggaggccgagatcctgcagctgcaggaggagctggccagcagcgagcgggccaggagacatgctgagcaggagagagatgagctggctgatgagatcaccaacagcgccagcggcaagagcgccctgctggatgagaagaggcggctggaggccagaattgcccagctggaggaggagctggaggaggagcagagcaacatggagctgctgaatgaccgcttcaggaagaccaccctgcaggtggacaccctgaatgctgagctggccgctgagaggtctgctgcccagaagagtgacaatgcccggcagcagctggagcggcagaacaaggagctgaaggccaagctgcaggagctggagggcgctgtgaagagcaagttcaaggccaccatcagcgccctggaggccaagattggccagctggaggagcagctggagcaggaggccaaggagagagctgctgccaacaagctggtgcggaggacagagaagaagctgaaggagatcttcatgcaggtggaggatgaaagaagacatgctgaccagtacaaggagcagatggagaaggccaatgccaggatgaagcagctgaagaggcagctggaggaggccgaggaggaggccacccgggccaatgccagcaggaggaagctgcagcgggagctggatgatgccacagaggccaatgaaggcctgagccgggaggtgtccaccctgaagaaccggctgcggcggggcggccccatctccttcagcagcagccgcagcggccggcggcagctgcacctggagggcgccagcctggagctgagtgatgatgacacagagagcaagaccagtgatgtgaatgagacccagcccccccagagcgagtag

SEQ ID NO: 89334 - DNA, 6024 bp, Artificial Sequence
  derived and/or modified sequence
atggcccagcggaccggcctggaggaccccgagcggtacctgttcgtcgatcgcgccgtcatttataaccctgccactcaggcggattggacagccaagaagcttgtttggattcccagtgagagacacggttttgaggccgcaagcattaaagaagaaagaggtgatgaggtgatggttgaactcgctgaaaatgggaaaaaagctatggtcaacaaagacgatatccagaaaatgaatcccccaaagttttccaaggtggaggacatggcggagttaacttgcttgaatgaagccagcgtgttacataatttgaaggatagatattactctggcctgatctatacctatagtgggctgttttgtgtggtgattaacccctataagaacctgcccatttactccgagaatattatagaaatgtaccgcggaaaaaaaagacacgaaatgccccctcatatttatgcgatttcagagtcagcctatcgctgtatgttgcaggatcgggaggatcagtcaatcctgtgcactggcgaatcaggtgcaggtaaaaccgagaataccaaaaaggtgatccaatacttagcacatgtagcatccagtcacaaagggaggaaggaccataacattcctcaggagagtcctaagcctgtgaaacatcagggtgagctggaacgccagctgctccaggctaaccccatactagaatcattcggcaacgctaaaacagtgaagaatgacaactcaagtcgcttcgggaaatttatccggataaatttcgacgtcactgggtatatcgttggcgcaaatatcgagacgtacttgctagagaaatcacgggctgtgcgtcaggccaaagatgagagaacattccacatcttctaccagctcctgtctggagcgggagagcatttgaaaagtgacctgctgttggagggcttcaataactaccgcttcctgtccaacggatatattccaattcccgggcaacaagacaaagacaattttcaggaaacgatggaggccatgcatattatggggttttcccacgaggagatcttaagcatgcttaaagtggtatccagcgtactgcaatttggcaacatctcttttaaaaaggagagaaatacagaccaggccagcatgcctgaaaacaccgtggctcaaaaactgtgccatttacttgggatgaacgtcatggaatttacaagagctatcctgaccccaagaattaaggtcggaagggactacgtccaaaaagctcagaccaaggaacaggctgacttcgccgtggaggccctggcaaaagctacatacgagcgactcttccggtggctggtgcatcgcattaacaaagcgctggataggaccaagcggcagggagcttcgttcattggtattttggatatcgctgggttcgaaatcttcgagctgaactctttcgaacagctctgcattaactataccaacgaaaagttacagcaacttttcaaccacactatgttcatactggagcaggaagagtatcagcgagagggcattgaatggaatttcatcgacttcggacttgatctgcagccgtgtattgacttgattgagaggcccgcaaacccacccggagtcctggcccttttggacgaggagtgttggtttccaaaagctacagataaaaccttcgtggaaaaactggttcaggagcaagggtcacatagcaaattccagaagcctaggcaactgaaggacaaagcggacttttgtatcatccattatgccggcaaagtggattacaaagcagacgaatggctcatgaagaacatggaccctctaaatgacaatgtggctactctgctccatcagagtagtgacagattcgtggccgagctgtggaaagacgaaatacagaacattcagcgggcctcattctacgactccgtcagtggactccacgagccccccgtggatagaattgttgggctcgatcaagtgaccggtatgacagaaactgcctttggctctgcctataagaccaagaaggggatgtttaggacagttgggcaattatacaaggaatctctcacaaaactcatggcaacactccggaataccaaccccaattttgtaaggtgtataataccaaatcatgaaaagcgtgctgggaaactggacccccacctcgtccttgaccagcttaggtgtaatggggttctggaaggtatacgaatttgccgtcaaggattccctaaccgaatcgtttttcaagagtttagacagaggtacgagatactaacgcccaacgcaatccccaaagggttcatggacggcaagcaggcatgcgagcggatgatcagggctttggagctcgacccaaatctttaccgtattggtcagtcaaagattttttttcgcgccggagtgctagctcatctggaagaagaaagagacctgaagattaccgacattatcatttttttccaggccgtgtgtaggggatacctcgccaggaaggccttcgctaaaaaacagcaacaattgtcagctcttaaagttctccagagaaattgtgccgcttacctcaaactgaggcactggcagtggtggcgggtgttcacaaaggtcaagccgttgctccaggtgaccaggcaggaagaggagcttcaggccaaagatgaggaactgttgaaagtgaaggagaagcagaccaaagtggagggtgagctggaggagatggagaggaagcaccagcaactgctagaggaaaagaatattctcgctgagcagttgcaggcagagacagagctgtttgccgaagccgaagagatgcgagccagattggctgcaaaaaagcaggaactggaagaaattctgcacgatttggaaagccgcgtggaggaggaggaggagagaaatcaaatcctccaaaatgagaagaagaagatgcaggcacatattcaggatcttgaagagcagttagacgaagaagaaggcgccaggcaaaagttacaactcgagaaagttactgccgaagctaaaataaagaaaatggaagaggagatcctgctgctggaagatcaaaacagcaagtttattaaggaaaaaaaactcatggaggaccggattgctgagtgttcctctcaactggctgaggaggaagagaaggccaagaatctggccaagattagaaataaacaggaagtcatgatttctgatcttgaggagcgccttaagaaagaagagaaaacccgccaagaacttgagaaagctaagcggaagctcgacggagaaacaacagatctccaggatcagatcgccgagctccaggcccaaattgacgagctcaagctccagctggccaaaaaagaggaggagttgcagggcgccctggcccggggtgacgatgaaacgctgcacaagaacaacgctcttaaagttgtgagagagctacaggcacagattgcagagcttcaagaggactttgaatcggaaaaggctagcagaaataaagccgagaagcagaaacgagatctctccgaggaactggaggccctgaaaaccgagctagaagacactctggacacgacagcagcccaacaggagctgcgaacgaagagggaacaggaagtggccgagttgaagaaagctcttgaggaagaaactaaaaatcacgaagcacagatacaagatatgaggcagcgccacgccacggccctcgaggagctttcagagcagctggaacaggccaagcgattcaaggctaacctggagaagaacaagcaaggactggaaacagacaacaaggagttagcttgcgaggtcaaggtattgcagcaggtaaaagccgaatctgaacacaagaggaagaagctggatgcccaagtacaggagctgcatgcaaaggtgtccgagggggatcgtttgagggtcgagctggcagagaaggccagcaagctgcagaatgaactagacaacgtctcaaccctattggaggaggctgagaaaaagggcatcaaatttgccaaagatgctgcctctctagagagtcagctccaggatacccaagagctgctgcaggaggaaacccggcagaaattgaacctgtcctcccgcataaggcagctggaggaagagaagaacagcttgcaagaacagcaggaagaggaggaggaggcaaggaagaatttggaaaagcaggtgctcgctctgcagagtcagctggccgataccaaaaaaaaagtcgatgatgatctggggacaatcgagtctctggaagaagccaaaaagaagttgctgaaagatgcagaggccttgtcgcagaggttagaggagaaagccctagcatatgacaaattggagaagaccaagaatcggctgcagcaggagctggacgatctgactgtggatctggaccaccagcgacaagtggccagcaacctggaaaagaaacaaaaaaaatttgatcagctcctggccgaggagaaaagcatatcggctaggtacgcagaggagagggatagggccgaggcggaagctcgggagaaagaaacaaaggcgctgagcctcgccagagccctcgaggaggctctagaagctaaggaagagtttgaaagacagaacaaacagctgcgggcggacatggaagatctcatgtcttcaaaggacgacgtgggcaagaacgtgcatgaactggaaaagtcgaagagagctctggagcagcaggtggaagaaatgcgaactcagctggaggaactcgaggatgaactgcaagctactgaggatgcaaaactaagactagaggttaatatgcaggctatgaaggcacagttcgagagagatctgcagaccagggacgagcaaaacgaggaaaagaaaaggctgctgattaaacaggtaagggagctggaagccgagttggaagacgaacgcaagcagagagcactggccgtcgcaagcaagaagaagatggagatcgacctaaaggatttggaggcacagattgaagctgcaaataaggcacgtgacgaagtgatcaaacagttgcgcaaactgcaggcacagatgaaggactatcagagggagcttgaagaagcacgggcttcgcgagatgaaattttcgctcagagtaaagaatctgaaaaaaagctcaagtctctagaagccgagatcctgcagctacaggaggagcttgcatccagcgagcgcgccagaaggcatgccgaacaggaacgcgacgagctggcagacgaaattactaacagcgcatccggtaaatcagccctgttagacgagaagcgtcgacttgaggctagaatagctcagctcgaggaggaattagaggaagagcaatctaacatggagttgctgaacgacaggttcagaaagaccactctgcaggtcgacaccctgaatgccgagttggccgctgagcggagcgctgctcagaagagtgacaacgcacggcagcaacttgaaaggcaaaataaagaactcaaggcaaagctgcaggagctagagggggcagtgaaatccaagttcaaggcaactatctccgcattggaagccaaaatcggacagctggaagaacaattagagcaggaagccaaggaacgtgccgccgcaaacaaactggtgcgcaggacagaaaaaaaacttaaagagatatttatgcaggtcgaagacgagcgccgccacgcggaccagtacaaggagcagatggagaaggccaacgctaggatgaagcagctcaagaggcaactggaagaggcagaagaagaagcgacccgggctaacgcttcccgacgcaagctccaacgagaattggacgacgcaacagaagctaacgaggggttgtcacgcgaagtctcaacgctgaagaatcgcctcaggagaggaggcccaataagcttctcaagctctcgctccgggcgcagacagctgcatctggagggcgcgagtctggagctatccgatgacgatactgagtccaagaccagcgacgtcaacgagacacaacccccacagagtgagtag

SEQ ID NO: 89335 - DNA, 6023 bp, Artificial Sequence
  derived and/or modified sequence
atggctcagcggaccggactggaagatcccgagagatacctgttcgtggatcgggctgtgatctataatcctgccacacaggccgactggactgccaaaaagctggtgtggatcccctcagaaaggcatggctttgaagcagcctcaatcaaagaagagagaggcgatgaagttatggtagagcttgctgagaatggcaaaaaggccatggtgaacaaggatgatattcagaagatgaatccgccaaaatttagcaaagtcgaggatatggccgaattgacatgtctgaatgaggcaagcgtgttacataacctgaaggatcgttactactcaggcttaatctatacctattcaggactattctgcgtggtgataaacccctataaaaatctccccatatactctgagaacattatcgaaatgtaccgaggcaaaaaaaggcatgaaatgccgccacacatttatgcaatctccgagtccgcataccgctgtatgcttcaagaccgtgaggaccaatccatcttgtgcaccggcgagagcggtgctggaaagaccgagaatacaaaaaaagtgatacagtacttggcccacgtggctagctcccacaaagggaggaaagaccacaatattccccaggagtctcctaagccagtcaagcaccagggggagctcgaacggcaactcctgcaggcaaaccctattcttgagtcctttggtaatgcaaaaaccgtgaagaatgacaactcctcgcggtttggcaagttcattcggattaattttgatgtcaccggctacattgtgggagctaatatagagacttacctgcttgaaaaaagtagagccgtacgccaagctaaggacgagcggactttccatatcttctaccaattgctgtctggggctggggaacatctcaagagcgacctactgctggagggcttcaacaattatcgcttcctgtcaaacggctatattccgattcccggtcaacaggacaaggataacttccaagaaacgatggaggctatgcacatcatggggttctctcacgaagagatcctgagcatgttgaaagtggtctcctcagtgcttcagtttggcaatatttcctttaagaaggaaagaaatactgatcaggcatcaatgccagagaacactgtggcgcagaaattgtgtcatctccttggtatgaacgtgatggaatttactcgggctattcttacaccgaggatcaaggtaggcagagactacgtccagaaagctcaaaccaaagagcaggctgattttgcagttgaggccctagccaaggctacctatgaaaggcttttccgttggctggtccatagaattaacaaagctctcgaccgtacgaagagacagggggcatccttcatcggaattctggatatagcaggtttcgaaatctttgaacttaattcctttgagcagctgtgcataaattacaccaacgaaaaactgcagcagctgttcaaccacactatgtttatcctggaacaggaggagtaccagcgcgagggaatcgagtggaactttatagactttggtcttgacttgcaaccatgtatcgatctcatcgagcgccctgccaatccaccgggagtgctcgcactactggatgaagagtgttggtttcccaaagctaccgacaaaacttttgttgagaagctcgtgcaggaacagggaagtcactccaagttccaaaaaccaaggcagttaaaggacaaggccgatttttgcatcatacactatgcaggaaaggtggactacaaagcagacgaatggctgatgaagaacatggatcccctgaacgacaatgtggctactctcctgcaccaaagttcagatcggtttgtggcagagctctggaaggacgagatccagaatattcagagagcatccttttatgattcggtgtcaggactgcatgagccccctgtagatagaatcgtcggcttagatcaggtgaccggaatgaccgaaaccgccttcgggagtgcttacaagacaaagaaggggatgttcaggacagtgggccagctctacaaggaaagtcttaccaagttaatggccaccctccgaaacactaacccaaatttcgttcgctgtatcatccctaatcatgagaagcgggctggtaaactggacccacatctggtgttagatcagctccgatgcaatggcgttttagaaggtatccggatttgtcgacagggctttcctaatcgcattgtgttccaggaattccggcagcgttacgagattctgacgcccaacgctatcccgaaggggtttatggacggtaagcaagcttgtgagcgaatgatcagagctctagagctggatccaaatctgtacagaataggccagagtaagatctttttccgagccggtgtgttggcgcacctggaggaagaacgagacctgaaaatcactgacatcatcatcttcttccaggcagtgtgcagagggtacctagccagaaaagcttttgcgaagaaacagcagcagctgtccgcccttaaagttctgcagcgaaactgcgcagcatacttgaaactccgccactggcagtggtggagagtgttcacaaaagtgaagcccctcctgcaggtaacaagacaagaggaggagttgcaagctaaggacgaggagctgctcaaggtgaaggagaagcagacaaaggttgagggggagttagaagagatggagcgaaagcaccaacagctgttagaagagaagaacatcctagccgagcagctgcaggctgagacagaattgttcgccgaggctgaggaaatgcgagccaggcttgccgctaagaagcaggagctcgaagagatcctgcacgacctggaaagtcgtgtcgaagaagaagaagagcgtaatcaaattctccagaacgagaaaaaaaaaatgcaggcacacatccaagacctggaggagcagctcgatgaggaagagggtgccaggcagaagctgcagctggagaaggtgacagcagaagccaagatcaagaagatggaggaggagatcttgttactggaggaccagaacagtaagttcattaaggaaaaaaagctaatggaagaccgcattgctgaatgctccagtcaactagccgaggaagaagagaaagctaagaatctcgccaaaattagaaacaaacaggaggttatgatcagtgatcttgaagagcgcctgaaaaaggaggagaaaacacgacaggagctggagaaagctaaacgcaaattggatggagaaaccaccgacctgcaggaccaaattgcagagctgcaggcccagattgatgagctgaagctgcaattagccaaaaaagaagaagaactgcagggggcactggctcggggagacgacgagactctccacaagaataacgctcttaaagtcgttcgggagctacaggctcagattgccgagctccaggaggactttgagagcgagaaggcctcacgcaacaaggcagaaaagcagaaaagggatttgagtgaagagctggaagcgctgaagacggagctagaggacacactggatactaccgctgcccagcaagagcttcgcacaaagagggaacaggaggttgccgaactgaaaaaagctctagaggaggagactaaaaaccatgaagcccagattcaggacatgagacagcgtcatgccacggccctggaggagctctctgagcagcttgaacaggccaaacgctttaaggcaaacctggagaaaaacaaacaagggttggagacagacaacaaagaattggcgtgtgaggtgaaggtgctccagcaggttaaagcagagtcagaacacaagagaaaaaagttagacgcccaagtccaggagctacatgctaaggtatccgaaggggacaggctccgggtggagctcgctgaaaaggcgagcaagctgcagaacgagcttgacaatgtgagcacactcctggaggaggcagaaaagaagggtataaaatttgcaaaagacgccgcaagcttagaaagtcagctgcaagacactcaggaattgctccaggaagaaacgcgccagaaactgaacctgagctctcggattaggcagctggaagaggaaaaaaattccctgcaggaacagcaggaggaggaagaggaagcccgtaaaaatctagaaaagcaggtgctcgctctgcagtctcaactggccgacactaagaaaaaggtagacgatgacctgggcaccatcgaatccctggaagaggctaaaaagaaactactaaaggacgcagaggccctttcacagcgcctggaggagaaggccctggcttatgataagctcgagaaaactaaaaatcgactacagcaagagctcgatgacctgacagtggaccttgaccaccaaaggcaggtggcctccaatctggaaaagaagcagaaaaagtttgaccagctgctggctgaagaaaaaagcatctctgccagatacgccgaggaaagggacagggccgaggccgaggcgcgagaaaaggaaaccaaagctttaagcctcgccagggcgcttgaagaggccctcgaagccaaggaggagtttgagcgccagaacaagcagctgagagccgatatggaggatctgatgagctcaaaagatgatgtgggcaagaacgtgcacgagctggagaagtcaaagcgggctctcgagcaacaggtggaagagatgcgcacccagctggaagagctggaagacgagctgcaagctactgaggatgccaaactaaggttggaggtcaacatgcaggctatgaaggcccagttcgaacgagacttgcagacaagagatgaacagaacgaagagaaaaagcgcttgctcattaaacaggtgcgggagctggaggctgaactagaggacgaaagaaaacagagggctctggccgtggcttcgaaaaaaaagatggagatcgatttaaaagatctggaagcccagatcgaagcagccaacaaagcccgtgacgaggttattaagcaacttaggaaactgcaggcgcagatgaaagactaccagagggagctggaggaagctagggctagccgtgatgagatcttcgcacagagcaaggaaagcgaaaaaaagctcaagagcctggaggctgaaattctccaactacaggaggagttggcaagcagcgaacgcgctcgaagacatgccgagcaagagagggacgaattggccgacgagatcacaaactccgcctccggcaagtcagcactcctggacgagaagcgcagactggaggctaggatcgcacagttggaggaggaactggaagaagagcagagcaatatggagctgctgaatgacagatttcgcaaaacgactttgcaagtggacactctcaatgcggaactggcagccgagcgctccgccgcacagaagtcagacaatgctcgccagcagctcgagcgacagaataaggaactgaaggccaagcttcaggaacttgagggcgctgtgaagtccaagtttaaggccacgatcagcgccctggaagcgaaaattggacagctggaagagcagctggaacaggaagctaaggaacgggctgcggctaacaagcttgttcgcaggaccgaaaaaaagctcaaggagatctttatgcaggttgaagatgagaggcgccatgctgatcaatataaggaacagatggagaaagctaatgcaagaatgaaacaattgaaaagacagcttgaagaagcagaagaagaagccacaagagcaaacgcctctaggagaaagctccagcgggagctggacgacgccacagaggcgaacgagggcttatctagggaagtctctaccctcaagaaccgactgagaagaggcggaccgattagcttttccagcagtcgctctggacggaggcagctccatctggaaggcgctagtctcgaactgagcgacgatgacaccgagagtaagacctcagatgttaatgagacccagccccctcaaagtgagta

SEQ ID NO: 89336 - DNA, 465 bp, Artificial Sequence
  derived and/or modified sequence
atgtatggcaagcaaaaaatctacttcgctgaccaggatcagtttgacatggtctctgacgcagatttgcaagtgttagacggaaaaatcgttgctttgaccgccaaggtgcagtctctgcagcaatcttgtcggtatatggaggccgaactgaaggaactttcttcagcacttacgactcccgaaatgcaaaaagaaatccaggaacttaaaaaggaatgtgcgggttaccgcgaacggctcaagaacattaaggccgccaccaaccatgtaacaccagaagaaaaagaacaggtctatagagagagacagaagtattgtaaagagtggcggaagcggaaacgaatggccaccgaattgtctgatgctattctcgaaggctaccccaagtccaaaaaacagtttttcgaagaggtgggaatcgaaaccgatgaggactacaacgtcactttacccgacccttag

SEQ ID NO: 89337 - DNA, 465 bp, Artificial Sequence
  derived and/or modified sequence
atgtatggcaagcagaagatctactttgctgaccaggaccagtttgacatggtgtctgatgctgacctgcaggtgctggatggcaagatcgtggccctgacagccaaggtgcagagcctgcagcagagctgccgctacatggaggccgagctgaaggagctgagcagcgccctgaccaccccagagatgcagaaggagatccaggagctgaagaaggaatgtgccggctaccgggagcggctgaagaacatcaaggccgccaccaaccacgtgaccccagaggagaaggagcaggtgtaccgggagcggcagaagtactgcaaggagtggaggaagaggaagaggatggccacagagctgagtgatgccatcctggagggctaccccaagagcaagaagcagttctttgaggaggtgggcattgaaacagatgaggactacaacgtgaccctgcctgacccctag

SEQ ID NO: 89338 - DNA, 465 bp, Artificial Sequence
  derived and/or modified sequence
atgtacggcaagcagaagatctacttcgccgaccaggaccagttcgatatggtgtcagacgccgaccttcaagtccttgacggcaaaatcgtggctctgaccgccaaggtgcaaagtcttcagcaatcctgtcggtacatggaggcagagttgaaggaattgtcgagcgcgctcacaacacctgaaatgcaaaaagaaatccaagagctgaaaaaggagtgcgctggctacagggagcgccttaagaatattaaagccgccacaaaccatgtcactcctgaggagaaagaacaggtttaccgcgagaggcaaaagtactgtaaagaatggagaaagcggaaaaggatggccaccgaactgagtgacgcaattctggaggggtaccctaaatcaaaaaagcagttcttcgaggaagtaggaattgaaacggacgaagactacaacgtaacactgcctgacccatag

SEQ ID NO: 89339 - DNA, 465 bp, Artificial Sequence
  derived and/or modified sequence
atgtatggaaagcagaagatatattttgcagatcaggaccaattcgatatggtgagtgatgctgatttgcaggtgttagatggcaagatcgttgctctgacagccaaagtgcagagcctccagcaatcttgccgctatatggaagccgaactgaaggagttgtctagtgcactgaccacaccagagatgcagaaggagatccaggagctgaagaaggagtgcgctggatatcgggaacgcctcaaaaacataaaggccgcaaccaatcacgtgactcctgaggaaaaggagcaggtctatagggagagacagaaatactgtaaggagtggaggaagcgcaagcgaatggctaccgagctcagtgacgctatcttggaggggtatccaaaatctaaaaaacaatttttcgaagaggttgggattgagaccgacgaagattataatgtcacattacctgatccatag

SEQ ID NO: 89340 - DNA, 465 bp, Artificial Sequence
  derived and/or modified sequence
atgtacggcaagcagaagatctacttcgccgaccaggaccagttcgacatggtgagcgacgccgacctgcaggtgctggacggcaagatcgtggccctgaccgccaaggtgcagagcctgcagcagagctgcagatacatggaggccgagctgaaggagctgagcagcgccctgaccacccccgagatgcagaaggagatccaggagctgaagaaggagtgcgccggctacagagagagactgaagaacatcaaggccgccaccaaccacgtgacccccgaggagaaggagcaggtgtacagagagagacagaagtactgcaaggagtggagaaagagaaagagaatggccaccgagctgagcgacgccatcctggagggctaccccaagagcaagaagcagttcttcgaggaggtgggcatcgagaccgacgaggactacaacgtgaccctgcccgacccctag

SEQ ID NO: 89341 - protein, 321 aa, Artificial Sequence
  derived and/or modified sequence
MSPSPTALFCLGLCLGRVPAQSGPLPKPSLQALPSSLVPLEKPVTLRCQGPPGVDLYRLEKLSSSRYQDQAVLFIPAMKRSLAGRYRCSYQNGSLWSLPSDQLELVATGVFAKPSLSAQPGPAVSSGGDVTLQCQTRYGFDQFALYKEGDPAPYKNPERWYRASFPIITVTAAHSGTYRCYSFSSRDPYLWSAPSDPLELVVTEFSEATAELTVSFTNEVFTTETSRSITASPKESDSPAGPARQYYTKGNLVRICLGAVILIILAGFLAEDWHSRRKRLRHRGRAVQRPLPPLPPLPLTRKSNGGQDGGRQDVHSRGLCS

SEQ ID NO: 89342 - DNA, 966 bp, Artificial Sequence
  derived and/or modified sequence
atgagccccagccccaccgccctgttctgcctgggcctgtgcctgggcagagtgcccgcccagagcggccccctgcccaagcccagcctgcaggccctgcccagcagcctggtgcccctggagaagcccgtgaccctgagatgccagggcccccccggcgtggacctgtacagactggagaagctgagcagcagcagataccaggaccaggccgtgctgttcatccccgccatgaagagaagcctggccggcagatacagatgcagctaccagaacggcagcctgtggagcctgcccagcgaccagctggagctggtggccaccggcgtgttcgccaagcccagcctgagcgcccagcccggccccgccgtgagcagcggcggcgacgtgaccctgcagtgccagaccagatacggcttcgaccagttcgccctgtacaaggagggcgaccccgccccctacaagaaccccgagagatggtacagagccagcttccccatcatcaccgtgaccgccgcccacagcggcacctacagatgctacagcttcagcagcagagacccctacctgtggagcgcccccagcgaccccctggagctggtggtgaccgagttcagcgaggccaccgccgagctgaccgtgagcttcaccaacgaggtgttcaccaccgagaccagcagaagcatcaccgccagccccaaggagagcgacagccccgccggccccgccagacagtactacaccaagggcaacctggtgagaatctgcctgggcgccgtgatcctgatcatcctggccggcttcctggccgaggactggcacagcagaagaaagagactgagacacagaggcagagccgtgcagagacccctgccccccctgccccccctgcccctgaccagaaagagcaacggcggccaggacggcggcagacaggacgtgcacagcagaggcctgtgcagctag

SEQ ID NO: 89343 - DNA, 966 bp, Artificial Sequence
  derived and/or modified sequence
atgtcgccaagcccaaccgcattgttctgcctgggcctgtgtctgggcagagttccagcccagtctggaccactgccaaagccctctcttcaggcgctgccgtcctccctggtgcccctcgaaaagcccgtgaccctacggtgtcagggtccccctggagtggacctgtataggttagaaaagctgtcttccagtcggtaccaggatcaggcagttctgttcatcccagccatgaaacggtcactggcgggcagatatcgatgtagctaccagaatggcagcctgtggagcttaccatccgaccagttagagcttgttgccaccggtgttttcgcaaagccctccctgagtgctcaaccaggcccggcggtgagctctggcggtgacgtaacattgcaatgtcagactaggtatggcttcgatcaattcgcactctacaaggagggcgatcccgctccatataagaatcctgaacgttggtatagggcatccttccccattatcaccgtgacggcagcccactccgggacctataggtgttatagtttttcatcccgtgatccttatctctggtccgctcccagcgacccacttgagttggtggtgacagaatttagcgaggctaccgccgagctgactgtatcgttcacaaacgaagtgtttacgaccgaaacttcgagaagtatcaccgccagtcccaaggagtcagattcaccggccgggcccgctaggcagtactacaccaaaggcaatttggtccggatctgtctgggggcagtaatcctgatcatcttggccgggttcttggccgaggattggcacagtcgtagaaagcggttgagacacagaggccgggcggtgcagcggccactaccacctctgcctcccctgcccttaactcggaaaagcaatggcggccaggatgggggaaggcaggatgtccacagtcgtgggctctgttcctag

SEQ ID NO: 89344 - DNA, 966 bp, Artificial Sequence
  derived and/or modified sequence
atgtctcccagccccaccgccttgttctgcctcggcttgtgtttggggagggtgccagcccagtctgggcctttaccaaagccatcgctccaggcccttccatcctcacttgtgcctctggagaaaccagtgactcttcgatgccaaggcccccctggtgtagatctgtatcggttagagaagctctcctcaagcaggtatcaggaccaggctgtactctttatccctgctatgaaacggagtctcgctggtcgttataggtgctcatatcagaacgggagcctgtggtcactgccttctgaccaactggagcttgtggctacgggtgtgtttgctaaaccaagcctgtccgcccagcctggcccagccgtgtcatctggcggcgacgtgacactgcaatgccaaacccggtacggctttgatcagtttgcgctctataaggaaggtgatccggccccctacaagaatccagaaagatggtacagagcgtcctttcccatcattactgtgacagccgctcactccggaacctatcgctgctacagcttcagttctagagatccctatctgtggagtgctccgtcagatccactcgagctcgtggttaccgagttctcagaagccacagccgaattgactgtgagctttactaacgaggtatttactactgagacctcccggagtattaccgcctcgccgaaggagagcgattcccctgctgggccagctcgccagtactataccaagggcaacctggtacggatctgcctaggtgcggtcattctcattatcctggccggattcctggccgaggattggcactcccggcgcaagagactgcgccataggggccgagccgtgcagagacccttgcctccgctaccccctctgccactcacccggaaatcaaatggtggccaagacggcgggagacaggatgtgcactcacgcggcctttgttcgtag

SEQ ID NO: 89345 - DNA, 966 bp, Artificial Sequence
  derived and/or modified sequence
atgtccccgtcccccaccgctctgttctgcctagggctctgcctgggacgagttcccgcccagtccggtcccttacccaagccatctctgcaggcactgcccagctcgctcgtccccctggagaagcccgtgaccctgaggtgccagggtcctccaggtgtcgatttatatcgcctggaaaagctgtcttccagtcgttaccaggaccaggccgtgttatttattcccgccatgaagaggagtctcgcaggcaggtacaggtgcagctaccagaatgggagcctctggtctttgcccagcgaccaactcgaattggttgctaccggggtgttcgcaaagccttccctgtctgctcagcctgggccagctgtgagttccggaggcgacgtgaccctccaatgccaaacaaggtatggattcgatcagtttgcactctataaagagggcgatcccgctccttacaaaaatcccgagaggtggtacagagccagttttccaattataacagtgaccgccgcgcattccgggacgtaccgatgctattctttctccagcagggacccttatctgtggagcgcgcccagcgaccccctggagctcgtcgtgacagagttctctgaagccacagcagagctgacagtatcattcacaaatgaggtcttcacgaccgagacatcccgctcaattacagcttctccgaaggaaagtgactccccagccggcccggctaggcagtactacactaaggggaatctcgttagaatctgcctgggtgccgtgattctgatcatcctcgccggattcctggccgaagactggcacagcagacgcaagaggttgcggcaccgggggcgggccgtgcagcgaccattgccccctttaccacccctccccctcacccggaagtccaacggagggcaggatggaggtaggcaggacgtccattcacggggtttgtgcagctag

SEQ ID NO: 89346 - DNA, 966 bp, Artificial Sequence
  derived and/or modified sequence
atgtcaccgtctccgaccgcccttttttgtctgggcctctgcctcggcagagtccctgcacagtcaggtcccctccccaagcccagtctgcaggcactgccgtccagcctggtgccgctggagaagcccgtcactctccgctgtcagggtccccctggcgtcgatctgtaccgattggagaaattgagctcatctcgctaccaggatcaggcagttttgttcatacccgccatgaagcggtccctggcaggaagataccggtgctcatatcaaaacggctccctgtggtctctccccagcgaccagcttgagttagtcgcaaccggcgtgttcgccaagccgtcgctgtcagcccagcccggcccagccgtttccagtgggggtgatgtcacgctccagtgccaaaccagatacggctttgaccaatttgcactctacaaggagggcgacccggctccttataaaaatcccgagcgttggtaccgggcaagctttccgatcataacggtgaccgctgcgcactcagggacctacaggtgctattccttttcttctcgggatccatatctttggtcagcaccctctgatccgctggaactagttgtgacagagttctctgaggccacagcagagctaaccgtctctttcacgaacgaagtgttcaccaccgagactagccgctcaatcaccgctagccctaaagagagcgattcacccgcaggacccgctagacagtattatactaaaggcaatctagtgcgaatttgcctcggtgccgtcattctgatcatcctggctgggtttctagctgaggactggcattccaggcgtaaaagactgcgccaccgaggccgggcagtgcaaaggccactgccaccactccctcccctgcccttaacccggaagagcaacggaggacaggacggaggaaggcaggatgtgcactctcgcggactatgtagctag

SEQ ID NO: 89347 - DNA, 966 bp, Artificial Sequence
  derived and/or modified sequence
atgtctcccagtcccacagcgctgttttgccttggcctgtgcttgggaagggtccccgctcaaagcggccccttacccaagccttccctgcaagccctcccatcatcattggtgccactggagaagcctgttacccttcgttgtcagggcccacctggagtagacctataccggctcgagaaactgtcctcctcaaggtatcaggaccaggctgtgctctttatccccgcgatgaagcgcagcctggccggacgatatcgctgctcataccagaatggatccttatggtcactgccttcagaccagctagagctggtagctaccggtgtgttcgccaagcccagcctgtctgcgcagcctgggccagctgtctctagtgggggagatgtgacactacagtgtcagacaagatacggatttgatcagttcgccctttataaggaaggggaccctgcaccatacaagaatccagaaagatggtacagggcatccttcccgatcattacagtgacagcagcccactctggaacatacaggtgctattccttcagttcacgagacccatacttgtggagcgcaccaagtgatccacttgaactggtggtgactgaattcagcgaagctacagcggaattgaccgtgtcgtttacaaatgaggtgttcacgaccgaaacttcccgttctattactgcaagccctaaggaaagtgactcacctgccgggcctgcgcgccagtactatacaaagggaaatctagtgagaatctgcttgggagcggtaatactgatcattctagctggattcctggccgaggattggcattcccggcgaaagagactgaggcacaggggacgcgcggtccagaggcctcttccgccgctccctcccctgcctctcacaaggaagtctaatggcggccaagacggcggcagacaagacgtccattccagaggtctctgttcctag

SEQ ID NO: 89348 - DNA, 966 bp, Artificial Sequence
  derived and/or modified sequence
atgtctccgtctccaacagccttgttctgtctgggtttatgtctggggagggtacccgctcaatcagggccgctgcccaagccaagcttgcaagcactgcctagcagcctcgtaccactagagaagccagtgacactgcgctgccagggcccccctggggtcgatttgtaccgacttgaaaaactgtcaagttcacgctatcaggaccaggctgtgctgtttatacccgccatgaagcggagcctcgcaggaagataccgatgctcctaccaaaacgggagtttgtggtctctcccaagcgaccagctggaactggtggctacaggggtgtttgctaaaccatctctgtcagcgcagcccggacccgctgttagtagcggaggggacgttactctgcagtgtcagactcggtatggctttgatcagttcgcactttacaaggaaggggaccctgcgccgtacaaaaaccccgagcggtggtacagagcatcattccccataataactgtgacagctgcacattccggcacctaccggtgttactcattttctagcagggatccctatctctggtcagcaccctccgatccacttgagctggtagtgaccgagtttagcgaggcgactgccgaattgacggtatcattcaccaacgaagtctttacaacggagacatccaggtcaatcaccgcctcccctaaagagtccgactcaccggctggccccgctcggcagtattatacaaaaggcaatctcgtccggatttgcctcggcgccgtgatcctgatcatccttgctggctttctggccgaagactggcatagccggagaaaaaggttgagacataggggtcgcgcagttcagcggccactgcctcccctgccccccctgcccctgacaagaaagtccaacggaggccaggacgggggcaggcaggatgtccattcgcggggcctttgttcttag

SEQ ID NO: 89349 - DNA, 966 bp, Artificial Sequence
  derived and/or modified sequence
atgtccccaagccccaccgctctattctgcctgggcctgtgcctcgggcgggtccctgcccaatctggacctctgcctaagcctagcctacaagcccttccttcctccctagtgcccctggaaaagcctgtgaccctccgctgtcaggggccccctggagtggatctgtatcgcctggagaaactgtccagcagccggtaccaggaccaggccgtgctgttcatcccggcaatgaaacggagcctggcaggacggtatcgatgcagttaccaaaatggttccctgtggtctctgccgagtgaccaactggagctagttgctaccggagtattcgccaaaccttccctcagcgcccagccaggacccgccgtgagctctggcggcgacgtcaccttgcaatgccagactaggtacggtttcgaccaattcgcactgtacaaggaaggggatcccgctccgtacaaaaacccagagcgctggtacagggccagctttcccataattaccgtgacggcagcgcattccggcacataccgatgttactctttcagttcccgggatccctacctgtggtctgcaccctccgatcctcttgagttggtggtaacggaattttcggaggctacagcggaactgacggtttcctttaccaatgaggttttcactacggaaacatcacgctctataacggccagccccaaggagtcagacagtccggcgggtcccgctcggcagtattacactaaggggaaccttgttaggatatgtctcggcgctgttatattgatcattctggccggctttctggccgaagattggcacagtcggagaaagagactgcgccatcgggggagagctgtccagaggcctttacccccccttccccccctcccacttactagaaaaagcaatggaggccaggatggaggacgtcaggatgtacactctcgcggattgtgtagttag

SEQ ID NO: 89350 - DNA, 966 bp, Artificial Sequence
  derived and/or modified sequence
atgagccctagccctaccgcactattttgcctggggctttgcctggggcgcgtgccggcgcagagcggaccgctgcccaagccctcgctccaagccctccccagctctctcgtccctctggaaaagcccgtgaccttaaggtgtcagggaccacccggcgtagacctctacagactcgagaagttgtcttctagccggtatcaagatcaggccgtgctcttcattccagccatgaaaagatctcttgccggaaggtatagatgtagctatcagaatgggtctctatggagcttaccttccgatcagctggaactggtagctaccggcgtgttcgccaaacctagcctgtccgcacagcccgggcctgcagtgagctctggcggggacgtcaccttgcagtgccagactcgctatggattcgatcaattcgctctctataaagagggagacccagctccctacaagaacccggagcgctggtaccgtgcgtcgttccccatcatcactgttaccgccgcccacagcgggacttatagatgctattcattcagcagtagagatccatacctttggagtgctccatccgatccactcgaactagtggttactgaattttcggaggcaactgcagagctgaccgtatcctttaccaatgaagtattcacaacggagacctctcgtagtattactgcgagccctaaggaaagcgactcacccgcaggcccagcccggcagtactacactaagggaaacctcgtgcgtatttgcctgggagccgtgattctgattatccttgccggcttcctggccgaagattggcatagtcggagaaagcggctcaggcaccggggccgcgcggtgcagcggcccctccctccattaccacccctgccattgacaaggaaatccaatggaggccaagacggagggcgccaggacgttcattcccgcgggctgtgcagctag

SEQ ID NO: 89351 - DNA, 966 bp, Artificial Sequence
  derived and/or modified sequence
atgagccccagccccacagccctcttctgcctgggcctgtgcctgggccgggtgcctgcccagagcggccccctgcccaagcccagcctgcaggccctgcccagcagcctggtgcccctggagaagcctgtgaccctgcgctgccagggccccccaggagtggacctgtaccgcctggagaagctgagcagcagccgctaccaggaccaggccgtgctcttcatcccagccatgaagaggagcctggccggccgctaccgctgcagctaccagaatggcagcctgtggagcctgcccagcgaccagctggagctggtggccaccggggtgtttgccaagcccagcctgagcgcccagcccggccctgctgtgtcctctggaggagatgtgaccctgcagtgccagaccaggtatggctttgaccagtttgccctgtacaaggagggggaccctgccccctacaagaaccctgagcgctggtaccgggccagcttccccatcatcaccgtgacagctgcccacagcggcacctaccgctgctacagcttcagcagccgggacccctacctgtggagcgcccccagcgaccccctggagctggtggtgacagagttcagcgaggccacagctgagctgactgtgtccttcaccaatgaggtgttcaccacagagaccagccgcagcatcacagccagccccaaggagagtgacagccctgctggccctgcccggcagtactacaccaagggcaacctggtgcgcatctgcctgggcgctgtgatcctgatcatcctggccggcttcctggccgaggactggcacagcaggaggaagaggctgcggcaccggggccgggctgtgcagaggcccctgccccccctgccccccctgcccctgaccaggaagagcaatggaggccaggacggcggccggcaggatgtgcacagccggggcctgtgcagctag

SEQ ID NO: 89352 - DNA, 966 bp, Artificial Sequence
  derived and/or modified sequence
atgagccccagccccaccgccctgttctgcctgggcctgtgcctgggcagagtgcccgcacagagcggacctctccccaagccctcgctgcaagctcttcccagctcactcgtcccactggaaaagcccgtgactctgcgctgccaggggccgccgggcgtggatctgtaccggttggagaaactgtcatcctctcggtaccaggaccaggctgttctctttatacctgccatgaaacgcagtctcgcggggcggtaccgctgtagctaccaaaacggatcactttggtcgctacctagtgaccagctcgagcttgtcgcaacaggagtgttcgctaaacccagtttgtctgctcagccaggacccgctgtttcatcaggaggagatgtgactctccagtgtcagacccggtacggatttgatcagtttgccctctacaaagaaggtgaccctgcgccctacaagaatccagaaagatggtacagggccagtttccctataatcactgtgacagctgcgcatagtggtacctacaggtgctactctttttcaagtcgagacccctacctatggagcgcgccatcagatcctcttgaactggtagtaaccgaattcagcgaagctaccgctgagcttactgtgagtttcaccaatgaagtttttacaacggagacgtctcgctccatcactgcgtcaccaaaagaaagcgactccccagctgggcccgctcgccaatattacaccaagggaaatttagttaggatctgcttgggggccgtgattttgataatccttgccgggttcctcgctgaggactggcactctagacgtaagcgcctgcgtcaccgagggagagcagtccagcgtcctttacccccactcccacccctccccctgacgcgtaaatccaacggagggcaggacggcggccggcaggacgtccatagccggggcctgtgctcttag

SEQ ID NO: 89353 - DNA, 966 bp, Artificial Sequence
  derived and/or modified sequence
atgagccccagccccaccgccctgttctgcctgggcctgtgcctggggagagtacccgcccagtccgggcctctgcctaaaccaagccttcaggcactaccttcttccttggttcctctcgagaagcccgtgactctgcgctgccaggggccgccgggtgtggatctctaccggctggagaagctgagctcgtctcgatatcaggatcaggctgtgcttttcatccccgccatgaaacgttctctagccggccggtaccgatgctcttaccagaacggttctctgtggagcttgccatctgaccagctcgaactggttgctaccggagtcttcgctaagccctctttatccgcacagccgggccccgcggtttccagtggcggagatgtgactctgcagtgtcaaactcggtacggcttcgaccaatttgcactgtacaaagagggagaccccgcgccatacaagaatcctgaacggtggtaccgcgcctcttttccgatcattacagttacggcagcgcacagcggtacgtaccgatgctactctttcagctctcgtgatccctacctatggagtgcccctagtgaccctttagaattagtcgtcacagagttctccgaggcgaccgctgagctcactgtaagcttcaccaacgaagtattcacaaccgagacatcaagaagcataacggcatcccccaaagaaagcgactcaccagccggccccgctcggcagtactatacaaaaggcaacctggtgcggatctgcctgggagcagtcattcttataatccttgcgggatttttagctgaggactggcactctcgcaggaagcggctaagacaccggggccgggcagtccaacgaccacttccgcccctgccgccactgccactcaccaggaaaagcaatggcggtcaggacggtggcagacaggacgtgcattcacgcggcctgtgctcttag

SEQ ID NO: 89354 - DNA, 966 bp, Artificial Sequence
  derived and/or modified sequence
atgagccccagccccaccgccctgttctgcctgggcctgtgcctgggacgagttcctgcccagtcaggaccgctacccaagccttctctgcaggcactgcccagcagtctagttccactggagaaaccagtgactctgcgttgccaagggccacctggcgtggacctctacagactggaaaagctctcttcaagtcgttatcaggatcaggcagtgctgttcattcctgcaatgaagaggagtctggccggcaggtacagatgcagctatcagaatggcagcttgtggagcttgccttccgaccaactggagctggtggctaccggcgtctttgctaaacctagtcttagcgcccaacctgggcctgccgtttcctcgggtggagacgtgactttacagtgtcagacacggtacggcttcgatcagttcgcactgtataaggagggagatccagccccatataaaaaccccgagcgctggtacagggctagctttcctattatcactgtgactgctgcccatagcggaacctatagatgttattccttttcaagtcgggacccgtatctttggtctgctccttctgatcccctggagctggtcgtcaccgagttcagcgaagctaccgccgagctcactgtgtccttcacgaacgaggtctttaccaccgaaaccagtcgttccatcactgcctcccctaaggaatccgattcccctgcaggccctgcccgccagtattatactaagggcaatttggttcgcatatgcctgggggccgtgatattaattatacttgctgggttcctcgccgaggactggcactcccgtaggaagcgacttcgacataggggtcgggctgtgcagaggcccctgcctcccctgccccccttgcccctgaccagaaagtcaaatggagggcaggacggcgggagacaagatgtacactcccgaggcctgtgttcgtag

SEQ ID NO: 89355 - DNA, 966 bp, Artificial Sequence
  derived and/or modified sequence
atgagccccagccccaccgccctgttctgcctgggcctgtgcctggggcgggtgcctgcacagtccggccccctcccgaaaccttccctgcaggccctcccgagtagccttgtgccattagaaaagcccgtgacgttaagatgccaggggccacctggcgtggacttatatcgtctagaaaagctgtcttctagccgataccaggaccaagctgtcttgtttattcccgcaatgaagagatcactggccggtcggtatagatgtagctatcagaatggctccctatggtccctaccttccgatcagctcgagctcgtcgccaccggcgtcttcgccaagcctagtctgtctgctcagccaggacccgccgtctcctccggtggtgatgtaaccttacagtgtcagacacggtatggatttgaccaatttgccctctacaaagagggggatcccgccccttacaagaatccggagcgatggtaccgagcttcctttcccataataaccgtcactgccgcccattcgggcacgtataggtgctatagcttttctagccgcgatccctatctgtggtcagccccatccgatccgcttgagctggtggttacggaattttccgaggcaactgctgagttaactgtctcatttacgaacgaagtgtttaccaccgagactagccggtcaattacagcctccccgaaggagtcagactcccccgccgggcctgcacggcagtactacaccaaagggaacctggtcaggatatgtcttggggccgtgatactcatcattctggctggctttctggctgaagactggcactcaagaagaaagagactgcgacaccgagggcgggccgtccaacgccccctgccacccctgcccccccttccactgacaaggaaatcaaatggtggacaagatgggggcaggcaggacgtccactccagagggttatgcagttag

SEQ ID NO: 89356 - DNA, 966 bp, Artificial Sequence
  derived and/or modified sequence
atgagccccagccccaccgccctgttctgcctgggcctgtgcctgggccgagtaccagcccagagtggacccctgccaaagccatccctgcaggcgttgccgtcaagcttggttccgctggaaaaacctgttaccttgcgttgtcagggtcctcctggagtggacctttacaggctggagaagctttcctcttcccgctatcaggaccaggctgtgctgtttatccctgccatgaaacgctcccttgcagggcgatatcggtgctcataccagaacggatcactgtggagtctgccgtcagatcagttagagctggtggccaccggcgttttcgccaagccttcgctaagtgcgcagcccgggccggccgtgtcatccggaggagacgtcactctgcagtgccagacaaggtatgggtttgaccaattcgctctatataaggaaggggacccagctccttataaaaacccggagcgttggtacagggcgagctttccaatcataacagtcacagcagcgcattccggcacttacaggtgctacagtttcagctcccgcgatccatacctgtggtctgcaccaagcgatccactggaacttgtcgtaaccgaattctccgaggctaccgcagaactgaccgtttcctttaccaacgaggtcttcaccacagaaacatcacggtctattacagcctcccccaaggaatccgactccccagcaggacccgcacgacagtactacaccaaaggaaatttagtgcggatttgcctgggcgccgtcatcttgatcatactggccggctttctggccgaagattggcactcacggaggaaacggctgcgacaccggggccgggccgtgcaaaggcctctccctccattgcctccccttccgctgacaagaaagtcaaacggcggacaagacggcgggcgacaggatgtgcattctagaggactgtgtagctag

SEQ ID NO: 89357 - DNA, 966 bp, Artificial Sequence
  derived and/or modified sequence
atgagccccagccccaccgccctgttctgcctgggcctgtgcctgggcagagttccagcccagtccgggccgttgcctaagccatctctgcaggctctccccagcagtctcgtgcctttggagaagcccgttaccttgcggtgccagggcccccctggggtcgatctctaccgcctcgaaaagctgagtagttccaggtaccaggatcaggctgtactgttcatcccagcgatgaagcggtctttagcgggccgataccgctgctcgtatcaaaacggatctctctggtccctgccatctgaccagcttgagcttgtcgctactggtgtatttgccaaaccaagcttatcggctcaaccagggccagcagtgagttcaggaggcgatgtaacccttcagtgtcagactaggtatggcttcgaccagttcgccctgtataaggaaggcgatccagccccttataagaatcctgagcggtggtacagggcttcatttccgattattaccgtcacggccgcacactcagggacatatcgctgttactcattcagttcccgggacccctatctctggagtgcaccatccgacccactggaactggtggttactgaattcagcgaggccacggcagagctgaccgtatccttcacaaacgaggtattcactacagaaacttctaggtccatcacagcctcgccaaaggagtctgactcgcctgctggacctgctagacagtattatacaaagggtaacctggtaagaatctgtttaggagctgtcatccttataatactcgccggattcctcgctgaggattggcatagcaggagaaaacgcctgcggcaccgcggccgagccgtgcaacggcccctcccccctctgccccccctcccacttactcgcaagagcaatggtgggcaagacggaggccgccaggacgtgcacagtcgtggactgtgtagctag

SEQ ID NO: 89358 - DNA, 966 bp, Artificial Sequence
  derived and/or modified sequence
atgagccccagccccaccgccctgttctgcctgggcctgtgcctgggtcgtgtgcctgcccagtctggacccctgcccaagccaagcctgcaggctctgcctagctccctcgtgcctcttgagaaacctgtgactctacgctgccagggacctcccggcgttgacctgtataggttagagaaactatcaagttcccgataccaagatcaagccgtgctgttcattccagccatgaaacggtccctcgcgggtcgatatagatgctcttatcaaaatgggagcctctggagtttaccttctgatcaactcgaactcgttgctaccggagtttttgctaagccatctctgtccgcccagcctggaccagctgtgagcagcgggggagatgttactctccaatgccagacgcgctacgggtttgatcagttcgccctgtataaggagggggacccagccccttataaaaaccccgagcgctggtaccgcgcaagttttcctattataacagtgaccgccgcacattccggtacataccgatgctattccttcagttcgcgtgacccctacctctggtccgcgcccagtgatcctctggagcttgtggtcactgaattctccgaggcgaccgccgagctcactgtgagtttcacaaacgaggttttcacaacagagacttctcgtagtattaccgcctcacctaaggagtcagattcccctgctgggcccgctaggcagtactacactaaagggaatctcgtcaggatctgcctcggtgctgtaatactcatcatcctagctggctttctcgctgaggattggcactcccgccgcaaaagactgaggcaccgcggaagggccgtgcagagaccgttaccacctctgccgcctctcccgctcacacgcaaatcaaacggagggcaggacggagggagacaggatgtacatagccgggggctgtgttcttag

SEQ ID NO: 89359 - DNA, 966 bp, Artificial Sequence
  derived and/or modified sequence
atgagccccagccccaccgccctgttctgcctgggcctgtgcctgggacgtgttccagcgcagtcagggcctctaccaaaaccgtccttacaagccctccccagcagtctcgttcctttggaaaagccagtgacactccgctgtcaaggcccgcccggagtggatctatacagactcgaaaagctgtcgtcttccaggtaccaggaccaggcggtcctattcatccccgccatgaagcgttctctcgctggacgctatcgatgttcgtatcaaaacggctccttgtggtctctgccgtccgatcagttggagctggtggctaccggagtgttcgctaaacctagcctgtcagcacagccaggccctgcagtttcctccgggggcgacgtgacattacagtgtcaaacaagatatggcttcgaccagttcgccttgtacaaagaaggggatcccgctccgtataagaacccagaaaggtggtacagagcttcatttcccattatcaccgtcaccgccgctcactcaggaacttatcgatgttatagcttctcctctagagatccatatctgtggtccgctccatccgatcccctagagttggtggtaaccgaattctcggaggcaacagccgaactgaccgtcagcttcacaaatgaagtttttaccacagagacaagtaggagcatcactgcttcaccaaaagaaagcgactcgcccgccgggccagcaagacagtactatacgaaaggtaatttagtgcggatctgtctgggggccgtcatcctgattattctcgccggattcctggccgaagactggcactctcgccgaaagagactgcgtcaccgcggtcgcgcggtgcagaggcccctcccaccgcttccccccttgcctctgacccgtaagagcaacgggggccaagacggtggccggcaggacgtgcactctcgcggactgtgttcttag

SEQ ID NO: 89360 - DNA, 966 bp, Artificial Sequence
  derived and/or modified sequence
atgagcccttcccccacagccctgttttgtcttggattatgtcttggccgtgtgcctgctcagtccggccctcttccgaaaccttctctccaggctcttccctcttcactggtcccactcgaaaagccggttactctgcgatgtcagggacctcctggcgtggacctttatcgcctggaaaagctcagctcttcaagataccaagaccaggctgtgctcttcataccggctatgaagcgctccttggcagggagataccggtgtagttatcagaatggtagtctgtggagcctcccaagcgaccagcttgagcttgttgccactggggtgttcgccaaaccatccctgagtgcgcaacctgggcctgctgtctctagcggaggcgacgtgacccttcaatgtcagacacggtatggatttgatcagtttgccctatacaaggaaggcgatcctgcaccatacaagaaccctgaacgctggtatagagcttccttccccataattaccgttaccgctgctcatagtgggacctataggtgctacagcttcagctctagggacccttacctctggtcagccccttcagaccccctggagctagtggttacagagtttagcgaggctactgctgagttaacggtgagcttcaccaacgaagtgtttactactgaaacctcccgttcaataaccgcctcacctaaagagagcgactctcctgcaggccctgctcggcagtattacacaaagggcaacctggtccgtatctgtctgggcgcagtgatcctcattattctggccggatttttggcagaagattggcactcccgcaggaagagactcagacaccgtggtagagcagtgcagagaccccttcccccacttccacccctgcccctaaccaggaaatcaaatgggggtcaagacggcggacggcaggacgttcactctcgaggactatgtagctag

SEQ ID NO: 89361 - DNA, 966 bp, Artificial Sequence
  derived and/or modified sequence
atgtctccatccccgaccgccctattctgtctgggcctgtgcctgggaagagttccggctcagtccgggccactgccaaagcctagcctgcaggcactccctagcagcctggtccctctggaaaagcctgtgactctgaggtgtcaaggacctccaggagttgacttgtaccggctggaaaagctgagctctagtcggtaccaggaccaggccgtccttttcatcccagctatgaaacgtagcctggctgggagatatagatgtagttaccagaatggaagcctctggagtctcccttccgatcaactggagctagtggcaaccggggtcttcgccaaaccgtccctgagtgcgcagcccggtccagccgtgagttccggcggagatgttacccttcagtgtcaaactaggtatgggtttgatcagttcgccctctacaaagagggggatcccgcaccctataagaaccccgaacgttggtaccgagcaagcttccccatcataactgtgacagcagcccacagcgggacctacagatgttactccttcagctcccgggacccatatctgtggtctgcaccatccgatcctctggaactagtcgtcactgaatttagcgaagccaccgccgagctcacggtaagctttaccaatgaggtgttcacgactgagacgagcaggagtatcactgcgagcccgaaggaatcggattctcccgcaggacctgctagacaatactacaccaaaggaaatctagtgagaatttgtctcggcgcagtcattctgattatcctagcagggtttctggccgaagattggcactcccggagaaaaaggctccgacaccgagggagggccgtgcagaggcctttgccgccactgccccctctgccccttaccaggaaatctaacgggggtcaagatggaggcagacaggacgtccattcccggggtctgtgctcatag

SEQ ID NO: 89362 - DNA, 966 bp, Artificial Sequence
  derived and/or modified sequence
atgtccccatcccccactgctctcttctgcttgggcctgtgcttgggcagggtgccagctcaaagtggcccactgccaaagccgagcctccaagccctccccagcagccttgtgccactggaaaaaccagtgactcttcggtgtcaggggcctcctggcgtcgacttgtaccggttggagaagctgtccagttcccgataccaagaccaagccgtgcttttcatacccgcaatgaagcggtcccttgccggacgttaccggtgtagctatcagaacggctccctgtggagccttccatccgaccagctcgagctagtggccacaggagtgtttgcgaagccaagtctgagcgcacagcctggccctgctgttagcagcggtggggacgttactttgcaatgccagacaagatatggattcgaccagtttgcgctctataaagagggagatcctgccccttacaaaaatccagagcgctggtatagggcctcatttcccatcatcaccgtgactgccgctcattctgggacctaccggtgctattcattcagtagcagagacccctatctctggagcgcaccaagtgacccactggaactggtcgtgacggagttcagcgaagccaccgccgaactgacagtgtcatttactaatgaggtatttactactgaaacaagcaggagcatcaccgccagcccgaaggagagtgattcgccagctggtccagcaaggcagtattacacaaaaggcaatcttgtgaggatttgccttggcgctgtcattctgatcattctggccggtttcttagcagaggactggcacagccgcagaaagcgccttcggcatagagggcgtgctgtgcagcgccctctgcctccactccctcccctgccgttgacacggaaatcaaacgggggacaagatggaggccgacaagatgtgcactctcgcggactatgctcatag

SEQ ID NO: 89363 - DNA, 966 bp, Artificial Sequence
  derived and/or modified sequence
atgtctccatcaccaacagctctgttttgcctcggtctatgtttagggagggttcccgcacagtccggcccactgcctaagcctagcctccaggcgctgccctcatccctggtgcctttggagaaacctgtgacgctgcggtgtcagggaccacctggggtggacctgtacaggttggagaagctgtccagttccaggtaccaggaccaagctgtgctgttcatcccagccatgaaaagatctctggctgggcgatatagatgctcatatcaaaatggctccctgtggagtctcccatctgatcagctggaattagtggccacaggagtatttgcaaaacccagtctgtcagcccagcccggacccgcagtttccagcggcggtgatgtcaccctgcagtgtcaaaccagatacggattcgaccaatttgccctatacaaggagggcgatcctgcgccatataaaaaccccgagaggtggtatcgggcatccttccctattatcaccgtcactgccgcacattcaggaacctaccgctgctattctttcagttcaagagacccttacttgtggtccgccccttcagaccccctcgaactggtagtcacggaattctcagaggccacagccgagttgacagtttccttcacaaacgaagtattcacaactgagactagtaggagcatcacggcgtccccaaaagaatctgattccccagccggacctgcacgccagtactacacaaagggaaacctggttcgcatctgccttggcgcagtcattttgatcattctcgcgggattcctcgctgaggactggcacagccgccgaaagcggctgcggcataggggtagggccgtacagagaccactgcccccactacctcccctacctctgacgaggaagtccaacggcggacaagacggcggaaggcaggacgttcactcacgtggtctgtgcagctag

SEQ ID NO: 89364 - DNA, 966 bp, Artificial Sequence
  derived and/or modified sequence
atgtccccatcgcccactgcactcttctgcctggggctgtgcctgggccgagtgcctgcacaaagcggcccactccccaaaccatctctgcaagctttacctagctcactggtcccattggagaagcctgtgacactacgctgtcaaggccctcctggtgtggacctgtaccgccttgagaagttatccagctcgaggtatcaggatcaggcagtcctgttcattccagctatgaagaggagcctggcaggcagatacaggtgcagttatcaaaacggtagtctctggtctttgcccagcgatcagctggagctggtagccaccggagtatttgccaagccaagcctgtctgcccagcccggacccgcagtctccagcggaggggatgtaacgttacagtgccagaccagatatggctttgaccagttcgccctttataaggagggcgaccccgcaccatacaagaaccctgaacgttggtatagggcaagttttccaataatcaccgtcaccgctgcacacagcggcacatatcggtgttacagtttttccagccgggatccttacctctggtcggccccttctgaccctctcgagctggtggtgaccgaattcagcgaagctacagcagaattaactgtgtcttttactaatgaggtatttaccaccgagacctccagatcaatcaccgcctcgccaaaggagtccgactcgcctgcaggtcctgccagacagtattacaccaagggcaatcttgtaagaatttgccttggtgctgtgatattgatcattttagctgggtttttggccgaggactggcactctaggcgaaagagactgaggcaccggggaagggccgttcagaggcctttgccccctctgccccctctcccactcacccgaaagagcaacggagggcaggatggtggaaggcaggacgtgcactcccgcggtctttgcagctag

SEQ ID NO: 89365 - DNA, 966 bp, Artificial Sequence
  derived and/or modified sequence
atgagcccctcccctacggccttattctgtctcggcttgtgtctgggtcgggttcccgctcagtccggcccattgcctaaaccctctctgcaggctcttccctccagcctcgttccgctggaaaagcccgtgacactccgctgccagggtccacccggtgtcgacctgtaccggcttgaaaagctgagttcttccagatatcaagaccaggcggtcctgttcatccctgccatgaagcggagtttggctggacggtaccggtgcagttatcaaaatggcagcctttggagcctccccagtgaccagcttgaactcgtggccacaggagtctttgccaaaccctcactcagtgctcaacctggcccagcagtgtcttcaggcggtgatgtaactctgcagtgtcaaactcggtacggcttcgatcagttcgccctatacaaggagggggatcccgcaccttacaagaatccggagcgttggtacagggcgtcttttcctatcatcacggtgacggccgcacatagtggtacctatagatgttacagcttctcaagcagggacccgtacctgtggtccgcaccatctgatccactggagctcgtcgtgactgagttcagcgaggctacggccgaactgacagtgtctttcacgaatgaggtgttcactactgaaacctctagaagtataactgcatcgcccaaggagagcgactctccagctggtcccgctagacaatactataccaaagggaaccttgtgcgtatctgcttgggcgctgtgatcctgatcatactggcgggattccttgccgaggactggcattctagaagaaagagattgaggcatcgcggtcgtgccgtgcagcgtcccctgccaccgctgcccccattaccgcttacccgcaaaagtaacgggggacaggatggaggccgacaggatgtacacagtaggggcctgtgctcctag

SEQ ID NO: 89366 - DNA, 966 bp, Artificial Sequence
  derived and/or modified sequence
atgagccccagtcccaccgctctgttctgcctcggcctctgcctggggcgagtccctgctcagtcaggacctctacccaagccttccctgcaagcacttccatccagtctcgtgcccttggagaagcccgttaccctcaggtgccagggcccacctggcgtggacctgtatcggctggaaaagctctcaagctcccggtatcaagaccaggccgtactattcatccctgccatgaaaagaagcctggccggacgctacaggtgctcataccagaacggctcgctatggtcactcccttccgaccagctggaactggtggccacgggcgttttcgccaagccttccttgagtgctcaaccagggcctgccgtcagctccggtggcgatgtgaccctccagtgccagacacgctacggttttgaccagtttgccttatataaggaaggagaccctgctccatacaagaatcccgagaggtggtatcgggcaagttttccaatcattacggtgactgctgcacactctggtacctaccgatgttactcatttagtagcagggatccatacctttggtccgcacccagtgatccactggaacttgtggtaaccgagttctctgaagcgactgccgagctcaccgtttctttcacgaacgaggtgttcacgaccgaaacctcccgatctataaccgccagtcccaaagagtccgactcccccgctgggcctgctcgacagtattatactaagggcaacttagtgcgtatctgtctgggggctgtaattctgataattcttgccggattcctggcagaagactggcattcccgacgcaagcgcctgcgccacagaggacgggctgtccaacgtccactgcctcccctaccaccactccctttaaccaggaaatctaatggtggccaggacgggggacggcaggatgttcattcccgcggactgtgttcatag

SEQ ID NO: 89367 - DNA, 966 bp, Artificial Sequence
  derived and/or modified sequence
atgagtccatcccctacagccctgttctgtttgggcctctgcctgggcagagtgcccgcacagtctgggccactgcctaagccctctttgcaagcactgccgagttcccttgtccctctggaaaagcctgtaaccctacgatgtcagggccctccgggagtggatttatatcgcctggagaagttgagctcttcacggtatcaggaccaggctgtgctatttatccctgcaatgaaaagaagcctggccggaagatacagatgcagctatcagaacggcagtttgtggtccctgcccagtgaccagctcgagctcgtggcgaccggcgtgtttgccaagccaagtctcagcgctcagccaggtccagctgttagtagcggaggagatgtgacactccagtgtcaaacgcgctacggatttgatcagttcgccctgtacaaagagggagatccagccccatataaaaatcccgagcgctggtatagggcaagcttccccatcattaccgtgacggctgcacactctgggacataccggtgctatagcttctcctctcgggacccatacctttggtctgctccgagtgatcctcttgaacttgtggtgacagagttttcggaggccacagcagaattgaccgtcagtttcaccaacgaggtgttcacaaccgagacatcgagaagcattacagcctcccccaaggagtccgattctccagctggcccagctcgccagtactacacaaaaggaaacctggtgcgaatctgtctcggtgctgtaatcttgatcatcctggcaggtttcttggctgaggattggcacagccgtaggaaacgcctgagacatcgcggacgagctgttcaaagacccctgccccctttgccaccactgccccttaccaggaagtcaaacggcggtcaggatggaggtcggcaggacgtgcattcacgaggtctttgtagctag

SEQ ID NO: 89368 - DNA, 966 bp, Artificial Sequence
  derived and/or modified sequence
atgagcccctcaccaacagccctgttttgtctcggtctgtgtctcgggagagtaccagctcaaagcggacctctgcccaagccaagcttacaggctttgccctcctctctcgttcctctggagaagcccgttacgctcagatgtcaaggacctcccggggtcgacctgtacagactcgagaaactgtcctccagtagataccaggatcaggctgttctgttcatacctgccatgaaacgtagtcttgcaggccgttatcggtgttcataccagaacggtagcctctggtcgctgccctctgatcaactggaactcgtggccaccggagtatttgctaaaccgagccttagcgcccagcccggccctgccgtatcctctgggggagatgttaccctgcagtgtcagactagatatgggtttgaccagttcgctctatataaggagggagatccagccccgtataaaaaccctgaacgctggtaccgagcgtcctttcccatcataactgtgactgccgcccattcgggaacctatcggtgctattccttttcaagcagggacccatacctgtggagcgcccctagcgatccactggagctggtagtgacagagttctcagaggccacagcagagctgacagtatcctttacaaatgaggtgtttactactgaaaccagtcgcagtatcacagccagccctaaggagtctgattcccctgccggaccagccagacaatattatactaaaggaaacttagtccgaatctgcctcggagccgtaattctgattatcctggccggctttcttgccgaggactggcatagcaggcggaagagactacgccacaggggacgggccgtacagcgcccactgcctcccctgccacccctgcccctgactcggaaaagcaacggaggccaggatggaggaagacaagacgttcactctcgaggactgtgctcttag

SEQ ID NO: 89369 - DNA, 966 bp, Artificial Sequence
  derived and/or modified sequence
atgagccccagccccaccgccctgttctgcctgggcctgtgcctggggcgggtgcccgcccagtccgggcccctccccaagccgtctttgcaggcactcccatcgtctcttgtgccgctggagaaacccgtaacactccggtgccagggtcctcccggcgtggacctctatcgcctggagaagctgagctcatcaagataccaagatcaggctgttctgtttatccccgcaatgaagcgctccctggccgggaggtacagatgtagttaccagaacggctccctttggtccctgccttccgatcagctggagcttgtcgctaccggggtattcgcaaaaccaagtctgagcgcccaaccgggacctgcagtaagttccggaggagacgttacattgcaatgccagacgcgttatgggttcgatcagttcgcgctatacaaagagggtgatccagctccctacaagaatcccgagaggtggtacagagcctcctttcctatcatcacagtgaccgccgctcattctggtacttatcgttgttattcctttagcagcagggacccttacttatggtctgcaccctcggatccgctcgagctagtggtgaccgagtttagcgaagccacggctgaactgaccgtctccttcaccaatgaagtgttcactactgagacatctcgttctatcactgcaagtcccaaagagtctgattcgcccgccgggcccgcgcggcagtactacactaagggcaacttagttagaatctgcctgggcgctgtcattctcataattctcgctggatttttggccgaagactggcatagtcgtcggaagaggctgcggcaccggggtcgtgcagttcagaggcctctccctccactgcctccccttcctctgacaaggaagagcaatggaggccaggacggtggcaggcaggatgtgcactcccgaggcctttgcagctag

SEQ ID NO: 89370 - DNA, 966 bp, Artificial Sequence
  derived and/or modified sequence
atgtcaccaagccctactgccttattctgcctaggcctttgcctcgggagggtgccagcacaatccggtccactgcctaagccaagtttacaggctctgcctagtagcttggttcctttggaaaaaccggtgactctgcgttgtcagggacctcctggcgtcgatttgtatcgactggaaaagttgtcaagcagcagataccaggatcaggcagtgctgttcattcccgctatgaaaaggtcccttgccggtcgctacaggtgttcctaccagaatggctcgctttggtcactcccctctgaccaactggaacttgtggcaacgggagtctttgccaaaccttctctgagtgcccagccgggacctgccgtatcaagcggcggagacgtgacacttcagtgccagacaagatacggttttgatcagttcgccctctacaaggagggagatcctgctccttacaaaaatcccgaaaggtggtaccgcgcatcctttcctatcatcactgtcactgcggctcatagcgggacctatcggtgctattccttcagcagtagggacccgtatctttggagcgccccaagcgatcctctcgaactcgtggtaaccgaatttagtgaggccacagctgagctgaccgtgtcctttaccaacgaagtgttcaccacagagacctcccgaagtatcactgcgagccccaaggagagtgattcaccagccggtcccgctcgacagtactatactaaggggaacctcgtgaggatctgcctgggggcagtcatactcataatcctggcgggttttctggctgaagactggcatagtagaaggaagaggctacgtcaccgaggcagagccgtgcaacggccattgccaccccttcccccactcccattaacccggaaatcaaacggcggacaggacggcggtcgccaggacgtccacagtcgtggtctctgttcctag

SEQ ID NO: 89371 - protein, 151 aa, Artificial Sequence
  derived and/or modified sequence
  misc_feature (1)..(1): Xaa can be any naturally occurring amino acid
XTHKEKEKGKEKVREKEKPEKKATHKEKIEKKEKPETKTLAKEQKKAKTAEKSEEKTKKEVKGGKQEKVKQTAAKVKEVQKTPSKPKEKEDKEKAAVSKHEQKGFPGPGIRNSSYYCQYIKGQINAWNDLRTSLLPIPYLSCGKMCSNFNN

SEQ ID NO: 89372 - protein, 297 aa, Artificial Sequence
  derived and/or modified sequence
MTEITAEGNASTTTTVIDSKNGSVPKSPGKVLKRTVTEDIVTTFSSPAAWLLVIALIITWSAVAIVMFDLVDYKNFSASSIAKIGSDPLKLVRDAMEETTDWIYGFFSLLSDIISSEDEEDDDGDEDTDKGEIDEPPLRKKEIHKDKTEKQEKPERKIQTKVTHKEKEKGKEKVREKEKPEKKATHKEKIEKKEKPETKTLAKEQKKAKTAEKSEEKTKKEVKGGKQEKVKQTAAKVKEVQKTPSKPKEKEDKEKAAVSKHEQKGQSPAIPPPLPTEQASRPTPASPALEGKYFFFS

SEQ ID NO: 89373 - protein, 217 aa, Artificial Sequence
  derived and/or modified sequence
MEETTDWIYGFFSLLSDIISSEDEEDDDGDEDTDKGEIDEPPLRKKEIHKDKTEKQEKPERKIQTKVTHKEKEKGKEKVREKEKPEKKATHKEKIEKKEKPETKTLAKEQKKAKTAEKSEEKTKKEVKGGKQEKVKQTAAKVKEVQKTPSKPKEKEDKEKAAVSKHEQKGFPGPGIRNSSYYCQYIKGQINAWNDLRTSLLPIPYLSCGKMCSNFNN

SEQ ID NO: 89374 - protein, 328 aa, Artificial Sequence
  derived and/or modified sequence
MTEITAEGNASTTTTVIDSKNGSVPKSPGKVLKRTVTEDIVTTFSSPAAWLLVIALIITWSAVAIVMFDLVDYKNFSASSIAKIGSDPLKLVRDAMEETTDWIYGFFSLLSDIISSEDEEDDDGDEDTDKGEIDEPPLRKKEIHKDKTEKQEKPERKIQTKVTHKEKEKGKEKVREKEKPEKKATHKEKIEKKEKPETKTLAKEQKKAKTAEKSEEKTKKEVKGGKQEKVKQTAAKVKEVQKTPSKPKEKEDKEKAAVSKHEQKDQYAFCRYMIDIFVHGDLKPGQSPAIPPPLPTEQASRPTPASPALEGDKASKEKKRKMKRMSEK

SEQ ID NO: 89375 - DNA, 654 bp, Artificial Sequence
  derived and/or modified sequence
atggaggagaccaccgactggatctacggcttcttcagcctgctgagcgacatcatcagcagcgaggacgaggaggacgacgacggcgacgaggacaccgacaagggcgagatcgacgagccccccctgagaaagaaggagatccacaaggacaagaccgagaagcaggagaagcccgagagaaagatccagaccaaggtgacccacaaggagaaggagaagggcaaggagaaggtgagagagaaggagaagcccgagaagaaggccacccacaaggagaagatcgagaagaaggagaagcccgagaccaagaccctggccaaggagcagaagaaggccaagaccgccgagaagagcgaggagaagaccaagaaggaggtgaagggcggcaagcaggagaaggtgaagcagaccgccgccaaggtgaaggaggtgcagaagacccccagcaagcccaaggagaaggaggacaaggagaaggccgccgtgagcaagcacgagcagaagggcttccccggccccggcatcagaaacagcagctactactgccagtacatcaagggccagatcaacgcctggaacgacctgagaaccagcctgctgcccatcccctacctgagctgcggcaagatgtgcagcaacttcaacaactag

SEQ ID NO: 89376 - DNA, 1038 bp, Artificial Sequence
  derived and/or modified sequence
atcgtggagatctacccccagggcaacgccagcaccaccaccaccgtgatcgacagcaagaacggcagcgtgcccaagagccccggcaaggtgctgaagagaaccgtgaccgaggacatcgtgaccaccttcagcagccccgccgcctggctgctggtgatcgccctgatcatcacctggagcgccgtggccatcgtgatgttcgacctggtggactacaagaacttcagcgccagcagcatcgccaagatcggcagcgaccccctgaagctggtgagagacgccatggaggagaccaccgactggatctacggcttcttcagcctgctgagcgacatcatcagcagcgaggacgaggaggacgacgacggcgacgaggacaccgacaagggcgagatcgacgagccccccctgagaaagaaggagatccacaaggacaagaccgagaagcaggagaagcccgagagaaagatccagaccaaggtgacccacaaggagaaggagaagggcaaggagaaggtgagagagaaggagaagcccgagaagaaggccacccacaaggagaagatcgagaagaaggagaagcccgagaccaagaccctggccaaggagcagaagaaggccaagaccgccgagaagagcgaggagaagaccaagaaggaggtgaagggcggcaagcaggagaaggtgaagcagaccgccgccaaggtgaaggaggtgcagaagacccccagcaagcccaaggagaaggaggacaaggagaaggccgccgtgagcaagcacgagcagaaggaccagtacgccttctgcagatacatgatcgacatcttcgtgcacggcgacctgaagcccggccagagccccgccatccccccccccctgcccaccgagcaggccagcagacccacccccgccagccccgccctggaggagaaggagggcgagaagaagaaggccgagaagaaggtgaccagcgagaccaagaagaaggagaaggaggacatcaagaagaagaagaagaagaagaagaagaagtag

SEQ ID NO: 89377 - DNA, 987 bp, Artificial Sequence
  derived and/or modified sequence
atgaccgagatcaccgccgagggcaacgccagcaccaccaccaccgtgatcgacagcaagaacggcagcgtgcccaagagccccggcaaggtgctgaagagaaccgtgaccgaggacatcgtgaccaccttcagcagccccgccgcctggctgctggtgatcgccctgatcatcacctggagcgccgtggccatcgtgatgttcgacctggtggactacaagaacttcagcgccagcagcatcgccaagatcggcagcgaccccctgaagctggtgagagacgccatggaggagaccaccgactggatctacggcttcttcagcctgctgagcgacatcatcagcagcgaggacgaggaggacgacgacggcgacgaggacaccgacaagggcgagatcgacgagccccccctgagaaagaaggagatccacaaggacaagaccgagaagcaggagaagcccgagagaaagatccagaccaaggtgacccacaaggagaaggagaagggcaaggagaaggtgagagagaaggagaagcccgagaagaaggccacccacaaggagaagatcgagaagaaggagaagcccgagaccaagaccctggccaaggagcagaagaaggccaagaccgccgagaagagcgaggagaagaccaagaaggaggtgaagggcggcaagcaggagaaggtgaagcagaccgccgccaaggtgaaggaggtgcagaagacccccagcaagcccaaggagaaggaggacaaggagaaggccgccgtgagcaagcacgagcagaaggaccagtacgccttctgcagatacatgatcgacatcttcgtgcacggcgacctgaagcccggccagagccccgccatccccccccccctgcccaccgagcaggccagcagacccacccccgccagccccgccctggagggcgacaaggccagcaaggagaagaagagaaagatgaagagaatgagcgagaagtag

SEQ ID NO: 89378 - DNA, 894 bp, Artificial Sequence
  derived and/or modified sequence
atgaccgagatcaccgccgagggcaacgccagcaccaccaccaccgtgatcgacagcaagaacggcagcgtgcccaagagccccggcaaggtgctgaagagaaccgtgaccgaggacatcgtgaccaccttcagcagccccgccgcctggctgctggtgatcgccctgatcatcacctggagcgccgtggccatcgtgatgttcgacctggtggactacaagaacttcagcgccagcagcatcgccaagatcggcagcgaccccctgaagctggtgagagacgccatggaggagaccaccgactggatctacggcttcttcagcctgctgagcgacatcatcagcagcgaggacgaggaggacgacgacggcgacgaggacaccgacaagggcgagatcgacgagccccccctgagaaagaaggagatccacaaggacaagaccgagaagcaggagaagcccgagagaaagatccagaccaaggtgacccacaaggagaaggagaagggcaaggagaaggtgagagagaaggagaagcccgagaagaaggccacccacaaggagaagatcgagaagaaggagaagcccgagaccaagaccctggccaaggagcagaagaaggccaagaccgccgagaagagcgaggagaagaccaagaaggaggtgaagggcggcaagcaggagaaggtgaagcagaccgccgccaaggtgaaggaggtgcagaagacccccagcaagcccaaggagaaggaggacaaggagaaggccgccgtgagcaagcacgagcagaagggccagagccccgccatccccccccccctgcccaccgagcaggccagcagacccacccccgccagccccgccctggagggcaagtacttcttcttcagctag

SEQ ID NO: 89379 - DNA, 654 bp, Artificial Sequence
  derived and/or modified sequence
atggaggaaaccacagactggatctatggatttttcagcctgctgtccgacatcatatcctcagaagatgaagaggatgatgatggagatgaggacaccgacaagggcgagattgacgagccccccctgcggaaaaaggaaatccacaaagataagaccgagaagcaggagaaacccgaaagaaagatacagactaaggtcacacacaaggaaaaggagaaaggtaaggaaaaggttagggagaaggaaaagcccgagaagaaagcgacgcataaggagaagatcgagaaaaaagagaagcccgagacaaaaacactcgcgaaggaacagaaaaaggcaaagactgcagaaaagagcgaggagaaaactaaaaaggaggtgaaagggggaaagcaggagaaggtgaaacaaacggcagctaaagtgaaggaagtgcagaaaacaccgtcaaaaccaaaggagaaagaagataaagaaaaagccgcagtctctaaacacgaacagaaagggttccccgggccgggcatccgcaattcctcatactattgccagtatattaagggccaaatcaatgcttggaacgatctgcgcactagtcttctccccattccctatctcagctgtggaaagatgtgctctaatttcaataattag

SEQ ID NO: 89380 - DNA, 1038 bp, Artificial Sequence
  derived and/or modified sequence
atcgtagaaatatacccacagggaaatgcgtctacaaccacgacagtgatcgactccaaaaatggctcggtgccgaaaagccctggaaaggtattgaaaagaaccgtgaccgaagatatagtaaccacgttctcatcccctgccgcatggctcctggtcatcgctctgattatcacgtggagcgcagtggccatcgtcatgttcgatctggttgactataaaaatttcagcgcatcctcaatagctaagattggcagcgatcccctgaaactagtcagagatgccatggaagagacaaccgattggatctacggattctttagcctcctgtccgatatcatcagctcagaggatgaagaggatgacgatggcgatgaagacacagacaagggggaaatcgacgagccccccctgcgcaagaaagaaatccataaggataagacggagaaacaggaaaagccagaaaggaaaatccaaactaaggtcactcacaaagaaaaggagaaggggaaagaaaaagtaagggaaaaggaaaagcccgaaaagaaagccacccacaaggaaaagatcgagaagaaggagaaacccgagactaaaactttagcaaaggaacagaaaaaagctaaaacagccgagaaaagcgaagagaaaacaaaaaaagaagtgaaaggagggaagcaggaaaaggtgaagcagactgctgcaaaagtgaaagaagtgcagaaaaccccttcaaagccaaaagagaaggaggataaggagaaggccgcagtctccaagcatgagcaaaaagatcagtatgccttctgcagatacatgatagacatatttgtacacggcgatctgaagcctgggcaatcacccgccattccacctccccttcctaccgaacaggcatcccgcccaactccagcgtcccctgcactagaggagaaggagggtgaaaagaaaaaggcagagaaaaaggtgactagcgaaactaagaaaaaagaaaaggaagatattaaaaaaaagaaaaaaaaaaaaaaaaaaaagtag

SEQ ID NO: 89381 - DNA, 987 bp, Artificial Sequence
  derived and/or modified sequence
atgactgagattacagccgagggaaacgcatcaaccaccactacagtcatcgacagtaaaaatgggtctgtgcccaagtcgccggggaaggttttaaaacggacagtgaccgaggatattgttacgacgttcagctctcccgctgcttggctcttagtcatcgccctgatcattacctggtctgccgtcgcaatcgtgatgttcgacctcgtggactacaagaatttttccgcctcctccattgcaaagattggtagtgatcctcttaagttggtccgcgacgcgatggaagaaaccacagattggatatacggtttcttttctttgctgagtgacatcatttccagcgaggacgaagaggacgacgacggtgatgaggataccgacaagggggaaatcgacgagcctccactgcggaagaaggaaattcacaaggacaagactgagaagcaagagaaacccgagaggaaaatacaaacaaaagttacccacaaggagaaagagaaaggaaaggaaaaagttcgggaaaaggagaaacccgaaaaaaaggcgactcataaagaaaagatcgagaagaaagagaaacccgagacgaagacgctggctaaggaacaaaaaaaggcaaaaacagctgagaagtcagaagaaaagactaaaaaggaagtgaagggcggaaagcaagaaaaagtcaagcaaactgcggctaaagtcaaggaagttcagaagaccccgagtaagccaaaggagaaagaggataaagagaaggcagctgttagcaagcacgagcagaaggaccagtacgctttctgcaggtacatgatcgatatttttgtacacggagacttgaaacccggtcagtcacctgcaatcccgccacccttacccactgagcaagcctcgaggccgactcctgccagcccagccctggagggagataaagcgtctaaggagaagaaaaggaaaatgaaaaggatgtccgaaaaatag

SEQ ID NO: 89382 - DNA, 894 bp, Artificial Sequence
  derived and/or modified sequence
atgaccgaaattaccgcagagggtaacgcgagcactaccacgactgtcatcgactctaagaatgggtcagtaccaaagtctcctgggaaagtgctcaaacgaacagtcaccgaagatatagtcactaccttcagctcaccagccgcttggctactggtgatcgctctcatcattacatggtctgcggtcgctatcgtgatgtttgaccttgttgactacaagaacttcagcgcctcctcaattgccaagatcgggtcggatccattgaagctggtccgggacgccatggaggaaacgaccgattggatctatggctttttctcactcctaagcgacatcattagcagtgaggatgaagaagatgacgacggggatgaagacaccgataagggagaaatcgatgagcctccactgcggaagaaggagattcacaaggacaagaccgagaagcaggaaaagccggagaggaagatccaaacaaaagtgacccataaagagaaagaaaaaggtaaggagaaagtgcgtgaaaaggagaaacccgagaaaaaggcaacgcataaagagaaaatagaaaagaaggagaagcccgaaaccaagaccttggccaaggaacagaaaaaagcgaagaccgccgagaaaagcgaggagaagacaaaaaaagaggtgaagggagggaagcaggaaaaagtgaagcagaccgccgcgaaagttaaggaagtccaaaagactccatctaaacccaaggaaaaggaggacaaagagaaggccgcagtctctaaacacgaacagaagggtcaatctcctgcgattcccccacctctgccgactgagcaggcgagtagacccacacctgccagccccgcactggaggggaagtacttcttcttttcgtag

SEQ ID NO: 89383 - DNA, 654 bp, Artificial Sequence
  derived and/or modified sequence
atggaggagaccacagactggatctacggcttcttcagcctgctgagtgacatcatcagcagtgaagatgaagaagatgatgatggagatgaggacacagacaagggggagattgatgagccccccctgaggaagaaggagatccacaaggacaagacagagaagcaggagaagccagagaggaagatccagaccaaggtgacccacaaggagaaggagaagggcaaggagaaggtgcgggagaaggagaagccagagaagaaggccacccacaaggagaagattgagaagaaggagaagccagagaccaagaccctggccaaggagcagaagaaggccaagacagctgagaagtctgaggagaagaccaagaaggaggtgaagggcggcaagcaggagaaggtgaagcagacagctgccaaggtgaaggaggtgcagaagacccccagcaagcccaaggagaaggaggacaaggagaaggctgctgtgtccaagcatgagcagaagggcttccctggccctggcatccggaacagcagctactactgccagtacatcaagggccagatcaatgcctggaatgacctgcggaccagcctgctgcccatcccctacctgagctgtgggaagatgtgcagcaacttcaacaactag

SEQ ID NO: 89384 - DNA, 1038 bp, Artificial Sequence
  derived and/or modified sequence
attgtggagatctacccccagggcaatgccagcaccaccaccaccgtgattgacagcaagaatggatctgtgcccaagagccctgggaaggtgctgaagaggacagtgacagaggacatcgtgaccaccttcagcagccctgctgcctggctgctggtgattgccctgatcatcacctggagcgctgtggccatcgtgatgtttgacctggtggactacaagaacttcagcgccagcagcatcgccaagattggaagtgaccccctgaagctggtgagagatgccatggaggagaccacagactggatctacggcttcttcagcctgctgagtgacatcatcagcagtgaagatgaggaggatgatgatggagatgaggacacagacaagggggagattgatgagccccccctgaggaagaaggagatccacaaggacaagacagagaagcaggagaagccagagaggaagatccagaccaaggtgacccacaaggagaaggagaagggcaaggagaaggtgcgggagaaggagaagccagagaagaaggccacccacaaggagaagattgagaagaaggagaagccagagaccaagaccctggccaaggagcagaagaaggccaagacagctgagaagtctgaggagaagaccaagaaggaggtgaagggcggcaagcaggagaaggtgaagcagacagctgccaaggtgaaggaggtgcagaagacccccagcaagcccaaggagaaggaggacaaggagaaggctgctgtgtccaagcatgagcagaaggaccagtatgccttctgccgctacatgattgacatctttgtgcatggagacctgaagccaggccagagccctgccatccccccacccctgcccacagagcaggccagccggcccaccccagccagccctgccctggaggagaaggagggggagaagaagaaggccgagaagaaggtgaccagcgagaccaagaagaaggagaaggaggacatcaagaagaagaagaagaagaagaagaagaagtag

SEQ ID NO: 89385 - DNA, 987 bp, Artificial Sequence
  derived and/or modified sequence
atgacagagatcacagctgagggcaatgccagcaccaccaccaccgtgattgacagcaagaatggatctgtgcccaagagccctgggaaggtgctgaagaggacagtgacagaggacatcgtgaccaccttcagcagccctgctgcctggctgctggtgattgccctgatcatcacctggagcgctgtggccatcgtgatgtttgacctggtggactacaagaacttcagcgccagcagcatcgccaagattggaagtgaccccctgaagctggtgagagatgccatggaggagaccacagactggatctacggcttcttcagcctgctgagtgacatcatcagcagtgaagatgaggaggatgatgatggagatgaggacacagacaagggggagattgatgagccccccctgaggaagaaggagatccacaaggacaagacagagaagcaggagaagccagagaggaagatccagaccaaggtgacccacaaggagaaggagaagggcaaggagaaggtgcgggagaaggagaagccagagaagaaggccacccacaaggagaagattgagaagaaggagaagccagagaccaagaccctggccaaggagcagaagaaggccaagacagctgagaagtctgaggagaagaccaagaaggaggtgaagggcggcaagcaggagaaggtgaagcagacagctgccaaggtgaaggaggtgcagaagacccccagcaagcccaaggagaaggaggacaaggagaaggctgctgtgtccaagcatgagcagaaggaccagtatgccttctgccgctacatgattgacatctttgtgcatggagacctgaagccaggccagagccctgccatccccccacccctgcccacagagcaggccagccggcccaccccagccagccctgccctggagggggacaaggccagcaaggagaagaagaggaagatgaagaggatgtctgagaagtag

SEQ ID NO: 89386 - DNA, 894 bp, Artificial Sequence
  derived and/or modified sequence
atgacagagatcacagctgagggcaatgccagcaccaccaccaccgtgattgacagcaagaatggatctgtgcccaagagccctgggaaggtgctgaagaggacagtgacagaggacatcgtgaccaccttcagcagccctgctgcctggctgctggtgattgccctgatcatcacctggagcgctgtggccatcgtgatgtttgacctggtggactacaagaacttcagcgccagcagcatcgccaagattggaagtgaccccctgaagctggtgagagatgccatggaggagaccacagactggatctacggcttcttcagcctgctgagtgacatcatcagcagtgaagatgaggaggatgatgatggagatgaggacacagacaagggggagattgatgagccccccctgaggaagaaggagatccacaaggacaagacagagaagcaggagaagccagagaggaagatccagaccaaggtgacccacaaggagaaggagaagggcaaggagaaggtgcgggagaaggagaagccagagaagaaggccacccacaaggagaagattgagaagaaggagaagccagagaccaagaccctggccaaggagcagaagaaggccaagacagctgagaagtctgaggagaagaccaagaaggaggtgaagggcggcaagcaggagaaggtgaagcagacagctgccaaggtgaaggaggtgcagaagacccccagcaagcccaaggagaaggaggacaaggagaaggctgctgtgtccaagcatgagcagaagggccagagccctgccatccccccacccctgcccacagagcaggccagccggcccaccccagccagccctgccctggagggcaagtacttcttcttctcctag

SEQ ID NO: 89387 - DNA, 654 bp, Artificial Sequence
  derived and/or modified sequence
atggaggagaccaccgactggatctacggcttcttcagcctgctgtctgacataatctcttctgaagacgaggaagatgacgatggagatgaggacacagacaagggggaaattgacgaaccacccctgagaaagaaagagatccataaggataaaaccgagaaacaggagaagccggagagaaagattcagacaaaagttacacacaaggaaaaggaaaagggcaaagagaaggtgagagagaaggagaagccagaaaaaaaggcaacacacaaggaaaaaatcgagaagaaggaaaagccggagactaaaacgttggctaaggagcagaagaaggctaagacagcagaaaagtccgaagaaaaaaccaagaaggaagtgaaaggggggaaacaggagaaagtgaagcagacagctgcaaaagtgaaagaggtgcagaaaaccccttcgaaaccaaaagagaaggaggacaaggagaaggccgcagtgtccaagcatgaacagaaagggttccccggacccggcatccgcaactccagctactactgccagtatataaaagggcagattaacgcttggaacgacctgcggacttcgctactgccgatcccatacctaagctgtggaaaaatgtgtagcaacttcaataattag

SEQ ID NO: 89388 - DNA, 1038 bp, Artificial Sequence
  derived and/or modified sequence
atcgtggagatctacccccagggcaacgccagcaccaccaccaccgtcattgattctaaaaacggcagtgttcccaaatctcccgggaaggttctgaagagaactgtgacggaggatatcgtcactacctttagcagccctgccgcctggctcttagtgatcgctcttattatcacctggagtgccgtggccattgttatgttcgatctggtggactataaaaacttctccgcaagctcgatagcgaaaattggttctgaccccttaaagctggtgagggatgccatggaggaaacaacagattggatttacggttttttttcattgctctccgacatcatttccagcgaggatgaggaggatgacgacggcgacgaagacacagacaaaggcgagatcgacgagcctccactgagaaagaaagagattcataaagataagaccgaaaagcaggaaaaacctgaacgaaagattcagacgaaggtgacgcataaagaaaaggagaaaggcaaagagaaagtgcgggaaaaagagaagccagagaagaaggctactcataaagaaaagattgagaaaaaggagaagcctgaaacaaagacactcgccaaggagcagaaaaaagcgaagacagccgagaaatctgaggagaaaaccaaaaaagaagtcaaaggcggaaaacaggagaaagtcaaacagaccgccgccaaagtaaaggaggtgcaaaaaaccccctcgaaacctaaggaaaaagaagacaaagaaaaggctgccgtgtctaagcacgagcagaaagaccaatatgctttttgtagatatatgatagacatcttcgtccacggtgatctgaagcccggtcagagcccagccatcccgcccccgttgcctactgagcaggcatctaggcccactcccgccagtcccgccctggaggagaaagagggagagaagaaaaaagctgaaaagaaggtcacttctgagacaaagaaaaaagagaaggaggacatcaaaaagaagaagaagaagaaaaagaaaaaatag

SEQ ID NO: 89389 - DNA, 987 bp, Artificial Sequence
  derived and/or modified sequence
atgaccgagatcaccgccgagggcaacgccagcaccaccaccaccgtgatcgactccaaaaatggttctgttcctaaatccccgggaaaagtcttaaaacgaacagtgactgaggacatcgtcaccaccttctctagcccagccgcttggttgctggtcatcgccttgattattacctggagcgccgtggcgatcgtgatgtttgatctggtagactacaagaatttctctgccagtagcatcgctaaaataggatctgatcctctcaaattagtgcgggacgctatggaagagacgacggactggatctacggatttttctcgctgctatccgatatcatcagctccgaagatgaggaagacgacgatggagatgaggacactgacaagggcgaaatcgatgagccgccactgagaaaaaaggaaattcataaagacaagactgagaagcaagaaaagccagaaagaaagatccaaacgaaagtcacacataaggaaaaagaaaaaggcaaagagaaggtgagagagaaggagaagcctgagaagaaggctactcacaaggagaaaattgagaaaaaagagaaacctgagaccaaaacactggccaaggagcagaaaaaggcaaagaccgccgagaagagcgaagagaagactaagaaagaagtgaaggggggaaaacaggagaaagtcaagcaaaccgccgccaaggtaaaagaagtacagaagactccttctaagcccaaggaaaaggaggacaaagaaaaggctgctgtctccaagcacgagcaaaaggaccagtacgctttttgccgttatatgatcgatatcttcgtacacggcgatctcaagcctggacagagtcccgccatccctccaccccttccgactgagcaggcgagccgccctaccccagccagtcccgccttggagggcgataaggcctccaaagagaagaagaggaagatgaagcggatgtccgagaaatag

SEQ ID NO: 89390 - DNA, 894 bp, Artificial Sequence
  derived and/or modified sequence
atgaccgagatcaccgccgagggcaacgccagcaccaccaccaccgtgattgactctaagaatggcagcgtacctaagtcccccgggaaggtgttgaaaaggaccgtgaccgaagatattgtgaccactttctcctctcctgccgcatggctgctcgtgatagctttaattatcacctggtctgcggtggctattgtgatgttcgatctggttgattacaaaaacttttctgcatctagtatagctaaaattggctcagatcctcttaaactcgtccgtgatgcaatggaagagaccacggattggatttacggattttttagtttactgtccgatatcatcagctcagaagatgaagaggacgacgacggagacgaggataccgataagggcgagatcgatgagcctcccttaaggaagaaagagatccataaggacaagaccgaaaaacaggaaaaacctgagcggaagattcagaccaaagtgactcataaggagaaagagaaaggtaaggagaaggtgagagagaaagaaaaaccagaaaagaaggccacacataaagagaagatcgagaaaaaggaaaaacccgaaactaaaaccctggcaaaagagcagaaaaaagccaagaccgccgagaagagtgaagaaaaaactaagaaggaggtcaaaggtggtaagcaggaaaaagtgaagcaaaccgctgctaaagtaaaagaagtgcagaagactccttccaaacccaaagagaaagaggacaaggaaaaagctgcagtatccaagcatgaacaaaagggtcagagcccagcgatccctcctcctcttccgaccgagcaggccagcagaccaacccccgcctcacctgcactggaaggtaaatacttctttttctcctag

SEQ ID NO: 89391 - DNA, 654 bp, Artificial Sequence
  derived and/or modified sequence
atggaagaaacaactgattggatctatggattcttctcgctgctcagcgacataatttcctccgaagatgaagaggacgatgacggggatgaagatactgataaaggcgaaatagacgagccgcctctccgtaaaaaagaaatccataaggacaagacagagaagcaggagaagcccgagcggaagattcagacgaaggtcacacacaaggaaaaggaaaaaggtaaagagaaggtccgcgagaaagaaaagcctgaaaaaaaagctacgcacaaggagaaaattgaaaagaaagagaagcctgagacgaagaccctcgccaaggagcagaagaaggccaagacagccgaaaaaagtgaggagaagacaaagaaggaggtcaaggggggaaaacaggagaaggttaaacaaaccgcagcgaaggtgaaggaagttcagaaaacacccagcaaaccgaaagagaaggaggataaggaaaaggccgctgtgagtaaacacgagcaaaaaggattcccaggaccaggaatcaggaatagcagctattactgtcagtatattaaaggccagatcaatgcctggaacgacctgcgtacttcactgctgccaataccatacctgagctgcgggaagatgtgctccaatttcaacaactag

SEQ ID NO: 89392 - DNA, 1038 bp, Artificial Sequence
  derived and/or modified sequence
attgtagagatatatccacagggtaacgcctcaactaccactaccgtgatcgattccaaaaatggatctgtgcccaagtcccctggaaaagtgctgaagcggaccgtgactgaagatatagtcaccacattcagctcacccgcagcctggcttttggttatagcactcattataacctggtccgccgtcgctattgtgatgttcgacctggtggattataagaatttcagtgcgagctcgattgccaagattggatctgacccactgaaattggtcagagacgctatggaggaaacaaccgactggatatacggctttttctcgctcctaagcgatataataagctcagaggatgaggaagacgatgatggcgatgaggacacagacaagggagaaatcgacgagcccccactgaggaagaaggaaattcacaaggataaaacggaaaaacaggagaaaccggagaggaaaattcaaaccaaagtgacgcacaaggagaaagagaaaggaaaggaaaaggtgcgggagaaagaaaagcccgaaaaaaaagctacacataaagaaaagatcgagaaaaaagagaagcctgagacaaaaaccctggcgaaagaacaaaagaaagccaaaacagccgaaaagtcagaagaaaaaaccaaaaaggaggtgaagggcggtaagcaggagaaagtcaaacaaaccgccgctaaagtgaaggaagtacagaaaacccctagtaagcccaaggaaaaagaggataaggagaaggctgcagttagtaaacacgaacagaaagatcagtatgctttctgccgttatatgatcgacatctttgttcatggcgatctcaagcctgggcagtctccagcaatacctccacccctgccgacggagcaggcttccagaccaactccggcatctcccgctctcgaggagaaggaaggcgagaagaagaaagccgaaaagaaggttaccagtgaaacaaagaaaaaggaaaaggaggatataaagaagaaaaaaaagaaaaagaagaagaagtag

SEQ ID NO: 89393 - DNA, 987 bp, Artificial Sequence
  derived and/or modified sequence
atgaccgagattacagcggagggaaatgcttctaccacaaccacagttatcgatagtaagaacgggagcgtgcctaaaagtcccggtaaggtgcttaagcgaactgttactgaagacatagtgacaaccttttcgtccccagctgcttggctcctggtaattgccctcatcatcacttggagcgctgtggcaatcgtgatgtttgacttggtggactataaaaatttttctgcatcatctattgccaagattggttccgaccccctaaaactggtcagggacgctatggaagagaccacggattggatttacggatttttttctttgctgagtgatatcatctcatcggaggatgaggaagatgatgacggcgacgaagatacagataaaggcgagatcgacgaacccccattacgcaagaaggaaattcataaggataaaactgaaaaacaggagaaaccagaacggaagatccagacaaaggtcactcacaaagagaaagagaagggcaaggaaaaagtgcgagaaaaagaaaaacccgaaaagaaagctacccacaaggaaaagatagaaaagaaagaaaagccagagaccaaaacgctggctaaggagcaaaagaaggctaagaccgcagaaaaaagcgaggagaagaccaaaaaagaggttaaggggggtaaacaagagaaggtcaaacagaccgcggctaaggtgaaggaggtacaaaagaccccttctaagccaaaagaaaaagaggacaaggagaaggctgccgtgtccaaacatgaacagaaggaccagtacgcattttgccggtatatgatcgatatattcgtgcatggggacctgaaacctggccaatcacctgctatccctcctcctctccctacagaacaggcatctagacccacccccgctagtcccgctctcgagggggacaaggcctccaaagaaaagaaacgtaaaatgaaacgtatgagtgaaaaatag

SEQ ID NO: 89394 - DNA, 894 bp, Artificial Sequence
  derived and/or modified sequence
atgaccgagattactgcagagggaaacgcttccaccaccaccactgtgattgacagcaagaacggaagcgtacccaagagccctgggaaagttttgaagcgtacagtaaccgaggatatagtgaccacctttagttcacccgctgcatggcttctcgttattgctctcatcattacatggagcgccgtggccatcgttatgttcgatctcgtcgattataaaaacttctcggcttcaagcatcgcgaagatcggaagtgatcctcttaagctcgtgcgcgacgccatggaagagacaactgattggatttacgggtttttttcgctcctgtcagatatcatatcaagcgaggacgaggaggacgacgatggcgacgaagatactgataaaggggaaatcgatgagcctcctctgcggaagaaagaaatccacaaggataaaacggagaagcaagaaaaacctgaacgaaagattcagacaaaggtgacacacaaggaaaaagaaaaaggcaaggagaaggtgagagagaaagaaaaacccgaaaagaaggcaacccacaaagaaaagattgaaaagaaagaaaaaccagagacaaagactctcgcaaaggaacagaaaaaggcgaagactgcagagaagtccgaagaaaaaaccaaaaaagaagtgaaggggggtaaacaagaaaaggtcaaacagacagcagctaaggtgaaagaagtccagaagacaccttctaagcctaaagaaaaggaggataaagagaaggccgcagtgagcaagcacgagcagaaaggacagagtcccgcaatccctccacctcttcctactgagcaggcttctagacccacacccgcatctccagccctcgagggaaaatatttttttttctcttag

SEQ ID NO: 89395 - DNA, 961 bp, Artificial Sequence
  derived and/or modified sequence
acttttacttttgacgaccaccatgactgagatcactgctgaaggaaatgcatctacaaccacaactgtgatagacagcaaaaatggatctgtgcccaaatcccccggaaaagtgctgaagaggacagtcacagaagacatagtgacgacgttcagctcccctgcagcctggcttctggtcattgccctgataatcacgtggtcagctgttgccatcgttatgtttgatttagtggattacaaaaacttttcagcaagctctattgccaagattggctcagatcctttaaaactggtacgtgatgctatggaggaaaccacggactggatctatggcttcttttctttgttatctgacatcatctcatctgaagatgaagaagatgatgatggtgacgaagatactgataaaggagaaatagatgagcctcccttgagaaaaaaagaaatacacaaagataagactgaaaaacaagagaaacctgaaaggaaaatacaaactaaagttacacacaaagaaaaagaaaaaggaaaagaaaaagtaagagaaaaagaaaaacctgaaaagaaagcaactcacaaggaaaaaattgagaaaaaagaaaaaccagaaacaaagacactggcgaaagaacagaagaaagctaagactgcagaaaagagtgaagaaaagactaaaaaggaagtgaaaggtggaaaacaggagaaagtgaagcaaacagctgcaaaagtaaaagaagtacagaaaacaccatcaaaacccaaagaaaaggaggacaaagagaaagcagctgtgtcaaagcatgaacagaaagggttcccaggtcctgggatcagaaactccagctattactgccagtacatcaaagggcaaatcaatgcatggaatgacctgaggactagcctccttcccattccctacctctcctgtgggaaaatgtgctccaatttcaacaactaa

SEQ ID NO: 89396 - DNA, 1035 bp, Artificial Sequence
  derived and/or modified sequence
atcgtggaaatctatcctcaaggaaatgcatctacaaccacaactgtgatagacagcaaaaatggatctgtgcccaaatcccccggaaaagtgctgaagaggacagtcacagaagacatagtgacgacgttcagctcccctgcagcctggcttctggtcattgccctgataatcacgtggtcagctgttgccatcgttatgtttgatttagtggattacaaaaacttttcagcaagctctattgccaagattggctcagatcctttaaaactggtacgtgatgctatggaggaaaccacggactggatctatggcttcttttctttgttatctgacatcatctcatctgaagatgaagaagatgatgatggtgacgaagatactgataaaggagaaatagatgagcctcccttgagaaaaaaagaaatacacaaagataagactgaaaaacaagagaaacctgaaaggaaaatacaaactaaagttacacacaaagaaaaagaaaaaggaaaagaaaaagtaagagaaaaagaaaaacctgaaaagaaagcaactcacaaggaaaaaattgagaaaaaagaaaaaccagaaacaaagacactggcgaaagaacagaagaaagctaagactgcagaaaagagtgaagaaaagactaaaaaggaagtgaaaggtggaaaacaggagaaagtgaagcaaacagctgcaaaagtaaaagaagtacagaaaacaccatcaaaacccaaagaaaaggaggacaaagagaaagcagctgtgtcaaagcatgaacagaaagatcagtatgcattctgtcgatatatgattgacatatttgtccatggggatttaaaaccaggacaaagcccagccattccacctcccttaccgacagaacaagcttccagacccactccggcatcacctgcccttgaagaaaaagaaggggaaaagaagaaggctgagaagaaagttacttctgaaacaaaaaagaaagaaaaagaagatatcaaaaagaaaaaaaaaaaaaaaaaaaaaaaa

SEQ ID NO: 89397 - DNA, 1006 bp, Artificial Sequence
  derived and/or modified sequence
acttttacttttgacgaccaccatgactgagatcactgctgaaggaaatgcatctacaaccacaactgtgatagacagcaaaaatggatctgtgcccaaatcccccggaaaagtgctgaagaggacagtcacagaagacatagtgacgacgttcagctcccctgcagcctggcttctggtcattgccctgataatcacgtggtcagctgttgccatcgttatgtttgatttagtggattacaaaaacttttcagcaagctctattgccaagattggctcagatcctttaaaactggtacgtgatgctatggaggaaaccacggactggatctatggcttcttttctttgttatctgacatcatctcatctgaagatgaagaagatgatgatggtgacgaagatactgataaaggagaaatagatgagcctcccttgagaaaaaaagaaatacacaaagataagactgaaaaacaagagaaacctgaaaggaaaatacaaactaaagttacacacaaagaaaaagaaaaaggaaaagaaaaagtaagagaaaaagaaaaacctgaaaagaaagcaactcacaaggaaaaaattgagaaaaaagaaaaaccagaaacaaagacactggcgaaagaacagaagaaagctaagactgcagaaaagagtgaagaaaagactaaaaaggaagtgaaaggtggaaaacaggagaaagtgaagcaaacagctgcaaaagtaaaagaagtacagaaaacaccatcaaaacccaaagaaaaggaggacaaagagaaagcagctgtgtcaaagcatgaacagaaagatcagtatgcattctgtcgatatatgattgacatatttgtccatggggatttaaaaccaggacaaagcccagccattccacctcccttaccgacagaacaagcttccagacccactccggcatcacctgcccttgaaggtgacaaagcatcaaaagaaaaaaaaaggaaaatgaaaagaatgagtgagaaa

SEQ ID NO: 89398 - DNA, 1658 bp, Artificial Sequence
  derived and/or modified sequence
gaaacagccaggaaaacgaagagcccccaggttttgacacagaaccctccaccagagttctcaaatccccaaatactctgcaaagtgcaacttgacgggaacttttcaactgacttttacttttgacgaccaccatgactgagatcactgctgaaggaaatgcatctacaaccacaactgtgatagacagcaaaaatggatctgtgcccaaatcccccggaaaagtgctgaagaggacagtcacagaagacatagtgacgacgttcagctcccctgcagcctggcttctggtcattgccctgataatcacgtggtcagctgttgccatcgttatgtttgatttagtggattacaaaaacttttcagcaagctctattgccaagattggctcagatcctttaaaactggtacgtgatgctatggaggaaaccacggactggatctatggcttcttttctttgttatctgacatcatctcatctgaagatgaagaagatgatgatggtgacgaagatactgataaaggagaaatagatgagcctcccttgagaaaaaaagaaatacacaaagataagactgaaaaacaagagaaacctgaaaggaaaatacaaactaaagttacacacaaagaaaaagaaaaaggaaaagaaaaagtaagagaaaaagaaaaacctgaaaagaaagcaactcacaaggaaaaaattgagaaaaaagaaaaaccagaaacaaagacactggcgaaagaacagaagaaagctaagactgcagaaaagagtgaagaaaagactaaaaaggaagtgaaaggtggaaaacaggagaaagtgaagcaaacagctgcaaaagtaaaagaagtacagaaaacaccatcaaaacccaaagaaaaggaggacaaagagaaagcagctgtgtcaaagcatgaacagaaaggacaaagcccagccattccacctcccttaccgacagaacaagcttccagacccactccggcatcacctgcccttgaaggcaagtacttttttttttcttaaagatctctattgtagataaaatagaatgtagaggaacagcaacaacaaaaatagtcacaaagaaacagcaaaatccaatattttcttaaatacttttagtatgtctaaactatacttttcctaaaattgcaatttgcttcttttagaaaaccaaaaatgtccccttaagattctatattggtgaccctcagcttccagaaggatgcccactctagcactttgggaatcaagcaaaaaaatatagggacaaatagataaggctatgccttgcaactctgggagttttaccacaacttgatcaatttagtctctgaagaggctggtgccagatttgctgggtttgaatctgagctccaccttttcctagctttgtaaatttggaaagttatttaaattaactcttcatgagttttgccatctctaagatgatataagcagagcactgatctcctagcgttattgtgaggattgaaatatatatatacacacacactcacacacacacaaatactgttttatgtatatgtatagtttataagtactatatacaactggtggttaatactactaataattcttgaaaatatgatgtctcaagatcagctttgtaataaattttgctggaacgtt

SEQ ID NO: 89399 - protein, 26 aa, Artificial Sequence
  derived and/or modified sequence
  misc_feature (1)..(1): Xaa can be any naturally occurring amino acid
XIHKDKTEKQEKPERKIQTKEVGHSS

SEQ ID NO: 89400 - protein, 44 aa, Artificial Sequence
  derived and/or modified sequence
  misc_feature (1)..(1): Xaa can be any naturally occurring amino acid
XIHKDKTEKQEKPERKIQTKDWSANSSTIRTLKLTQLKPIYICT

SEQ ID NO: 89401 - DNA, 273 bp, Artificial Sequence
  derived and/or modified sequence
atggaggagaccaccgactggatctacggcttcttcagcctgctgagcgacatcatcagcagcgaggacgaggaggacgacgacggcgacgaggacaccgacaagggcgagatcgacgagccccccctgagaaagaaggagatccacaaggacaagaccgagaagcaggagaagcccgagagaaagatccagaccaaggactggagcgccaacagcagcaccatcagaaccctgaagctgacccagctgaagcccatctacatctgcacctag

SEQ ID NO: 89402 - DNA, 81 bp, Artificial Sequence
  derived and/or modified sequence
tgaatccacaaggacaagaccgagaagcaggagaagcccgagagaaagatccagaccaaggaggtgggccacagcagctag

SEQ ID NO: 89403 - DNA, 135 bp, Artificial Sequence
  derived and/or modified sequence
tgaatccacaaggacaagaccgagaagcaggagaagcccgagagaaagatccagaccaaggactggagcgccaacagcagcaccatcagaaccctgaagctgacccagctgaagcccatctacatctgcacctag

SEQ ID NO: 89404 - DNA, 504 bp, Artificial Sequence
  derived and/or modified sequence
atgaccgagatcaccgccgagggcaacgccagcaccaccaccaccgtgatcgacagcaagaacggcagcgtgcccaagagccccggcaaggtgctgaagagaaccgtgaccgaggacatcgtgaccaccttcagcagccccgccgcctggctgctggtgatcgccctgatcatcacctggagcgccgtggccatcgtgatgttcgacctggtggactacaagaacttcagcgccagcagcatcgccaagatcggcagcgaccccctgaagctggtgagagacgccatggaggagaccaccgactggatctacggcttcttcagcctgctgagcgacatcatcagcagcgaggacgaggaggacgacgacggcgacgaggacaccgacaagggcgagatcgacgagccccccctgagaaagaaggagatccacaaggacaagaccgagaagcaggagaagcccgagagaaagatccagaccaaggaggtgggccacagcagctag

SEQ ID NO: 89405 - DNA, 273 bp, Artificial Sequence
  derived and/or modified sequence
atggaggagactaccgattggatctacggcttctttagtctattgtctgatatcatatctagcgaagacgaagaggacgatgacggcgacgaagacacagacaaaggcgagatcgatgaaccaccactgaggaagaaagagattcacaaggataaaacagaaaagcaggagaagcctgaacggaagattcagacaaaggattggtctgcaaactcctccaccatcagaacactcaagctgactcagctgaaaccgatttacatttgcacttag

SEQ ID NO: 89406 - DNA, 81 bp, Artificial Sequence
  derived and/or modified sequence
taaatccacaaggacaagacggaaaagcaggagaaaccggagcgtaagatacagaccaaagaggtgggccacagttcctag

SEQ ID NO: 89407 - DNA, 135 bp, Artificial Sequence
  derived and/or modified sequence
tgaatccacaaagacaagactgagaagcaggaaaaacccgagcgcaaaatacagacaaaggactggtccgctaatagttctacgatcaggaccctgaagctaactcagctcaaaccaatttatatctgtacttag

SEQ ID NO: 89408 - DNA, 504 bp, Artificial Sequence
  derived and/or modified sequence
atgaccgaaatcaccgctgagggcaatgcctcaaccacaaccaccgttatagactctaaaaacggctcggtccccaagtcgcctggaaaggtgttgaaacgaacggtcactgaggacattgttacaacgttttcatctccagccgcatggctgctggtgatcgctctgattatcacctggagcgctgtggcaattgtcatgttcgacttggtggactacaagaactttagcgcaagtagtatcgcaaaaattggaagtgatccattgaagttggtcagggacgcgatggaggaaacaaccgactggatatatggattcttttccctcctgtccgacatcatctccagcgaggacgaggaagacgacgacggggacgaggacacggacaaaggagagatagatgagccacccctccgcaaaaaagagattcataaggataagactgaaaaacaggaaaagcccgagcgtaaaatccaaaccaaggaggtcggacactcatcgtag

SEQ ID NO: 89409 - DNA, 273 bp, Artificial Sequence
  derived and/or modified sequence
atggaggagaccacagactggatctacggcttcttcagcctgctgagtgacatcatcagcagtgaagatgaagaagatgatgatggagatgaggacacagacaagggggagattgatgagccccccctgaggaagaaggagatccacaaggacaagacagagaagcaggagaagccagagaggaagatccagaccaaggactggagcgccaacagcagcaccatccgcaccctgaagctgacccagctgaagcccatctacatctgcacctag

SEQ ID NO: 89410 - DNA, 81 bp, Artificial Sequence
  derived and/or modified sequence
tgaatccacaaggacaagacagagaagcaggagaagccagagaggaagatccagaccaaggaggtgggccacagcagctag

SEQ ID NO: 89411 - DNA, 135 bp, Artificial Sequence
  derived and/or modified sequence
tgaatccacaaggacaagacagagaagcaggagaagccagagaggaagatccagaccaaggactggagcgccaacagcagcaccatccgcaccctgaagctgacccagctgaagcccatctacatctgcacctag

SEQ ID NO: 89412 - DNA, 504 bp, Artificial Sequence
  derived and/or modified sequence
atgacagagatcacagctgagggcaatgccagcaccaccaccaccgtgattgacagcaagaatggatctgtgcccaagagccctgggaaggtgctgaagaggacagtgacagaggacatcgtgaccaccttcagcagccctgctgcctggctgctggtgattgccctgatcatcacctggagcgctgtggccatcgtgatgtttgacctggtggactacaagaacttcagcgccagcagcatcgccaagattggaagtgaccccctgaagctggtgagagatgccatggaggagaccacagactggatctacggcttcttcagcctgctgagtgacatcatcagcagtgaagatgaggaggatgatgatggagatgaggacacagacaagggggagattgatgagccccccctgaggaagaaggagatccacaaggacaagacagagaagcaggagaagccagagaggaagatccagaccaaggaggtgggccacagcagctag

SEQ ID NO: 89413 - DNA, 273 bp, Artificial Sequence
  derived and/or modified sequence
atggaggagaccaccgactggatctacggcttcttcagcctgctgtccgacatcatcagcagtgaagacgaggaagatgatgatggtgatgaagataccgataagggagagatcgatgagcctcctctgcgaaagaaagaaatccacaaagacaagacggagaagcaggagaaaccagaacgaaagatccagaccaaagactggagtgctaacagcagcactatccggactttaaaattgacccaactcaagccgatttatatctgtacctag

SEQ ID NO: 89414 - DNA, 81 bp, Artificial Sequence
  derived and/or modified sequence
tgaatccacaaggacaagaccgagaagcaggagaagcccgagcggaagattcaaacaaaagaagtggggcactccagctag

SEQ ID NO: 89415 - DNA, 135 bp, Artificial Sequence
  derived and/or modified sequence
tgaatccacaaggacaagaccgagaagcaggagaagcccgagcggaagatccagaccaaggattggtctgcaaacagtagcaccataagaacactgaagctgacacagctgaaaccaatctacatttgcacttag

SEQ ID NO: 89416 - DNA, 504 bp, Artificial Sequence
  derived and/or modified sequence
atgaccgagatcaccgccgagggcaacgccagcaccaccaccaccgtaatagatagtaaaaatggcagcgttccaaagagtcctgggaaagtccttaagcgcaccgtgactgaagatatagttacgacattctcctcccctgcagcgtggctcctggttatagccctcattattacctggagcgccgtggccatcgtgatgttcgatcttgtggactataagaacttcagtgctagttccattgcaaagatcggcagcgatccactgaagttggtccgcgacgcaatggaagaaactaccgactggatatatggttttttcagcttactttctgatattatttcaagtgaggatgaggaggacgacgatggggatgaggatactgataagggcgagatcgatgagcctcccctccgaaaaaaggagatccacaaggataagaccgaaaaacaagagaaacctgaacggaaaatccaaacaaaggaagtgggccactccagttag

SEQ ID NO: 89417 - DNA, 273 bp, Artificial Sequence
  derived and/or modified sequence
atggaagagaccactgactggatttatggtttcttttcccttctctcagatattatcagctcggaagacgaagaagatgatgatggagacgaggatacagataagggggagatcgatgaaccacccttgcgaaagaaggagatccataaagacaagacggagaagcaagagaagcccgagcggaagatccaaaccaaagattggtcggctaactcctctactatccgaacactcaagttgacccagctgaagcccatatacatttgtacttag

SEQ ID NO: 89418 - DNA, 81 bp, Artificial Sequence
  derived and/or modified sequence
tgaatccataaagataaaaccgagaaacaagagaagccagagcgcaaaattcagactaaggaagtgggtcactcctcctag

SEQ ID NO: 89419 - DNA, 135 bp, Artificial Sequence
  derived and/or modified sequence
tgaatccataaggataaaaccgagaaacaagagaagccagagcggaaaattcagacaaaagactggtccgccaactcatccaccattcgcaccttgaaacttactcagctgaaaccgatttatatatgtacatag

SEQ ID NO: 89420 - DNA, 504 bp, Artificial Sequence
  derived and/or modified sequence
atgacagagattactgccgagggaaacgcttccactaccacgactgtgatcgactctaagaacggttccgttcccaaaagcccaggcaaagttctcaaacgcaccgtgaccgaggatatagtcacgacctttagcagccccgctgcttggctgttggttatcgcccttataattacgtggtctgccgttgctatcgtcatgtttgacctggtggattacaagaacttttccgctagttctatagccaaaataggaagcgatcctctgaaacttgtccgggacgcaatggaagagactacagactggatttacggatttttctctctcctgagcgatattatttcttccgaggacgaggaagatgacgacggtgatgaggatacggacaagggcgagatcgatgagccgcctctcagaaagaaggaaatacacaaagataagacggaaaaacaggagaaacctgaaaggaagatacagaccaaggaggttggacacagctcctag

SEQ ID NO: 89421 - DNA, 735 bp, Artificial Sequence
  derived and/or modified sequence
gcagaggagaggcaaagttcaacaggacaacaaagaagcagcagaaacagccaggaaaacgaagagcccccaggttttgacacagaaccctccaccagagttctcaaatccccaaatactctgcaaagtgcaacttgacgggaacttttcaactgacttttacttttgacgaccaccatgactgagatcactgctgaaggaaatgcatctacaaccacaactgtgatagacagcaaaaatggatctgtgcccaaatcccccggaaaagtgctgaagaggacagtcacagaagacatagtgacgacgttcagctcccctgcagcctggcttctggtcattgccctgataatcacgtggtcagctgttgccatcgttatgtttgatttagtggattacaaaaacttttcagcaagctctattgccaagattggctcagatcctttaaaactggtacgtgatgctatggaggaaaccacggactggatctatggcttcttttctttgttatctgacatcatctcatctgaagatgaagaagatgatgatggtgacgaagatactgataaaggagaaatagatgagcctcccttgagaaaaaaagaaatacacaaagataagactgaaaaacaagagaaacctgaaaggaaaatacaaactaaagattggtcagccaattcttcaacaatcagaacattgaagctcactcagttgaaacctatttatatttgtacttag

SEQ ID NO: 89422 - DNA, 766 bp, Artificial Sequence
  derived and/or modified sequence
aaatacacaaagataagactgaaaaacaagagaaacctgaaaggaaaatacaaactaaagaagttggacacagctcttgagtacggattgactaagcgaaccatgactgaactggctctgtgtttctatctgctgaaggttaaacagaaactcaactggttccacaccatttgggtccctgctgtttttttcttgcagactgtgctattaatttaataacagtgctgctggagtggcggtagtaatgtagatggcaccatttgcattttggacctggctatattagaattctgatgtcaaagaccgagcagtgggctgtagagtaggtttattaaactagcaagtcttccataattaagacagtgaatttggctgaagtctaaaataaatttctcaaagactgagctggagattatcaacctgaatatatttcttgagtagaccaaatatgttttgtaaaagtaactatttcttaagaaagtgaaagtagagcttcagttgctccacactgagctggaaatcagagagagcttatgttttccacagtttttctgtgtgaatatgaacaaaagatttcactttattgcttagtttcccgtctgtaaatggggtagactaatgcctgctctttattctcaaatagttcagtgaaaataaatgttttgctttacaactgctcttgtatgtggataaatactgttttctgtatgccatgttccatgtcagttatggttgtatgtgatggatagttaggaatttaagttat

SEQ ID NO: 89423 - DNA, 776 bp, Artificial Sequence
  derived and/or modified sequence
aaatacacaaagataagactgaaaaacaagagaaacctgaaaggaaaatacaaactaaagattggtcagccaattcttcaacaatcagaacattgaagctcactcagttgaaacctatttatatttgtacttaggaaactaatgtctccttactgttctctttccttttttcggttcttaattcctttgatcacagaagttggacacagctcttgagtacggattgactaagcgaaccatgactgaactggctctgtgtttctatctgctgaaggttaaacagaaactcaactggttccacaccatttgggtccctgctgtttttttcttgcagactgtgctattaatttaataacagtgctgctggagtggcggtagtaatgtagatggcaccatttgcattttggacctggctatattagaattctgatgtcaaagaccgagcagtgggctgtagagtaggtttattaaactagcaagtcttccataattaagacagtgaatttggctgaagtctaaaataaatttctcaaagactgagctggagattatcaacctgaatatatttcttgagtagaccaaatatgttttgtaaaagtaactatttcttaagaaagtgaaagtagagcttcagttgctccacactgagctggaaatcagagagagcttatgttttccacagtttttctgtgtgaatatgaacaaaagatttcactttattgcttagtttcccgtctgtaaatggggtagactaatgcctgctctttattctcaaa

SEQ ID NO: 89424 - DNA, 1292 bp, Artificial Sequence
  derived and/or modified sequence
gtttccagggggagaactctgcagaggagaggcaaagttcaacaggacaacaaagaagcagcagaaacagccaggaaaacgaagagcccccaggttttgacacagaaccctccaccagagttctcaaatccccaaatactctgcaaagtgcaacttgacgggaacttttcaactgacttttacttttgacgaccaccatgactgagatcactgctgaaggaaatgcatctacaaccacaactgtgatagacagcaaaaatggatctgtgcccaaatcccccggaaaagtgctgaagaggacagtcacagaagacatagtgacgacgttcagctcccctgcagcctggcttctggtcattgccctgataatcacgtggtcagctgttgccatcgttatgtttgatttagtggattacaaaaacttttcagcaagctctattgccaagattggctcagatcctttaaaactggtacgtgatgctatggaggaaaccacggactggatctatggcttcttttctttgttatctgacatcatctcatctgaagatgaagaagatgatgatggtgacgaagatactgataaaggagaaatagatgagcctcccttgagaaaaaaagaaatacacaaagataagactgaaaaacaagagaaacctgaaaggaaaatacaaactaaagaagttggacacagctcttgagtacggattgactaagcgaaccatgactgaactggctctgtgtttctatctgctgaaggttaaacagaaactcaactggttccacaccatttgggtccctgctgtttttttcttgcagactgtgctattaatttaataacagtgctgctggagtggcggtagtaatgtagatggcaccatttgcattttggacctggctatattagaattctgatgtcaaagaccgagcagtgggctgtagagtaggtttattaaactagcaagtcttccataattaagacagtgaatttggctgaagtctaaaataaatttctcaaagactgagctggagattatcaacctgaatatatttcttgagtagaccaaatatgttttgtaaaagtaactatttcttaagaaagtgaaagtagagcttcagttgctccacactgagctggaaatcagagagagcttatgttttccacagtttttctgtgtgaatatgaacaaaagatttcactttattgcttagtttcccgtctgtaaatggggtagactaatgcctgctctttattctcaaatagttcagtgaaaataaatgttttgctttac

SEQ ID NO: 89425 - protein, 205 aa, Artificial Sequence
  derived and/or modified sequence
MTDSATANGDDRDPEIELFVKAGIDGESIGNCPFSQRLFMILWLKGVVFNVTTVDLKRKPADLHNLAPGTHPPFLTFNGDVKTDVNKIEEFLEETLTPEKYPKLAAKHRESNTAGIDIFSKFSAYIKNTKQQNNAALERGLTKALKKLDDYLNTPLPEEIDANTCGEDKGSRRKFLDGDELTLADCNLLPKLHVVKEQVPLKGMI

SEQ ID NO: 89426 - DNA, 618 bp, Artificial Sequence
  derived and/or modified sequence
atgaccgacagcgccaccgccaacggcgacgacagagaccccgagatcgagctgttcgtgaaggccggcatcgacggcgagagcatcggcaactgccccttcagccagagactgttcatgatcctgtggctgaagggcgtggtgttcaacgtgaccaccgtggacctgaagagaaagcccgccgacctgcacaacctggcccccggcacccacccccccttcctgaccttcaacggcgacgtgaagaccgacgtgaacaagatcgaggagttcctggaggagaccctgacccccgagaagtaccccaagctggccgccaagcacagagagagcaacaccgccggcatcgacatcttcagcaagttcagcgcctacatcaagaacaccaagcagcagaacaacgccgccctggagagaggcctgaccaaggccctgaagaagctggacgactacctgaacacccccctgcccgaggagatcgacgccaacacctgcggcgaggacaagggcagcagaagaaagttcctggacggcgacgagctgaccctggccgactgcaacctgctgcccaagctgcacgtggtgaaggagcaggtgcccctgaagggcatgatctag

SEQ ID NO: 89427 - DNA, 1990 bp, Artificial Sequence
  derived and/or modified sequence
gcagcccggcacttgttgctcccacgacctgttgtcattcccttaacccggctttccccgtggccccccgcctcctcccggcttcgctccttttcatgtgagcatctgggacactgatctctcagaccccgctgctcgggctggagaatagatggttttgtgaaaaattaaacaccgccctgaagaggagccccgctgggcagcggcaggagcgcagagtgctggcccaggtgctgcagaggtggcgcctccccggcccgggacggtagccccgggcgccaacggcatgacagactcggcgacagctaacggggacgacagggaccccgagatcgagctctttgtgaaggctggaatcgatggagaaagcatcggcaactgtcctttctctcagcgcctcttcatgatcctctggctgaaaggagtcgtgttcaatgtcaccactgtggatctgaaaagaaagccagctgacctgcacaacctagcccccggcacgcacccgcccttcctgaccttcaacggggacgtgaagacagacgtcaataagatcgaggagttcctggaggagaccttgacccctgaaaagtaccccaaactggctgcaaaacaccgggaatccaacacagcgggcatcgacatcttttccaagttttctgcctacatcaaaaataccaagcagcagaacaatgctgctcttgaaagaggcctaaccaaggctctaaagaaattggatgactacctgaacacccctctaccagaggagattgacgccaacacttgtggggaagacaaggggtcccggcgcaagttcctggatggggatgagctgaccctggctgactgcaatctgttgcccaagctccatgtggtcaaggaacaagtaccactgaaagggatgatataattccagctcagtcacactgtgtcagagtgatacaatgcaaagatcaggagacccgagttccggtcctgtatttgctgccaactagcagcatgagctgaggcacatcatttaatctttttggaattcatttttctcatgcctagaagaacagaagtggattgtattccttcttgccttcttttcctttcttctttccctccttctttccttttctcttgctcaaacatgtattcactaccactcaaaaaccatttgttgaacaaagcaaacaaatgaatctcccaagccttgggcttcatcctgtgatttcctcaattcccacctgccttaaattactcagtgaagccctgtccttggagaaaattcagtgggtggttaacccagagaagctggagatcaaaaagaagatggccaatgaaagaacaaaggccagcccttggcccctatctctttggatttctgctgatccagcttatcagatcccagaaacctggcaaacctctaaagttcacaaagagcgaaggggaagccaagtcaggcctccagtttggcttcggatgccaaaacttaatctgggctgtgggagctaactgttttcatatgaaagagcaaattcagaacatgagcatggaagtccctgcgaacgtcagatctccgtgtgcatccttacccccttgctgctttcatgctcactctcctcttgcgtggctcgctttcaggtttatctccatccctggaagcagagttgctctggcccaggctctccatgagagtttggcttgaacattcattgtctggccccctcctagttctcatctcccaaagtcaagccaatgtgtgaagaaatgaccagctcagcagccaaggcccagggtgcacaggtcttcgttgggagaggcatctgcaggcctttccttgctcactgggatccttgcctagcatagtgacgatgttcagccctggagacaaacaagaaggggaacaccaacatcaatagaagtatatatttacaaattgcatttctgctgtattgaaactaacattctgccctttaaaatcctgaaaataaaatttcagtatgaaatg

SEQ ID NO: 89428 - DNA, 618 bp, Artificial Sequence
  derived and/or modified sequence
atgacagactctgctaccgccaacggcgatgatcgggaccctgagattgagctgttcgtgaaggccggtatcgacggcgagtctatcggtaactgtcctttttctcagaggctatttatgatactgtggcttaagggagtggtattcaatgtcacaaccgtggacctgaaaagaaaaccagcagacctccataacctcgccccgggcacccatcccccttttctgacgttcaacggggacgtgaagaccgacgtgaataagatagaagagttcctcgaggagacccttacaccagagaagtatcccaaactggctgctaagcatagagagagtaatacagcggggatagacatatttagcaagttcagcgcttacatcaaaaacaccaagcagcagaataacgctgctctcgagcgtggactaactaaggccctgaaaaagctggatgattacctgaacacacctctgccggaagagatcgatgcgaacacctgtggggaagataaaggctccaggaggaaatttcttgacggtgacgaattgacgctggccgactgcaacctgctgcccaaactgcatgttgtcaaggagcaggttccattaaagggcatgatctag

SEQ ID NO: 89429 - DNA, 618 bp, Artificial Sequence
  derived and/or modified sequence
atgacagacagcgccacagccaatggagatgaccgggaccctgagattgagctgtttgtgaaggccggcattgatggagagagcatcggcaactgccccttcagccagaggctcttcatgatcctgtggctgaagggcgtggtgttcaacgtgaccaccgtggacctgaagaggaagccagctgacctgcacaacctggcccctggcacccacccccccttcctgaccttcaatggagatgtgaagacagatgtgaacaagattgaggagttcctggaggagaccctgaccccagagaagtaccccaagctggccgccaagcaccgggagagcaacacagctggcatcgacatcttcagcaagttcagcgcctacatcaagaacaccaagcagcagaacaatgctgccctggagcggggcctgaccaaggccctgaagaagctggatgactacctgaacacccccctgcctgaggagattgatgccaacacctgtggagaagataaaggcagcaggaggaagttcctggatggagatgagctgaccctggccgactgcaacctgctgcccaagctgcacgtggtgaaggagcaggtgcccctgaagggcatgatctag

SEQ ID NO: 89430 - DNA, 618 bp, Artificial Sequence
  derived and/or modified sequence
atgaccgacagcgccaccgccaacggcgacgaccgggaccccgagattgagttattcgtcaaggccgggatcgatggcgaatctattggcaactgtccctttagccaaaggctgtttatgatcctctggctgaagggcgtggtttttaatgtgactactgttgacctgaaacggaaaccagctgatttacacaacctcgcgccaggaactcaccctccctttctgactttcaacggcgatgtcaaaaccgacgtcaataagatcgaggaatttctggaggaaacactgacgcccgaaaagtacccaaagctcgccgcaaagcaccgagagtctaacacagcaggaatagatatctttagcaagttttccgcctacatcaaaaacaccaaacagcagaataacgctgcactggagcggggactcacaaaagctctgaagaagctcgatgactatcttaatacacctctgccagaagagatagatgcaaatacatgcggtgaggacaaagggagccggcgcaagttcctggacggcgatgagctgactcttgccgattgtaacttactgccgaagctgcacgttgttaaagagcaggtgcccttgaaaggcatgatttag

SEQ ID NO: 89431 - DNA, 618 bp, Artificial Sequence
  derived and/or modified sequence
atgacggactcggctacagccaatggggacgaccgcgaccctgagatcgaactgtttgtaaaagcagggatagatggcgaatcaatcggcaactgtccattctcccaaagacttttcatgattctttggctcaaaggcgtcgtgttcaacgtgactaccgttgatctcaagagaaagcccgctgacttgcacaacctcgctcccggaacacatcctccgtttcttaccttcaacggagatgtgaaaaccgacgtcaacaagattgaagagttcctcgaagaaactctgacccctgagaagtacccaaaactggcggctaaacaccgtgagtcaaacaccgctggtatagacattttctcaaaattcagcgcctacattaaaaatactaagcaacaaaacaacgcagctttggagcgcggactgaccaaggcgctcaaaaagcttgatgattatctaaatacccccctccctgaggagatcgacgcaaatacatgtggcgaggacaaagggtcccgtagaaagtttctcgacggggacgagctgacactcgcggattgcaatcttctcccaaaactccacgttgtgaaagagcaggtgccactcaaaggaatgatttag

SEQ ID NO: 89432 - protein, 714 aa, Artificial Sequence
  derived and/or modified sequence
MLSPKIRQARRARSKSLVMGEQSRSPGRMPCPHRLGPVLKAGWLKKQRSIMKNWQQRWFVLRGDQLFYYKDKDEIKPQGFISLQGTQVTELPPGPEDPGKHLFEISPGGAGEREKVPANPEALLLMASSQRDMEDWVQAIRRVIWAPLGGGTARRSHAHPLEPLPPGIFGQRLEETVHHERKYGPRLAPLLVEQCVDFIRERGLTEEGLFRMPGQANLVRDLQDSFDCGEKPLFDSTTDVHTVASLLKLYLRELPEPVVPFARYEDFLSCAQLLTKDEGEGTLELAKQVSNLPQANYNLLRYICKFLDEVQAYSNVNKMSVQNLATVFGPNILRPQVEDPVTIMEGTSLVQHLMTVLIRKHSQLFTAPVPEGPTSPRGGLQCAVGWGSEEVTRDSQGEPGGPGLPAHRTSSLDGAAVAVLSRTAPTGPGSRCSPGKKVQTLPSWKSSFRQPRSLSGSPKGGGSSLEVPIISSGGNWLMNGLSSLRGHRRASSGDRLKDSGSVQRLSTYDNVPAPGLVPGIPSVASMAWSGASSSESSVGGSLSSCTACRASDSSARSSLHTDWALEPSPLPSSSEDPKSLDLDHSMDEAGAGASNSEPSEPDSPTREHARRSEALQGLVTELRAELCRQRTEYERSVKRIEEGSADLRKRMSRLEEELDQEKKKYIMLEIKLRNSERAREDAERRNQLLQREMEEFFSTLGSLTVGAKGARAPK

SEQ ID NO: 89433 - DNA, 1770 bp, Artificial Sequence
  derived and/or modified sequence
atggccagcagccagagagacatggaggactgggtgcaggccatcagaagagtgatctgggcccccctgggcggcggcaccgccagaagaagccacgcccaccccctggagcccctgccccccggcatcttcggccagagactggaggagaccgtgcaccacgagagaaagtacggccccagactggcccccctgctggtggagcagtgcgtggacttcatcagagagagaggcctgaccgaggagggcctgttcagaatgcccggccaggccaacctggtgagagacctgcaggacagcttcgactgcggcgagaagcccctgttcgacagcaccaccgacgtgcacaccgtggccagcctgctgaagctgtacctgagagagctgcccgagcccgtggtgcccttcgccagatacgaggacttcctgagctgcgcccagctgctgaccaaggacgagggcgagggcaccctggagctggccaagcaggtgagcaacctgccccaggccaactacaacctgctgagatacatctgcaagttcctggacgaggtgcaggcctacagcaacgtgaacaagatgagcgtgcagaacctggccaccgtgttcggccccaacatcctgagaccccaggtggaggaccccgtgaccatcatggagggcaccagcctggtgcagcacctgatgaccgtgctgatcagaaagcacagccagctgttcaccgcccccgtgcccgagggccccaccagccccagaggcggcctgcagtgcgccgtgggctggggcagcgaggaggtgaccagagacagccagggcgagcccggcggccccggcctgcccgcccacagaaccagcagcctggacggcgccgccgtggccgtgctgagcagaaccgcccccaccggccccggcagcagatgcagccccggcaagaaggtgcagaccctgcccagctggaagagcagcttcagacagcccagaagcctgagcggcagccccaagggcggcggcagcagcctggaggtgcccatcatcagcagcggcggcaactggctgatgaacggcctgagcagcctgagaggccacagaagagccagcagcggcgacagactgaaggacagcggcagcgtgcagagactgagcacctacgacaacgtgcccgcccccggcctggtgcccggcatccccagcgtggccagcatggcctggagcggcgccagcagcagcgagagcagcgtgggcggcagcctgagcagctgcaccgcctgcagagccagcgacagcagcgccagaagcagcctgcacaccgactgggccctggagcccagccccctgcccagcagcagcgaggaccccaagagcctggacctggaccacagcatggacgaggccggcgccggcgccagcaacagcgagcccagcgagcccgacagccccaccagagagcacgccagaagaagcgaggccctgcagggcctggtgaccgagctgagagccgagctgtgcagacagagaaccgagtacgagagaagcgtgaagagaatcgaggagggcagcgccgacctgagaaagagaatgagcagactggaggaggagctggaccaggagaagaagaagtacatcatgctggagatcaagctgagaaacagcgagagagccagagaggacgccgagagaagaaaccagctgctgcagagagagatggaggagttcttcagcaccctgggcagcctgaccgtgggcgccaagggcgccagagcccccaagtag

SEQ ID NO: 89434 - DNA, 2145 bp, Artificial Sequence
  derived and/or modified sequence
atgctgagccccaagatcagacaggccagaagagccagaagcaagagcctggtgatgggcgagcagagcagaagccccggcagaatgccctgcccccacagactgggccccgtgctgaaggccggctggctgaagaagcagagaagcatcatgaagaactggcagcagagatggttcgtgctgagaggcgaccagctgttctactacaaggacaaggacgagatcaagccccagggcttcatcagcctgcagggcacccaggtgaccgagctgccccccggccccgaggaccccggcaagcacctgttcgagatcagccccggcggcgccggcgagagagagaaggtgcccgccaaccccgaggccctgctgctgatggccagcagccagagagacatggaggactgggtgcaggccatcagaagagtgatctgggcccccctgggcggcggcaccgccagaagaagccacgcccaccccctggagcccctgccccccggcatcttcggccagagactggaggagaccgtgcaccacgagagaaagtacggccccagactggcccccctgctggtggagcagtgcgtggacttcatcagagagagaggcctgaccgaggagggcctgttcagaatgcccggccaggccaacctggtgagagacctgcaggacagcttcgactgcggcgagaagcccctgttcgacagcaccaccgacgtgcacaccgtggccagcctgctgaagctgtacctgagagagctgcccgagcccgtggtgcccttcgccagatacgaggacttcctgagctgcgcccagctgctgaccaaggacgagggcgagggcaccctggagctggccaagcaggtgagcaacctgccccaggccaactacaacctgctgagatacatctgcaagttcctggacgaggtgcaggcctacagcaacgtgaacaagatgagcgtgcagaacctggccaccgtgttcggccccaacatcctgagaccccaggtggaggaccccgtgaccatcatggagggcaccagcctggtgcagcacctgatgaccgtgctgatcagaaagcacagccagctgttcaccgcccccgtgcccgagggccccaccagccccagaggcggcctgcagtgcgccgtgggctggggcagcgaggaggtgaccagagacagccagggcgagcccggcggccccggcctgcccgcccacagaaccagcagcctggacggcgccgccgtggccgtgctgagcagaaccgcccccaccggccccggcagcagatgcagccccggcaagaaggtgcagaccctgcccagctggaagagcagcttcagacagcccagaagcctgagcggcagccccaagggcggcggcagcagcctggaggtgcccatcatcagcagcggcggcaactggctgatgaacggcctgagcagcctgagaggccacagaagagccagcagcggcgacagactgaaggacagcggcagcgtgcagagactgagcacctacgacaacgtgcccgcccccggcctggtgcccggcatccccagcgtggccagcatggcctggagcggcgccagcagcagcgagagcagcgtgggcggcagcctgagcagctgcaccgcctgcagagccagcgacagcagcgccagaagcagcctgcacaccgactgggccctggagcccagccccctgcccagcagcagcgaggaccccaagagcctggacctggaccacagcatggacgaggccggcgccggcgccagcaacagcgagcccagcgagcccgacagccccaccagagagcacgccagaagaagcgaggccctgcagggcctggtgaccgagctgagagccgagctgtgcagacagagaaccgagtacgagagaagcgtgaagagaatcgaggagggcagcgccgacctgagaaagagaatgagcagactggaggaggagctggaccaggagaagaagaagtacatcatgctggagatcaagctgagaaacagcgagagagccagagaggacgccgagagaagaaaccagctgctgcagagagagatggaggagttcttcagcaccctgggcagcctgaccgtgggcgccaagggcgccagagcccccaagtag

SEQ ID NO: 89435 - DNA, 1770 bp, Artificial Sequence
  derived and/or modified sequence
atggcgagtagccaacgcgacatggaggattgggtgcaggccattaggcgtgtaatctgggctcccttgggcggcggcaccgctcgccgaagccatgctcaccccctggaacccctgccacctggcatctttggccagagactcgaggaaacagtgcatcatgagaggaaatatggtccaagactggctcctctccttgtcgagcagtgcgtcgatttcattcgtgagcgagggttgacagaggaagggctgttccgcatgccagggcaagcaaatttggtcagggaccttcaagattccttcgactgcggtgagaaacctctgtttgacagcaccaccgatgtgcacaccgttgcttcgctgctgaaactttatctaagagagttgccagaaccggtcgtccccttcgcccggtatgaagatttcctgagttgcgcacaactgctgacaaaggacgagggcgaaggtaccctagagcttgccaagcaggtgagcaacttgccccaggctaattataatcttctacgctacatctgtaaatttctggatgaagtccaggcctactccaacgtaaataaaatgagtgtccagaacctcgccaccgtgtttgggcccaacatcctgcgaccccaggttgaggacccagttacaatcatggagggcacgtctcttgtgcagcacctaatgacagtgctgatcagaaagcactcacagctattcacagctccagtgccggaggggccaaccagtccacgtggcggtctccagtgcgccgtaggctggggctccgaggaggtaactcgcgacagccagggagagccaggaggccctgggctacctgcccaccggacatccagtctggatggagcagctgtcgccgtgttatcccgcaccgcccccaccgggccggggtcacgctgcagtcccggaaagaaggttcagacacttccgagttggaaaagctcttttaggcagcccaggtccctgtctggctccccaaaaggcggcggcagctcccttgaggtcccgatcatcagttcagggggcaattggttgatgaacggactcagctccctgcggggtcaccggcgtgccagctcaggggaccgcctgaaggactctgggtctgtgcagagactcagcacttatgacaacgtgcccgccccagggttagttcctggcattcctagtgtcgcctctatggcttggtcaggagcttcatccagtgaatcttccgtgggagggtctctgtcatcttgcacggcttgtcgggcctctgatagttcagctcgaagctctttgcatacagattgggcgctggaaccctccccactgccctcatcctccgaggatcccaagtcgctcgatttagatcatagtatggacgaagcaggtgcaggggcttccaactcggagccatcagaacccgattcaccaacaagggaacacgcccgcagaagcgaggcactccaaggcctggtgactgaactaagagccgaattatgccggcagcgcacagaatatgagaggagtgtgaaacggattgaagagggcagcgctgatctaagaaagaggatgtcacgtctggaagaggagcttgaccaagagaaaaaaaaatacataatgctggaaataaagctgaggaattccgagcgagcccgtgaggatgcagagaggaggaaccaacttctgcagagagaaatggaggagttcttcagcaccctggggtcactaaccgtaggtgccaagggcgctcgcgcgccgaaatag

SEQ ID NO: 89436 - DNA, 2145 bp, Artificial Sequence
  derived and/or modified sequence
atgttaagccccaagattagacaggcacgaagagcaaggtctaaatccttggtcatgggagagcaatctaggagcccaggacgcatgccttgtccgcaccgccttggacctgtgctcaaggcgggctggttaaaaaaacagcggagtataatgaagaattggcagcagcggtggttcgtcctgcggggcgaccagttattttattacaaagataaagacgaaatcaagccacagggcttcatcagtctgcaaggcacacaagtaaccgagttgccacccggccccgaggacccgggaaaacacctctttgaaattagtcccggcggggctggagagcgcgagaaggtcccagccaatcctgaggccttacttctgatggcctcaagccaacgagacatggaagactgggtgcaggccattcgccgcgtaatctgggctccgctgggcggaggaacagcgcgtaggagccatgcacatcctcttgaaccgttgccaccaggtatcttcggccaaaggctggaagaaaccgtacatcacgagcgcaaatacggccctcgcctcgctcccctgctggtagagcagtgcgtggactttattagagagaggggactgaccgaagagggactttttcggatgcccggacaggccaacctagtccgggaccttcaggactcttttgattgtggggagaaaccgctttttgactcaacaacagatgtacacacagttgctagtttgctgaagctctatctgagggagctgccagagccagtggtgccttttgcaaggtacgaggatttcctgagttgtgcccagctgctgaccaaagatgaaggggagggtaccctggaactggcaaagcaggtcagcaatttgccacaggcaaattacaatctactgcgctacatctgcaagttcctggatgaggttcaggcctacagcaacgtaaacaaaatgtcagttcagaatctcgcaacagtcttcggccctaatattctcagacctcaagtagaagaccccgtgactatcatggagggcacaagcctggtgcagcacttaatgaccgttcttatcaggaaacactctcagctcttcactgctccagtgccagaaggcccaactagtccgcgggggggccttcaatgcgccgtggggtgggggagtgaggaggtcacccgggactctcagggggagccagggggccccggcttacccgcacacaggacctccagcctagacggagcagccgttgccgtactatcccgcacggcgccgactggtcctggcagtcgatgtagtcctggtaaaaaggtgcagactctgcctagttggaagtccagcttccgtcagccccgatcgctgagcggatcacccaaggggggaggttcctctcttgaagtgccaattatctcatccggcgggaattggctgatgaatggcctgagttccttacgcggccaccgtagggcctcatcaggagaccgcttgaaggattccggctccgtgcagagattgtccacatatgataatgtacccgccccgggcctggtgccaggcattccgagcgttgccagtatggcgtggtccggggccagtagctccgaaagctcagttggagggagcttgtcctcgtgcactgcctgtcgcgcctcagactcctccgcccggagcagcctgcatactgactgggccctcgagccctctcctctcccatccagctcagaggatcctaaaagtctggacctggatcactcaatggatgaggcaggcgcgggcgcctccaattctgaaccaagtgagcctgatagtccaacgcgtgagcatgcgcggaggtctgaagcgcttcaggggctagtgaccgaactacgcgccgaattatgtaggcaacggactgagtatgaaagatcagtgaagcggattgaggagggttctgcggatctcaggaagaggatgtctcggctcgaagaagagcttgaccaggaaaagaaaaagtatataatgctggaaatcaaactccgcaactccgagagggcccgcgaggacgccgagcgtcgcaatcagctcctgcagcgcgagatggaagaattcttttccaccttgggatctctgacagtcggtgctaagggcgcaagagctcccaagtag

SEQ ID NO: 89437 - DNA, 2380 bp, Artificial Sequence
  derived and/or modified sequence
gatgctccaaatatccctacaaagtactttattattcctgtttcacagacaaggaaactggggcacagacaggttgaacaatgttcctgtagctgagccaggatttgaacccagggatttatttctctacaagggacacaggtgactgaacttcctcctggccccgaggacccagggaagcacctctttgagatcagcccaggtggtgccggggagcgggagaaggtgccggccaaccccgaggcgctcctgctcatggccagctcccagcgtgacatggaggactgggtgcaggccatccgccgagtcatctgggccccgctgggcggaggtactgcccgtagatcgcatgcccaccctctagaacccttgcctccagggatctttgggcagcgcctagaggaaacagtccaccacgagcggaagtatggcccccgcctggcgcccctgctggtggagcagtgtgtggacttcatccgggagcgcgggctcactgaggaggggctgttccgcatgccaggccaggccaacctggtgagggacctgcaggattccttcgactgtggggagaagccactgtttgacagcacaacagacgtgcacacggtggcctccctgctgaagctgtacctgcgggagctccccgagcccgtggtccccttcgccaggtacgaggacttcctcagctgcgcccagctgctcaccaaggacgagggggagggcactctggagttggctaaacaagtgagcaaccttcctcaggcaaattacaacctgctcagatacatctgcaagtttctggatgaagttcaggcatactcaaatgtcaacaagatgagtgtccagaatctggcaaccgtttttggacctaacattctgcggccacaggtagaggacccagtaaccatcatggaaggcacttccctcgtccagcacctgatgaccgtcctcatccgcaaacacagccagctcttcacggcaccggtcccggaagggcccacctccccgcgcgggggcctgcaatgcgcagtggggtggggctccgaggaggtcaccagggacagccaaggagagcccggcggccccggcctgcccgcgcacaggacctcttccctggacggggcggccgtggcggtgctctccagaacagcccccacggggccggggagccggtgcagccctgggaagaaggtgcagaccctgcccagttggaagtcctccttccggcagccgaggtccctatcgggaagcccgaaggggggcggctcatccctggaggtgcccatcatctcctccggcgggaactggcttatgaacgggctgtcctccctgcgcggacaccgccgggcctcgtcgggagaccggctcaaggactcgggctccgtgcagagactctccacctacgacaatgtgcccgcgccgggcctggtccccggcatacccagcgtggccagtatggcgtggtccggggcctcgtccagcgagtcgtcggtggggggctcactcagcagctgcacggcctgccgcgccagcgactcgtctgcccgcagttccctgcacaccgactgggccctggagccctccccgctccccagcagcagcgaggaccccaagtccctggacctggaccacagcatggacgaggcgggcgcgggtgccagcaacagcgagcccagcgagccggacagccccacccgggaacacgcgcgccgctccgaggccttacaggggctggtcactgagctcagggccgagctgtgccgccagcggactgagtacgagaggagtgtgaaaagaatcgaagaagggagtgctgacctgagaaaacgaatgtcccggttagaagaagaactggaccaggaaaagaaaaaatacatcatgctggaaataaagctgcggaactctgaacgggcgcgggaggatgcggagaggaggaaccagctgttgcagagggaaatggaggagtttttttcgaccctaggaagcttgactgttggggcaaaaggtgccagggccccaaagtaaaaggaatggcagagctcacttctgtaccacgtctgctggtctccagccttgtatggagttagaagcgtctgtatctctggagcagccaggcgctctggagccagctggagagagagagatcctgatacctctgtggggactgtggggacttttgggaccccacacactccaggtgggatcagatgctgctccaaccatgcagttcctggtgagggtcagaaggggacggtaccaagagtagcgcttagcccttacccaggaaatatccttcatggccacagaaatggagggcgcccaggatccaggcagccaccgggaacagtcagctttctttattaaatgtgctcacaaagca

SEQ ID NO: 89438 - DNA, 1770 bp, Artificial Sequence
  derived and/or modified sequence
atggccagcagccagagggacatggaggactgggtgcaggccatccggcgggtcatctgggcccccctgggcggcggcacagcccggcgcagccacgcccaccccctggagcccctgcccccaggcatcttcggccagaggctggaggagaccgtgcaccacgagaggaaatatggcccccggctggcccccctgctggtggagcagtgtgtggacttcatccgggagcggggcctgacagaggagggcctcttcaggatgcctggccaggccaacctggtgcgggacctgcaggacagctttgactgtggggagaagcccctgtttgacagcaccacagatgtgcacacagtggccagcctgctgaagctgtacctgcgggagctgcctgagcctgtggtgccctttgcccgctatgaggacttcctgagctgtgcccagctgctgaccaaggatgaaggagagggcaccctggagctggccaagcaggtgagcaacctgccccaggccaactacaacctgctgcgctacatctgcaagttcctggatgaggtgcaggcctacagcaatgtgaacaagatgtctgtgcagaacctggccaccgtgtttggccccaacatcctgcggccccaggtggaggaccctgtgaccatcatggagggcaccagcctggtgcagcacctgatgacagtgctgatcaggaagcacagccagctgttcaccgcccctgtgcctgagggccccaccagcccccggggcggcctgcagtgtgctgtgggctggggcagcgaggaggtgacccgggacagccagggcgagcccggcggccctggcctgcctgcccacaggaccagcagcctggatggagctgctgtggccgtgctgagcaggacagcccccactggacctggcagccgctgcagccctgggaagaaggtgcagaccctgcccagctggaagagcagcttccggcagcccaggagcctgagcggcagccccaagggcggcggcagcagcctggaggtgcccatcatcagcagcggcggcaactggctgatgaatggcctgagcagcctgcggggccacagaagagccagcagcggggaccggctgaaggacagcggctctgtgcagaggctgagcacctatgacaacgtgcctgcccctggcctggtgcccggcatccccagcgtggcctccatggcctggagcggggccagcagcagcgagagctctgtgggcggcagcctgagcagctgcacagcctgccgggccagtgacagcagcgcccggagcagcctgcacacagactgggccctggagcccagccccctgcccagcagcagcgaggaccccaagagcctggacctggaccacagcatggatgaggccggggccggggccagcaacagcgagcccagcgagccagacagccccacccgggagcacgccaggagaagtgaggccctgcagggcctggtgacagagctgcgggcagagctgtgccggcagaggacagaatatgaaagatctgtgaagagaattgaggagggcagcgctgacctgaggaagaggatgagccggctggaggaggagctggaccaggagaagaagaagtacatcatgctggagatcaagctgaggaacagcgagcgggccagagaagatgctgagaggaggaaccagctgctgcagcgggagatggaggagttcttcagcaccctgggcagcctgactgtgggcgccaagggggcccgggcccccaagtag

SEQ ID NO: 89439 - DNA, 2145 bp, Artificial Sequence
  derived and/or modified sequence
atgctgagccccaagatccggcaggcccggcgggcccggagcaagagcctggtgatgggagagcagagccgcagccctggccgcatgccctgcccccaccggctgggccctgtgctgaaggccggctggctgaagaagcagaggagcatcatgaagaactggcagcagcgctggtttgtgctgcggggggaccagctgttctactacaaggacaaggatgagatcaagccccagggcttcatcagcctgcagggcacccaggtgacagagctgcccccaggccctgaggaccccgggaagcacctgtttgagatcagccctggaggagctggggagcgggagaaggtgcctgccaaccctgaggccctgctgctgatggccagcagccagagggacatggaggactgggtgcaggccatcagaagagtcatctgggcccccctgggcggcggcacagcccggcgcagccacgcccaccccctggagcccctgcccccaggcatcttcggccagaggctggaggagaccgtgcaccacgagaggaaatatggcccccggctggcccccctgctggtggagcagtgtgtggacttcatccgggagcggggcctgacagaggagggcctcttcaggatgcctggccaggccaacctggtgcgggacctgcaggacagctttgactgtggggagaagcccctgtttgacagcaccacagatgtgcacacagtggccagcctgctgaagctgtacctgcgggagctgcctgagcctgtggtgccctttgcccgctatgaggacttcctgagctgtgcccagctgctgaccaaggatgaaggagagggcaccctggagctggccaagcaggtgagcaacctgccccaggccaactacaacctgctgcgctacatctgcaagttcctggatgaggtgcaggcctacagcaatgtgaacaagatgtctgtgcagaacctggccaccgtgtttggccccaacatcctgcggccccaggtggaggaccctgtgaccatcatggagggcaccagcctggtgcagcacctgatgacagtgctgatcaggaagcacagccagctgttcaccgcccctgtgcctgagggccccaccagcccccggggcggcctgcagtgtgctgtgggctggggcagcgaggaggtgacccgggacagccagggcgagcccggcggccctggcctgcctgcccacaggaccagcagcctggatggagctgctgtggccgtgctgagcaggacagcccccaccggccctggcagccgctgcagccctgggaagaaggtgcagaccctgcccagctggaagagcagcttccggcagcccaggagcctgagcggcagccccaagggcggcggcagcagcctggaggtgcccatcatcagcagcggcggcaactggctgatgaatggcctgagcagcctgcggggccaccggcgggccagcagcggggaccggctgaaggacagcggctctgtgcagaggctgagcacctatgacaacgtgcctgcccctggcctggtgcccggcatccccagcgtggcctccatggcctggagcggggccagcagcagcgagagctctgtgggcggcagcctgagcagctgcacagcctgccgggccagtgacagcagcgcccggagcagcctgcacacagactgggccctggagcccagccccctgcccagcagcagcgaggaccccaagagcctggacctggaccacagcatggatgaagctggagctggggccagcaacagcgagcccagcgagccagacagccccacccgggagcacgcccggcgctctgaggccctgcagggcctggtgacagagctgcgggcagagctgtgccggcagaggacagaatatgaaagatctgtgaagagaattgaggagggcagcgctgacctgaggaagaggatgagccggctggaggaggagctggaccaggagaagaagaagtacatcatgctggagatcaagctgagaaattctgagcgggcccgggaggatgctgagaggaggaaccagctgctgcagcgggagatggaggagttcttcagcaccctgggcagcctgactgtgggcgccaagggggcccgggcccccaagtag

SEQ ID NO: 89440 - DNA, 1770 bp, Artificial Sequence
  derived and/or modified sequence
atggccagcagccagcgggacatggaggactgggtgcaggccatcagaagggtgatttgggctccactaggagggggcaccgcccgtcgcagccatgcccatcccctggaacctctgccccctggtatcttcggacagaggctggaggaaactgtccatcacgaaaggaagtacggaccacggctcgcacctttacttgttgaacaatgcgtggactttattagggaaagagggcttaccgaggagggcctgtttcgcatgccgggacaggctaatctggtgcgggacctgcaggacagttttgactgcggcgagaagccactctttgacagcaccaccgacgtgcatacagtggcatcattgctgaaactgtatctgagagagctaccagagccggtcgtccctttcgcacggtacgaagatttcttaagctgtgcacagttgttgacaaaggacgagggagagggcaccctcgagcttgcgaaacaggtctctaacctgccacaggccaattataatcttctgagatacatatgcaagtttctggatgaagtgcaggcctattcgaatgtgaacaaaatgagcgtgcagaacctggctactgtgtttggtcccaacattcttcgccctcaagtcgaagatccggtcaccatcatggaggggacgtctctcgttcaacacctcatgacagtacttattcggaaacattcccagcttttcactgcccctgtgccagaaggacctacgagcccacggggaggactccagtgtgccgtcggctggggttccgaagaagtaactagggattctcaaggtgagcctggagggccaggattaccagctcatcgtacctctagtctcgatggcgcggcagtggcagtgctgtctcgcacagctccgacggggcctggatcccgttgcagccccggaaaaaaggttcagaccttgcctagctggaagtccagttttaggcaacctaggagtctgagtggttcaccaaagggtggaggctcaagtctggaggttccgattatcagctctgggggaaattggctcatgaacggcctgagctcacttcggggacaccgccgggcgtcaagtggtgaccggctgaaggattccggaagcgtccagcggctcagcacttatgacaacgtccctgctcctggattagtgccaggcatcccttccgtggcatccatggcgtggagcggcgcctcaagttcagagagctccgtgggaggtagcttaagcagctgcacagcttgccgcgcatctgacagttccgcaaggtctagcctccacacagactgggctcttgagccctctccactaccatcttccagcgaggaccccaaatccctggatttggaccattctatggacgaggcaggggccggggcctcgaacagtgagccttctgagccggattcacccactcgtgagcatgcccggagatcagaggcactgcaggggctggtgaccgagcttagagctgaactttgcagacaaaggactgaatatgagcgtagcgttaaaagaatagaagagggttccgcggacttgcgcaaaagaatgtctagactagaagaggagttggatcaagaaaaaaagaagtacatcatgctggagatcaagcttcgcaattccgagcgcgcccgagaagatgccgagaggaggaatcagctgttgcagcgtgagatggaagaattttttagtacactcggtagcctcacagtaggagcaaagggagccagggcccctaaatag

SEQ ID NO: 89441 - DNA, 2145 bp, Artificial Sequence
  derived and/or modified sequence
atgctgagccccaagatccggcaggcccggcgggcccggagcaagtctctagtgatgggagagcagtcaaggtcccctggtcgaatgccctgcccacataggctgggacccgtcctgaaggccggatggcttaagaagcagagatctatcatgaaaaattggcaacagagatggtttgtcctaagaggagaccaacttttctactataaagacaaagatgagattaagccacagggctttataagcctgcagggcacgcaggttacagaactgcctccgggtcccgaggaccctggcaagcacttgtttgagatttccccaggcggcgccggtgagcgcgagaaggtgcctgcaaatcctgaggctctgctactgatggctagcagtcagcgggacatggaggactgggtgcaggctattcggcgggtgatatgggcccctctggggggtggcacagcccggcggtcacatgcccaccccctggagcctcttccaccaggaattttcgggcagcgactggaggagactgttcaccatgagagaaagtacggcccccggcttgctcctctgcttgtggagcaatgtgtggatttcatccgcgagagggggctgaccgaagaaggtctgttcagaatgccaggccaggcaaatctggtgcgagaccttcaagattcattcgactgtggcgagaagcctctcttcgacagcaccaccgatgtgcacacggtcgcaagtctgctcaaactctacctgagagagcttcccgagcctgtcgtgccttttgccaggtacgaagattttttatcttgtgctcagcttcttacgaaggacgaaggagaaggaactctggagctcgccaagcaagttagtaacctgcctcaagctaactacaatctcctgcgctacatctgcaagtttctggatgaagtgcaggcatattctaacgtcaataaaatgtctgttcagaaccttgctaccgtgtttggtcctaatattctgcgtccacaagtagaggaccccgtcacgatcatggaggggacctctttggtccagcatttgatgaccgtgctgatacgtaaacacagccaactgtttacggctccagtcccagaaggcccaacctcgcctcgcggtggtctgcagtgcgccgtcggctggggaagcgaagaggtcaccagagactcccagggtgaacctggggggcctggactgcccgcccatcgaacctcatcactggacggcgccgccgtggcagttctgtctagaaccgctccgactgggccaggatcccgatgctctcccgggaaaaaggttcagaccctgccctcttggaagtcttcattccgtcagcccagatccctttcaggatccccaaaggggggtggcagcagccttgaagtgcctattatttcgagtggcggcaactggcttatgaacggactgtcgagtctgcgcgggcatcggagagcgtctagtggggaccgtttgaaggatagcggatccgtacagcggctgtctacctatgacaacgtcccagcccccggacttgtccccggcatcccctctgtcgcttcaatggcctggagtggcgcctcttcgagtgagtcatctgtgggtggatctctaagctcttgtaccgcttgtcgggcttcagattctagtgcccgcagcagcttacacaccgactgggcgttagaaccaagcccgctcccatcgagttctgaggacccaaagagccttgatctggatcactctatggatgaagccggcgccggcgccagtaactcagagccctctgagcccgactccccgaccagagaacatgcaagaaggtctgaggcgctgcaagggctagtgactgaactgagggcggaattgtgccgtcagcgcaccgaatatgagaggagcgtaaagcgcattgaggagggatctgccgacttacggaagcggatgtcgcgcctagaggaagagctagaccaggaaaagaagaagtatattatgcttgagatcaagctgcggaactccgagagagcaagggaagatgctgaaagaagaaaccagctcctccagagggaaatggaagaatttttctctaccctgggaagtctgaccgtgggtgccaaaggcgcacgcgcccccaagtag

SEQ ID NO: 89442 - DNA, 2352 bp, Artificial Sequence
  derived and/or modified sequence
caggagaggtagccgagggagcctgacgggtgacgccagcggccacggggccccgaacgagcaggacatgaggggcgactaggcgcgaggacgagcaaaagcaagtggatgacagcatgaacggccctgcggggctggccggacggctgcaagaacatgctgagcccaaagatcaggcaggccaggagggcccgctccaaaagcctagtgatgggggagcagagccggagccctgggcggatgccgtgccctcacaggctgggccccgtgctgaaggcgggctggctgaagaagcagaggagcatcatgaagaactggcagcagcgctggtttgtgctgcgtggggatcagcttttctactacaaggacaaagatgagatcaagccccagggatttatttctctacaagggacacaggtgactgaacttcctcctggccccgaggacccagggaagcacctctttgagatcagcccaggtggtgccggggagcgggagaaggtgccggccaaccccgaggcgctcctgctcatggccagctcccagcgtgacatggaggactgggtgcaggccatccgccgagtcatctgggccccgctgggcggaggtactgcccgtagatcgcatgcccaccctctagaacccttgcctccagggatctttgggcagcgcctagaggaaacagtccaccacgagcggaagtatggcccccgcctggcgcccctgctggtggagcagtgtgtggacttcatccgggagcgcgggctcactgaggaggggctgttccgcatgccaggccaggccaacctggtgagggacctgcaggattccttcgactgtggggagaagccactgtttgacagcacaacagacgtgcacacggtggcctccctgctgaagctgtacctgcgggagctccccgagcccgtggtccccttcgccaggtacgaggacttcctcagctgcgcccagctgctcaccaaggacgagggggagggcactctggagttggctaaacaagtgagcaaccttcctcaggcaaattacaacctgctcagatacatctgcaagtttctggatgaagttcaggcatactcaaatgtcaacaagatgagtgtccagaatctggcaaccgtttttggacctaacattctgcggccacaggtagaggacccagtaaccatcatggaaggcacttccctcgtccagcacctgatgaccgtcctcatccgcaaacacagccagctcttcacggcaccggtcccggaagggcccacctccccgcgcgggggcctgcaatgcgcagtggggtggggctccgaggaggtcaccagggacagccaaggagagcccggcggccccggcctgcccgcgcacaggacctcttccctggacggggcggccgtggcggtgctctccagaacagcccccacggggccggggagccggtgcagccctgggaagaaggtgcagaccctgcccagttggaagtcctccttccggcagccgaggtccctatcgggaagcccgaaggggggcggctcatccctggaggtgcccatcatctcctccggcgggaactggcttatgaacgggctgtcctccctgcgcggacaccgccgggcctcgtcgggagaccggctcaaggactcgggctccgtgcagagactctccacctacgacaatgtgcccgcgccgggcctggtccccggcatacccagcgtggccagtatggcgtggtccggggcctcgtccagcgagtcgtcggtggggggctcactcagcagctgcacggcctgccgcgccagcgactcgtctgcccgcagttccctgcacaccgactgggccctggagccctccccgctccccagcagcagcgaggaccccaagtccctggacctggaccacagcatggacgaggcgggcgcgggtgccagcaacagcgagcccagcgagccggacagccccacccgggaacacgcgcgccgctccgaggccttacaggggctggtcactgagctcagggccgagctgtgccgccagcggactgagtacgagaggagtgtgaaaagaatcgaagaagggagtgctgacctgagaaaacgaatgtcccggttagaagaagaactggaccaggaaaagaaaaaatacatcatgctggaaataaagctgcggaactctgaacgggcgcgggaggatgcggagaggaggaaccagctgttgcagagggaaatggaggagtttttttcgaccctaggaagcttgactgttggggcaaaaggtgccagggccccaaagtaaaaggaatggcagagctcacttctgtaccacgtctgctggtctccagccttg

SEQ ID NO: 89443 - DNA, 1770 bp, Artificial Sequence
  derived and/or modified sequence
atggcatcctcgcaaagggacatggaagactgggttcaagccatcagacgggtaatttgggcgcctctgggcggagggactgcacggcgatcccatgctcatcctctagagcccctgccacctggcatttttgggcagagacttgaggagactgtccaccacgaacggaaatatggaccccgtctggctccccttctcgtggagcaatgtgtggattttattagggagaggggtctcactgaggaaggcctcttccgaatgccaggtcaggcaaacttggtgagggatctccaagactccttcgattgtggcgagaaaccacttttcgattccaccacagacgtgcatactgtcgcctctctgctgaaattgtacttgcgggaattgcccgaacctgtcgtgccctttgctaggtacgaggacttcctgtcttgtgcacaactcctgaccaaagatgaaggcgaaggtacgctagagctggctaaacaagtgagcaacctgccccaggccaattataatctgttgcggtatatctgcaagtttctggacgaagtgcaggcctatagcaacgtgaataaaatgtctgtgcaaaacctggccaccgttttcggacccaatatcctgagaccccaagtggaagatcccgtgacaattatggaggggacgtccctcgtccaacatctgatgactgtgctgattcgaaagcactcccagttgtttacggccccagtccccgagggccctacctcaccacgtggcggtctccagtgcgcagtaggatggggaagcgaagaagttaccagggatagccaaggggagcctgggggacccggattgccggctcacagaacctcatcactggatggtgccgctgtagctgtgctgagccggaccgcccctaccggacctggctcgcgttgttcacccggaaagaaggtacaaacattgccaagctggaaaagtagtttccgtcaacctaggtccctgagcgggtcccctaagggtggcggatcaagtctcgaggtccctattatttcttccggcggaaattggctgatgaacgggttatccagcttgagaggccatcgacgtgccagctctggtgataggctgaaggatagtgggagtgtccagcgactaagcacttatgacaatgtccccgcaccgggactggtgcctggcattcccagcgtggcttcaatggcctggagtggcgcaagcagctctgagagttccgtggggggtagcctgtcatcatgcaccgcctgtagagcctcggactccagcgcgaggtcttctctacataccgactgggctctggaaccttccccactgccatccagttcagaagaccctaaatccctcgacctggatcatagcatggacgaggctggcgctggtgcaagcaatagcgagccctcagaacccgatagccccacgcgggaacatgcaaggaggagtgaggcactccagggacttgttaccgaattaagggcagagctgtgcagacaacgaacggagtatgaacgctcggtgaaaagaatcgaagagggttctgccgacctgcggaaaaggatgtccagacttgaggaggaactggaccaagagaagaaaaaatacattatgctggagattaaactgcggaatagcgaacgggcacgggaagacgccgaacggagaaatcagctgctgcaacgagaaatggaggagttcttttccacgctaggttccctgacagttggcgcaaagggagcgagagccccaaaatag

SEQ ID NO: 89444 - DNA, 2145 bp, Artificial Sequence
  derived and/or modified sequence
atgctcagcccgaagatacgccaggcacgcagagctagatccaagagcttggtgatgggcgaacagtcaaggtccccaggccgtatgccctgtcctcatcgtttaggccctgtgttaaaagctggctggctcaagaaacaacggtccatcatgaaaaattggcagcagcgctggttcgtccttagaggtgatcaacttttttattacaaagacaaagacgagatcaaaccccagggcttcatttcgctccaggggacacaagtgactgaactaccccctgggccagaggaccccggtaagcacctgtttgagataagtcccggaggtgctggtgagcgggaaaaggttcccgcaaaccctgaggctttgctcctgatggcaagctcccaaagggatatggaagattgggtacaggctatccggagagtgatatgggccccactggggggtggcaccgcgcgacgatctcatgcccacccgcttgaacctctcccgccaggcatcttcggacagcggcttgaagaaaccgttcatcacgagcgcaagtacgggccacgtctcgccccactgttagtcgaacagtgcgtggacttcattagagagagaggcctcacagaggagggtctttttagaatgcctgggcaggccaatcttgtgagggacctgcaggattctttcgactgcggtgaaaaaccactcttcgatagtaccactgatgtgcacacagttgccagtctactgaagctttaccttagagagctgccggagcctgtggttccttttgcacgatatgaggactttctgtcctgcgcacagttgcttacaaaagatgagggagaaggcacactggaactagccaaacaggtgtctaatttgccccaagccaattataatctcttgaggtacatctgcaagttcctcgatgaagtgcaggcatattcaaacgtgaacaagatgagcgtgcagaatctggcaactgtgttcggccctaatatccttcggccacaggtggaggaccctgtcacgataatggagggaactagtttggtgcagcatttgatgacagttctgatacgcaagcatagccaactgttcacggcgccagtgccggaaggacccacgtctcctagaggaggactacagtgtgccgtcggctggggcagcgaggaagtcacccgggactcccagggggaacccggaggcccaggtctgcctgctcaccgcacgagttcacttgatggggcagcggtggctgtactgtcaaggactgctccgacaggcccaggttctagatgtagcccagggaagaaggttcagacactgcccagctggaagtcctcatttcgacagccccgtagcctctcagggagccctaaaggtggcggttcatcactggaggtccctatcattagtagcggtgggaactggctgatgaacggtttatctagcctgagaggccaccgcagagcatcttccggcgacagattgaaagacagcgggagtgtacagaggttatcaacatacgataacgtcccagctccagggcttgtcccaggaattcctagcgtggcttccatggcttggtccggagcatcctcttcagagagttccgtgggcggatcgttgagctcttgtactgcatgccgcgcatccgactcgagtgctagaagctccctgcatactgactgggcactggagcctagtccgcttccctcctcatcagaggatccaaagagcctcgacctagatcatagcatggatgaggccggagctggcgcatccaattccgagccatctgagccagattctcctactagggaacacgccagaagaagcgaggccttgcagggactcgtgactgagttgagagccgagctgtgccgacaaagaactgagtatgagagatctgttaagagaatagaagaggggtcagctgacctgaggaaaagaatgagtcggctcgaggaagaactggatcaagaaaaaaagaaatacatcatgttggagatcaaactacgtaactccgagcgcgcacgcgaggatgctgagaggaggaaccaactgctccagagagagatggaggagttttttagcactttagggtctttgaccgtgggtgctaagggagcacgggctcccaaatag

SEQ ID NO: 89445 - protein, 704 aa, Artificial Sequence
  derived and/or modified sequence
MLPTASSKRRTFAARYFTRSKSLVMGEQSRSPGRMPCPHRLGPVLKAGWLKKQRSIMKNWQQRWFVLRGDQLFYYKDKDEIKPQGFISLQGTQVTELPPGPEDPGKHLFEISPGGAGEREKVPANPEALLLMASSQRDMEDWVQAIRRVIWAPLGGGIFGQRLEETVHHERKYGPRLAPLLVEQCVDFIRERGLTEEGLFRMPGQANLVRDLQDSFDCGEKPLFDSTTDVHTVASLLKLYLRELPEPVVPFARYEDFLSCAQLLTKDEGEGTLELAKQVSNLPQANYNLLRYICKFLDEVQAYSNVNKMSVQNLATVFGPNILRPQVEDPVTIMEGTSLVQHLMTVLIRKHSQLFTAPVPEGPTSPRGGLQCAVGWGSEEVTRDSQGEPGGPGLPAHRTSSLDGAAVAVLSRTAPTGPGSRCSPGKKVQTLPSWKSSFRQPRSLSGSPKGGGSSLEVPIISSGGNWLMNGLSSLRGHRRASSGDRLKDSGSVQRLSTYDNVPAPGLVPGIPSVASMAWSGASSSESSVGGSLSSCTACRASDSSARSSLHTDWALEPSPLPSSSEDPKSLDLDHSMDEAGAGASNSEPSEPDSPTREHARRSEALQGLVTELRAELCRQRTEYERSVKRIEEGSADLRKRMSRLEEELDQEKKKYIMLEIKLRNSERAREDAERRNQLLQREMEEFFSTLGSLTVGAKGARAPK

SEQ ID NO: 89446 - DNA, 2115 bp, Artificial Sequence
  derived and/or modified sequence
atgctgcccaccgccagcagcaagagaagaaccttcgccgccagatacttcaccagaagcaagagcctggtgatgggcgagcagagcagaagccccggcagaatgccctgcccccacagactgggccccgtgctgaaggccggctggctgaagaagcagagaagcatcatgaagaactggcagcagagatggttcgtgctgagaggcgaccagctgttctactacaaggacaaggacgagatcaagccccagggcttcatcagcctgcagggcacccaggtgaccgagctgccccccggccccgaggaccccggcaagcacctgttcgagatcagccccggcggcgccggcgagagagagaaggtgcccgccaaccccgaggccctgctgctgatggccagcagccagagagacatggaggactgggtgcaggccatcagaagagtgatctgggcccccctgggcggcggcatcttcggccagagactggaggagaccgtgcaccacgagagaaagtacggccccagactggcccccctgctggtggagcagtgcgtggacttcatcagagagagaggcctgaccgaggagggcctgttcagaatgcccggccaggccaacctggtgagagacctgcaggacagcttcgactgcggcgagaagcccctgttcgacagcaccaccgacgtgcacaccgtggccagcctgctgaagctgtacctgagagagctgcccgagcccgtggtgcccttcgccagatacgaggacttcctgagctgcgcccagctgctgaccaaggacgagggcgagggcaccctggagctggccaagcaggtgagcaacctgccccaggccaactacaacctgctgagatacatctgcaagttcctggacgaggtgcaggcctacagcaacgtgaacaagatgagcgtgcagaacctggccaccgtgttcggccccaacatcctgagaccccaggtggaggaccccgtgaccatcatggagggcaccagcctggtgcagcacctgatgaccgtgctgatcagaaagcacagccagctgttcaccgcccccgtgcccgagggccccaccagccccagaggcggcctgcagtgcgccgtgggctggggcagcgaggaggtgaccagagacagccagggcgagcccggcggccccggcctgcccgcccacagaaccagcagcctggacggcgccgccgtggccgtgctgagcagaaccgcccccaccggccccggcagcagatgcagccccggcaagaaggtgcagaccctgcccagctggaagagcagcttcagacagcccagaagcctgagcggcagccccaagggcggcggcagcagcctggaggtgcccatcatcagcagcggcggcaactggctgatgaacggcctgagcagcctgagaggccacagaagagccagcagcggcgacagactgaaggacagcggcagcgtgcagagactgagcacctacgacaacgtgcccgcccccggcctggtgcccggcatccccagcgtggccagcatggcctggagcggcgccagcagcagcgagagcagcgtgggcggcagcctgagcagctgcaccgcctgcagagccagcgacagcagcgccagaagcagcctgcacaccgactgggccctggagcccagccccctgcccagcagcagcgaggaccccaagagcctggacctggaccacagcatggacgaggccggcgccggcgccagcaacagcgagcccagcgagcccgacagccccaccagagagcacgccagaagaagcgaggccctgcagggcctggtgaccgagctgagagccgagctgtgcagacagagaaccgagtacgagagaagcgtgaagagaatcgaggagggcagcgccgacctgagaaagagaatgagcagactggaggaggagctggaccaggagaagaagaagtacatcatgctggagatcaagctgagaaacagcgagagagccagagaggacgccgagagaagaaaccagctgctgcagagagagatggaggagttcttcagcaccctgggcagcctgaccgtgggcgccaagggcgccagagcccccaagtag

SEQ ID NO: 89447 - DNA, 2115 bp, Artificial Sequence
  derived and/or modified sequence
atgctcccaaccgcctcttcaaagcggcgcacatttgccgcccggtacttcacccggagtaaatctcttgtaatgggtgagcagtcgcggtcccccggccgtatgccatgtccgcatagactggggcccgtgctgaaagcaggatggctgaaaaaacagcggagcataatgaaaaactggcagcagcgttggttcgtactaaggggagaccaattattctactataaggacaaggatgagattaagccgcaagggttcatcagcctgcaaggcacccaggtgactgaattgccaccgggccctgaagaccctgggaaacacctgtttgaaatctcacctgggggcgccggggaaagggagaaggtgcccgccaatcctgaggccttacttctgatggccagcagccagcgagatatggaggactgggtccaggctatccgcagagtcatttgggcccctctgggtggcggtattttcggacagcgtttagaggagaccgttcaccacgaacgtaaatacgggccccggttagcccctttgctcgtagaacagtgcgtggattttatcagggagcgaggactgaccgaggagggactatttagaatgccgggtcaggcaaaccttgtgcgcgacctccaagatagctttgattgcggagaaaagcctctgtttgattccacaacagacgtgcacacagtggcatcgctcctcaagttataccttagggagctgccggagcccgtggtccccttcgcccgttacgaggattttctttcatgtgcacagcttctgacgaaagacgaaggtgaggggactttggagttggcaaagcaggtttccaacttgcctcaggcaaactacaatctgctaagatatatctgcaagtttttggacgaggtgcaagcctatagcaacgtgaataagatgtcggtccagaacctcgcgacagtatttgggcctaatatcctccgtcctcaggtggaggacccagtgaccattatggaagggactagtctggtccagcacctgatgactgtgttaatccggaaacatagtcagctgttcacagcgcccgtgcctgagggtcccacatctcctaggggtggtctgcagtgtgccgtgggttggggcagcgaggaggttacgcgtgatagccagggagagcccggcggtcctggcttgccagcacatagaacttcatccctggacggggctgctgtcgcggtcctgagtcgcactgccccaaccgggcccggcagccggtgctcccctgggaagaaagtgcaaaccctgccaagttggaagtcctcgttcagacagccacgcagccttagtggatccccaaaaggaggcgggagttctttagaggttcccatcatatcttctggcggcaactggctgatgaacggccttagctctctccgcggacatcgccgagcatcatccggcgatcgcctgaaggactccgggtcagttcagcgcttgtccacctatgataatgtgcctgctccaggcctagtcccaggtataccaagcgtagcctcgatggcctggtctggtgcatcctcctctgaaagtagtgttggaggcagtcttagtagctgcacggcctgcagagccagcgacagctccgcgcggagcagcctgcatacagactgggccctggagccctccccactcccttcatcttctgaagatcccaaatctctggacctagatcacagtatggatgaggcaggagcaggggctagcaatagtgagcccagcgaacctgattctccgacccgggagcacgcccgccggagcgaggctctgcagggcctggtgaccgagttgcgggcggagttgtgcagacaacgaaccgaatacgaacggagtgttaagcggattgaagaagggagtgctgatctgaggaaaagaatgagtcgcttagaagaggagctggaccaggaaaagaagaagtatatcatgctggaaattaaactccggaactcggagcgtgctcgtgaggacgcagaaagacgcaaccagctgttgcagagggagatggaggaatttttcagtaccttgggtagtttaacagttggcgccaaaggcgccagagcacccaagtag

SEQ ID NO: 89448 - DNA, 2115 bp, Artificial Sequence
  derived and/or modified sequence
atgctgcccacagccagcagcaagaggaggacctttgctgcccgctacttcaccaggagcaagagcctggtgatgggagagcagagccgcagccctggccgcatgccctgcccccaccggctgggccctgtgctgaaggccggctggctgaagaagcagaggagcatcatgaagaactggcagcagcgctggtttgtgctgcggggggaccagctgttctactacaaggacaaggatgagatcaagccccagggcttcatcagcctgcagggcacccaggtgacagagctgcccccaggccctgaggaccccgggaagcacctgtttgagatcagccctggaggagctggggagcgggagaaggtgcctgccaaccctgaggccctgctgctgatggccagcagccagagggacatggaggactgggtgcaggccatcagaagagtcatctgggcccccctgggcggcggcatcttcggccagaggctggaggagaccgtgcaccacgagaggaaatatggcccccggctggcccccctgctggtggagcagtgtgtggacttcatccgggagcggggcctgacagaggagggcctcttcaggatgcctggccaggccaacctggtgcgggacctgcaggacagctttgactgtggggagaagcccctgtttgacagcaccacagatgtgcacacagtggccagcctgctgaagctgtacctgcgggagctgcctgagcctgtggtgccctttgcccgctatgaggacttcctgagctgtgcccagctgctgaccaaggatgaaggagagggcaccctggagctggccaagcaggtgagcaacctgccccaggccaactacaacctgctgcgctacatctgcaagttcctggatgaggtgcaggcctacagcaatgtgaacaagatgtctgtgcagaacctggccaccgtgtttggccccaacatcctgcggccccaggtggaggaccctgtgaccatcatggagggcaccagcctggtgcagcacctgatgacagtgctgatcaggaagcacagccagctgttcaccgcccctgtgcctgagggccccaccagcccccggggcggcctgcagtgtgctgtgggctggggcagcgaggaggtgacccgggacagccagggcgagcccggcggccctggcctgcctgcccacaggaccagcagcctggatggagctgctgtggccgtgctgagcaggacagcccccaccggccctggcagccgctgcagccctgggaagaaggtgcagaccctgcccagctggaagagcagcttccggcagcccaggagcctgagcggcagccccaagggcggcggcagcagcctggaggtgcccatcatcagcagcggcggcaactggctgatgaatggcctgagcagcctgcggggccaccggcgggccagcagcggggaccggctgaaggacagcggctctgtgcagaggctgagcacctatgacaacgtgcctgcccctggcctggtgcccggcatccccagcgtggcctccatggcctggagcggggccagcagcagcgagagctctgtgggcggcagcctgagcagctgcacagcctgccgggccagtgacagcagcgcccggagcagcctgcacacagactgggccctggagcccagccccctgcccagcagcagcgaggaccccaagagcctggacctggaccacagcatggatgaagctggagctggggccagcaacagcgagcccagcgagccagacagccccacccgggagcacgcccggcgctctgaggccctgcagggcctggtgacagagctgcgggcagagctgtgccggcagaggacagaatatgaaagatctgtgaagagaattgaggagggcagcgctgacctgaggaagaggatgagccggctggaggaggagctggaccaggagaagaagaagtacatcatgctggagatcaagctgagaaattctgagcgggcccgggaggatgctgagaggaggaaccagctgctgcagcgggagatggaggagttcttcagcaccctgggcagcctgactgtgggcgccaagggggcccgggcccccaagtag

SEQ ID NO: 89449 - DNA, 2115 bp, Artificial Sequence
  derived and/or modified sequence
atgctgcccaccgccagcagcaagcggcggaccttcgccgcccggtatttcacccggagtaaatcgttggtgatgggggagcagagtcgctcacccggcaggatgccctgtccgcacagattaggccccgttctgaaggcgggttggttgaagaagcagaggagtatcatgaaaaactggcaacagcggtggtttgtgctcaggggggatcaattgttctattacaaggacaaggacgaaatcaagccgcagggcttcataagtctccaaggtacccaggtcactgaactaccccctggaccagaggacccaggaaagcacctgttcgaaatctcaccggggggcgccggggagcgagagaaagtgcctgccaatcccgaagcactgctattgatggccagttctcagagggacatggaagattgggtccaggcgatcagacgtgtgatatgggcccctttgggcggtggaattttcggacagagattagaggagactgtacaccacgaaaggaagtatgggcctcggttggctcctttactggtggagcagtgcgttgactttattcgggagaggggacttactgaagaggggcttttccgaatgcccgggcaggccaacctggtgagggatctgcaggactcttttgattgcggtgaaaagccccttttcgacagcacaacagacgtccacaccgtcgcatcactgctgaagctatacctacgagagcttcccgaaccagtggtgccattcgctcgatatgaggactttctgtcttgcgctcaactgctgaccaaagacgagggcgaaggaacgctcgagctggctaagcaggtgtcaaatctgccgcaggcaaactacaacctcctgcggtacatctgcaagtttttagatgaagtacaagcttactctaacgtcaacaagatgtctgtgcaaaacttagccactgtgtttgggccgaacattttaaggcctcaggtggaggacccagtcaccatcatggaaggcacgagcttggtgcaacacttgatgaccgtgctgataaggaagcatagtcaacttttcacagcgccggtgccagaggggccaacttcacctcggggaggtctgcagtgcgccgtcggatggggatccgaagaggtgaccagagatagccagggcgaacctggaggcccggggcttcccgcacatcgtacctcaagtttggatggagcagcagtcgctgtgctgagtcgcacagcccctacgggaccaggttcacgatgctctccgggcaagaaagttcagactctgccatcatggaagtcatcatttagacaaccacgctcgctctcagggagccccaagggcggtggcagcagcctggaagtccccatcatttcttcgggaggaaactggctaatgaacgggctgtcaagtctgagaggccataggagagcatctagcggagaccgccttaaggatagcgggtccgtgcagaggctctctacttatgataatgtgcccgctcctgggctggtacccgggataccttcagtagcctcaatggcatggtcaggggcctccagtagtgagagctcagtcggcggatccttgtcatcttgcactgcatgtcgcgcaagcgacagttcagcacgaagcagtctgcatacagactgggctctcgagccctcccctttgccgtcatctagcgaagatccgaaatctctggacctggaccattcaatggatgaagccggggctggcgcctctaatagcgaaccaagcgagccggactcaccaaccagagagcacgcccgccgatcagaagccttgcagggactggtcaccgaactacgcgcggaactgtgcaggcaaagaacagaatacgaaaggagtgtgaaacgtattgaggagggatcagcagacctgcggaaacgcatgagccggttggaagaggaacttgaccaggagaaaaagaagtacatcatgttggagattaagctgagaaactccgagagagcgcgcgaggacgctgagagacgcaatcaactgttgcaaagagagatggaggagttcttctcaactctgggatcccttaccgtgggggccaagggcgccagggcccccaagtag

SEQ ID NO: 89450 - DNA, 2115 bp, Artificial Sequence
  derived and/or modified sequence
atgctgcccacagcaagcagtaagcgaagaacattcgccgcacgttacttcactcgctccaaatctctagtgatgggggaacagtcacgtagtcccggacgaatgccctgtccccacagactgggaccagttcttaaggcaggttggttgaaaaagcaaagaagcatcatgaagaactggcagcagcgctggtttgtcttgaggggcgaccagttgttctattacaaagacaaagatgagattaagcctcagggtttcattagcttacagggaacacaagtgacagaattgccacctggaccggaagaccccggaaaacaccttttcgaaatcagtcctggcggagcaggcgaaagagagaaagtgccagctaatcctgaagctctgttgctgatggcctcttcccagcgcgatatggaagactgggtgcaggccatacgaagggtcatttgggcacctctcggtggcggtatcttcggccaacggctcgaggagaccgtgcatcacgaacgaaagtatggtcctaggctcgcgccactgttggttgagcagtgtgtggattttataagagaaagaggcctaaccgaagaagggctgtttaggatgcctggtcaggctaatctggtcagggacttgcaggatagttttgactgtggagagaaacccctgtttgactcaactaccgatgtccacactgtcgcaagtttattaaagctgtatctgagggaattgccagaacctgtggtgccatttgcccgttatgaggactttctgtcgtgcgcgcagttgttgaccaaagatgagggggagggcaccctggagctggctaaacaggtctcaaatctaccccaggccaattataatttgctgaggtatatctgtaaatttttagacgaggtgcaggcttacagtaacgttaacaagatgtccgtgcagaatttggccaccgtgttcgggcctaatattctaagacctcaagtggaagatccagtaactattatggaagggacttctcttgtgcagcacctcatgacggtactcattaggaaacacagtcagctgttcactgcccctgttcccgagggtcctacttcgccaagaggcggtttacagtgtgctgtgggttggggttccgaagaagtcacacgggacagtcagggcgagcccggtggcccagggctccctgcacataggaccagctctctggacggcgctgccgtggcagtcctgtctagaacagcccctactggaccgggaagccgttgttctcccggtaaaaaggtgcagaccctgcctagttggaagtcatcatttcgccagcccagatctctcagcggaagccccaaaggcggtggtagttctttggaggtgcctattatttccagcggtggtaactggctgatgaacggattgtctagccttcggggtcacaggcgggctagctcaggcgacagactaaaagactcaggcagcgtgcagcggctgtccacatatgataacgtgccagcccctggactggtgcctggtattccatctgtcgccagtatggcctggtccggggcaagctcctctgagtcgtcggtcggcggaagcctgtcaagctgtacagcgtgtagagcaagcgactcatcggctcggtcgtccctgcataccgactgggccttggaaccctctccccttccaagttcaagtgaagatcccaagagtttggatctggatcattccatggatgaggcaggtgctggggcttcgaacagtgaaccttcagagcccgacagccccacaagagagcatgcaagacgttcggaagctttacaagggctggtgacagagcttagggcagaactgtgtcgacagcggacagagtacgaacgatctgtcaaacggatcgaggaaggcagtgcagatctgcgcaaaaggatgtctagattggaggaggagctcgatcaggagaagaagaaatacattatgcttgagatcaagctgcggaattctgagcgcgcaagagaggatgcggagcgaagaaaccagttgttgcaaagggagatggaagaattcttctctacacttggatctcttactgtcggcgctaaaggcgcaagggccccaaagtag

SEQ ID NO: 89451 - DNA, 2595 bp, Artificial Sequence
  derived and/or modified sequence
acttctcaattctttgttctgtgaagtggttgtcactattgttcccattttacagatttgaggaactgataccccaagaccccgtgactttctcaaggccattccaagatccctagatgcacttacgcttaatgaactaattcttcacagcgaggcttcttgcttaaaatccaagaaaataccagataaagggcattctaaatatatttcttttctatagatgtggatctcctgttactggaaaacaggaattagcttgtctgcttgaggatgtggttggttctttataaaaaggatacagaagaaatttgcacagactgccagcttcattatgctgccgacagcttccagcaaaaggaggacgtttgcagccagatatttcacccgctccaaaagcctagtgatgggggagcagagccggagccctgggcggatgccgtgccctcacaggctgggccccgtgctgaaggcgggctggctgaagaagcagaggagcatcatgaagaactggcagcagcgctggtttgtgctgcgtggggatcagcttttctactacaaggacaaagatgagatcaagccccagggatttatttctctacaagggacacaggtgactgaacttcctcctggccccgaggacccagggaagcacctctttgagatcagcccaggtggtgccggggagcgggagaaggtgccggccaaccccgaggcgctcctgctcatggccagctcccagcgtgacatggaggactgggtgcaggccatccgccgagtcatctgggccccgctgggcggagggatctttgggcagcgcctagaggaaacagtccaccacgagcggaagtatggcccccgcctggcgcccctgctggtggagcagtgtgtggacttcatccgggagcgcgggctcactgaggaggggctgttccgcatgccaggccaggccaacctggtgagggacctgcaggattccttcgactgtggggagaagccactgtttgacagcacaacagacgtgcacacggtggcctccctgctgaagctgtacctgcgggagctccccgagcccgtggtccccttcgccaggtacgaggacttcctcagctgcgcccagctgctcaccaaggacgagggggagggcactctggagttggctaaacaagtgagcaaccttcctcaggcaaattacaacctgctcagatacatctgcaagtttctggatgaagttcaggcatactcaaatgtcaacaagatgagtgtccagaatctggcaaccgtttttggacctaacattctgcggccacaggtagaggacccagtaaccatcatggaaggcacttccctcgtccagcacctgatgaccgtcctcatccgcaaacacagccagctcttcacggcaccggtcccggaagggcccacctccccgcgcgggggcctgcaatgcgcagtggggtggggctccgaggaggtcaccagggacagccaaggagagcccggcggccccggcctgcccgcgcacaggacctcttccctggacggggcggccgtggcggtgctctccagaacagcccccacggggccggggagccggtgcagccctgggaagaaggtgcagaccctgcccagttggaagtcctccttccggcagccgaggtccctatcgggaagcccgaaggggggcggctcatccctggaggtgcccatcatctcctccggcgggaactggcttatgaacgggctgtcctccctgcgcggacaccgccgggcctcgtcgggagaccggctcaaggactcgggctccgtgcagagactctccacctacgacaatgtgcccgcgccgggcctggtccccggcatacccagcgtggccagtatggcgtggtccggggcctcgtccagcgagtcgtcggtggggggctcactcagcagctgcacggcctgccgcgccagcgactcgtctgcccgcagttccctgcacaccgactgggccctggagccctccccgctccccagcagcagcgaggaccccaagtccctggacctggaccacagcatggacgaggcgggcgcgggtgccagcaacagcgagcccagcgagccggacagccccacccgggaacacgcgcgccgctccgaggccttacaggggctggtcactgagctcagggccgagctgtgccgccagcggactgagtacgagaggagtgtgaaaagaatcgaagaagggagtgctgacctgagaaaacgaatgtcccggttagaagaagaactggaccaggaaaagaaaaaatacatcatgctggaaataaagctgcggaactctgaacgggcgcgggaggatgcggagaggaggaaccagctgttgcagagggaaatggaggagtttttttcgaccctaggaagcttgactgttggggcaaaaggtgccagggccccaaagtaaaaggaatggcagagctcacttctgtaccacgtctgctggtctccagccttgtatggagttagaagcgtctgtatctctggagcagccaggcgctctggagccagctggagagagagagatcctgatacctctgtggggactgtggggac

SEQ ID NO: 89452 - protein, 608 aa, Artificial Sequence
  derived and/or modified sequence
MPFWPIRCLKRSRRMPRGGAGEREKVPANPEALLLMASSQRDMEDWVQAIRRVIWAPLGGGIFGQRLEETVHHERKYGPRLAPLLVEQCVDFIRERGLTEEGLFRMPGQANLVRDLQDSFDCGEKPLFDSTTDVHTVASLLKLYLRELPEPVVPFARYEDFLSCAQLLTKDEGEGTLELAKQVSNLPQANYNLLRYICKFLDEVQAYSNVNKMSVQNLATVFGPNILRPQVEDPVTIMEGTSLVQHLMTVLIRKHSQLFTAPVPEGPTSPRGGLQCAVGWGSEEVTRDSQGEPGGPGLPAHRTSSLDGAAVAVLSRTAPTGPGSRCSPGKKVQTLPSWKSSFRQPRSLSGSPKGGGSSLEVPIISSGGNWLMNGLSSLRGHRRASSGDRLKDSGSVQRLSTYDNVPAPGLVPGIPSVASMAWSGASSSESSVGGSLSSCTACRASDSSARSSLHTDWALEPSPLPSSSEDPKSLDLDHSMDEAGAGASNSEPSEPDSPTREHARRSEALQGLVTELRAELCRQRTEYERSVKRIEEGSADLRKRMSRLEEELDQEKKKYIMLEIKLRNSERAREDAERRNQLLQREMEEFFSTLGSLTVGAKGARAPK

SEQ ID NO: 89453 - DNA, 1827 bp, Artificial Sequence
  derived and/or modified sequence
atgcccttctggcccatcagatgcctgaagagaagcagaagaatgcccagaggcggcgccggcgagagagagaaggtgcccgccaaccccgaggccctgctgctgatggccagcagccagagagacatggaggactgggtgcaggccatcagaagagtgatctgggcccccctgggcggcggcatcttcggccagagactggaggagaccgtgcaccacgagagaaagtacggccccagactggcccccctgctggtggagcagtgcgtggacttcatcagagagagaggcctgaccgaggagggcctgttcagaatgcccggccaggccaacctggtgagagacctgcaggacagcttcgactgcggcgagaagcccctgttcgacagcaccaccgacgtgcacaccgtggccagcctgctgaagctgtacctgagagagctgcccgagcccgtggtgcccttcgccagatacgaggacttcctgagctgcgcccagctgctgaccaaggacgagggcgagggcaccctggagctggccaagcaggtgagcaacctgccccaggccaactacaacctgctgagatacatctgcaagttcctggacgaggtgcaggcctacagcaacgtgaacaagatgagcgtgcagaacctggccaccgtgttcggccccaacatcctgagaccccaggtggaggaccccgtgaccatcatggagggcaccagcctggtgcagcacctgatgaccgtgctgatcagaaagcacagccagctgttcaccgcccccgtgcccgagggccccaccagccccagaggcggcctgcagtgcgccgtgggctggggcagcgaggaggtgaccagagacagccagggcgagcccggcggccccggcctgcccgcccacagaaccagcagcctggacggcgccgccgtggccgtgctgagcagaaccgcccccaccggccccggcagcagatgcagccccggcaagaaggtgcagaccctgcccagctggaagagcagcttcagacagcccagaagcctgagcggcagccccaagggcggcggcagcagcctggaggtgcccatcatcagcagcggcggcaactggctgatgaacggcctgagcagcctgagaggccacagaagagccagcagcggcgacagactgaaggacagcggcagcgtgcagagactgagcacctacgacaacgtgcccgcccccggcctggtgcccggcatccccagcgtggccagcatggcctggagcggcgccagcagcagcgagagcagcgtgggcggcagcctgagcagctgcaccgcctgcagagccagcgacagcagcgccagaagcagcctgcacaccgactgggccctggagcccagccccctgcccagcagcagcgaggaccccaagagcctggacctggaccacagcatggacgaggccggcgccggcgccagcaacagcgagcccagcgagcccgacagccccaccagagagcacgccagaagaagcgaggccctgcagggcctggtgaccgagctgagagccgagctgtgcagacagagaaccgagtacgagagaagcgtgaagagaatcgaggagggcagcgccgacctgagaaagagaatgagcagactggaggaggagctggaccaggagaagaagaagtacatcatgctggagatcaagctgagaaacagcgagagagccagagaggacgccgagagaagaaaccagctgctgcagagagagatggaggagttcttcagcaccctgggcagcctgaccgtgggcgccaagggcgccagagcccccaagtag

SEQ ID NO: 89454 - DNA, 1827 bp, Artificial Sequence
  derived and/or modified sequence
atgccattttggccgattcgatgtctcaagcgctctcggcggatgcctcgtgggggggccggagaacgggagaaggttcctgctaacccagaggctctcctgctcatggcgtccagccagcgggacatggaggactgggttcaggcaattaggagagtgatttgggcacctttgggaggaggcattttcggacagcgacttgaagagacagtgcaccacgaaagaaagtatggtcccagattagcacctctgcttgttgagcagtgtgtagactttatacgtgagagaggacttaccgaagagggactgttccggatgcccggccaggccaaccttgtgcgcgatctacaggattcattcgactgtggggagaagccgctcttcgacagcaccacggatgtgcacaccgtcgctagcctcttgaagctctacctacgggagttgccagagccagttgttcccttcgctagatacgaggattttctgagctgtgctcagttgctaacaaaggacgagggagagggaaccctggaactggcaaagcaagtcagcaacctcccgcaagctaactataatctcttgcgctatatttgtaaattcttggatgaggtgcaggcatacagtaatgtgaacaagatgtcagtccagaatcttgctaccgtttttggaccaaacatattacgtcctcaggtagaggacccagtcacaatcatggaaggtacaagtctggtgcagcacctcatgacagttttaatcaggaagcacagccagctttttacggccccggttccagaggggccaacatcgccacgaggcggtctccagtgtgcagtgggctggggttctgaagaagtgactcgagatagtcagggcgagcctggtggccccgggctaccagcgcaccgaacatcaagcctggatggggcagcagtggccgtgctgtccagaactgctcccacgggtcctggctctcggtgctcacccgggaaaaaggtccaaacactgccctcctggaaaagtagctttaggcagccgaggagcctttctggatctcccaagggcggggggagtagcttagaggtcccaattatctcttccggaggcaattggcttatgaacggtcttagcagtttacgtggccaccgcagagcctccagcggggatcgtctcaaagactccggctccgttcaaagactgagtacctatgacaatgtccctgccccgggcttggtgcccggcattccatcagtcgctagtatggcctggtccggcgcttctagcagcgaatcgtcagtcggcggatctctttcgagttgtacggcctgcagagcctctgactcatccgctaggagctctctccacacggactgggctttggaaccatctcccctgccctcttctagcgaagaccctaagagcttggatttggatcactcgatggacgaggctggcgccggggccagcaactcagagcctagcgagccagatagcccgacgcgggaacatgctaggcgctccgaggcattgcagggactggtcacagaactgcgtgcggaactgtgcagacagagaaccgaatacgaaagatctgtgaagaggattgaggaggggtccgctgacctgaggaaacgaatgagccggttagaagaggagcttgatcaggagaagaaaaagtacattatgctggagataaagttgagaaactccgaacgggccagggaggacgctgaacggagaaatcagctgctgcagcgggaaatggaagagttcttttccaccctgggctccctgaccgtcggcgccaaaggcgccagggcacctaaatag

SEQ ID NO: 89455 - DNA, 1827 bp, Artificial Sequence
  derived and/or modified sequence
atgcccttctggcccatccgctgcctgaagaggagcaggaggatgccccggggcggggccggggagcgggagaaggtgcctgccaaccctgaggccctgctgctgatggccagcagccagagggacatggaggactgggtgcaggccatcagaagagtcatctgggcccccctgggcggcggcatcttcggccagaggctggaggagaccgtgcaccacgagaggaaatatggcccccggctggcccccctgctggtggagcagtgtgtggacttcatccgggagcggggcctgacagaggagggcctcttcaggatgcctggccaggccaacctggtgcgggacctgcaggacagctttgactgtggggagaagcccctgtttgacagcaccacagatgtgcacacagtggccagcctgctgaagctgtacctgcgggagctgcctgagcctgtggtgccctttgcccgctatgaggacttcctgagctgtgcccagctgctgaccaaggatgaaggagagggcaccctggagctggccaagcaggtgagcaacctgccccaggccaactacaacctgctgcgctacatctgcaagttcctggatgaggtgcaggcctacagcaatgtgaacaagatgtctgtgcagaacctggccaccgtgtttggccccaacatcctgcggccccaggtggaggaccctgtgaccatcatggagggcaccagcctggtgcagcacctgatgacagtgctgatcaggaagcacagccagctgttcaccgcccctgtgcctgagggccccaccagcccccggggcggcctgcagtgtgctgtgggctggggcagcgaggaggtgacccgggacagccagggcgagcccggcggccctggcctgcctgcccacaggaccagcagcctggatggagctgctgtggccgtgctgagcaggacagcccccaccggccctggcagccgctgcagccctgggaagaaggtgcagaccctgcccagctggaagagcagcttccggcagcccaggagcctgagcggcagccccaagggcggcggcagcagcctggaggtgcccatcatcagcagcggcggcaactggctgatgaatggcctgagcagcctgcggggccaccggcgggccagcagcggggaccggctgaaggacagcggctctgtgcagaggctgagcacctatgacaacgtgcctgcccctggcctggtgcccggcatccccagcgtggcctccatggcctggagcggggccagcagcagcgagagctctgtgggcggcagcctgagcagctgcacagcctgccgggccagtgacagcagcgcccggagcagcctgcacacagactgggccctggagcccagccccctgcccagcagcagcgaggaccccaagagcctggacctggaccacagcatggatgaagctggagctggggccagcaacagcgagcccagcgagccagacagccccacccgggagcacgcccggcgctctgaggccctgcagggcctggtgacagagctgcgggcagagctgtgccggcagaggacagaatatgaaagatctgtgaagagaattgaggagggcagcgctgacctgaggaagaggatgagccggctggaggaggagctggaccaggagaagaagaagtacatcatgctggagatcaagctgagaaattctgagcgggcccgggaggatgctgagaggaggaaccagctgctgcagcgggagatggaggagttcttcagcaccctgggcagcctgactgtgggcgccaagggggcccgggcccccaagtag

SEQ ID NO: 89456 - DNA, 1827 bp, Artificial Sequence
  derived and/or modified sequence
atgcccttctggcccatccggtgcctgaagcggagccggcggatgccgaggggtggggccggggagagagaaaaggttccagccaatcccgaggcactactgctcatggcatcttctcagcgcgacatggaggactgggtgcaggccattcggagagtgatctgggcaccacttggtggagggattttcgggcagcgactggaggagacagttcaccacgagcgtaaatatggaccacgattagcccctctgctggtggaacagtgcgtggactttattcgcgagcggggactgaccgaggaaggcctgttccgcatgccgggacaggcgaatctggttcgcgacctgcaggactcatttgattgtggggaaaagccccttttcgacagcacgactgacgtacataccgtggcttcactgcttaagttgtacctgagggagcttcctgagcccgttgtgccctttgcacgctacgaggattttctctcatgtgcccaactcctgacaaaagacgaaggcgaagggaccttagagctggctaagcaggtgagcaatttgcctcaagccaattacaacctgctcagatatatttgcaaatttctggacgaggtacaggcctattccaacgtgaacaagatgagtgtgcagaatctggcgacagtgtttgggcctaatatcttgaggccacaagtggaggatccagtgactattatggaaggcacttctctcgtccagcacctgatgacagttttgattagaaaacactctcaattgtttacggccccagtgccggaaggacctacatctcccaggggcggacttcagtgtgctgtgggctggggatccgaagaagtcacacgggattcccagggggaacccggcggtccaggactaccagcccataggacgtccagtctcgacggcgcagccgtagccgtgctgtccaggactgccccaaccggacctggatcacggtgtagcccgggcaagaaggtgcaaaccctccccagttggaaatcgtcctttagacagcctcgctctctgtctggttcgccaaaaggcggaggttcttctctggaggtgccgattataagctccggcggcaattggcttatgaatggactgtcgagtctcagaggccatagacgggcaagctctggagacagactcaaagactcaggaagcgtgcaaaggctttctacttacgacaatgtgcccgccccgggcctcgtgcctgggattccaagcgtggcttccatggcatggtccggggcgtcatcaagcgagtcaagtgtgggggggagcttgtccagctgcaccgcttgccgcgcaagtgactcaagtgcgcggtccagtctgcatacagactgggctcttgagcccagcccactgccttcaagcagtgaagatccgaaaagcctggacttggatcattccatggacgaagccggggccggagcctctaacagcgaaccctcagagccggatagtcccacacgcgaacacgccagaagatccgaagcactgcagggtctagttactgaactgcgcgccgagttgtgcagacagagaactgagtatgaacggagtgtgaagaggattgaggagggctccgcagatctgcggaagagaatgagccgtctcgaagaggagctcgatcaggaaaaaaagaaatacattatgctggagatcaagctgaggaattcagaacgcgcccgggaagacgccgagcgtcgcaaccagctgctgcagcgggagatggaggaattcttcagcacactgggctccctgacagttggggccaagggcgcaagagcccctaaatag

SEQ ID NO: 89457 - DNA, 2340 bp, Artificial Sequence
  derived and/or modified sequence
aaaaggcctcagcctgatgcccacaggcagagcacacaggcagccgagtggccgcagccctgcagtggaggagtgcctcgtgcacctggtggttttctgcaccccaacaggtgtgtctggccactgctcctctcactgcagcccccgctgctccacaccatgcccttctggcccatcaggtgtctgaagaggagcaggcgtatgcccaggggtggtgccggggagcgggagaaggtgccggccaaccccgaggcgctcctgctcatggccagctcccagcgtgacatggaggactgggtgcaggccatccgccgagtcatctgggccccgctgggcggagggatctttgggcagcgcctagaggaaacagtccaccacgagcggaagtatggcccccgcctggcgcccctgctggtggagcagtgtgtggacttcatccgggagcgcgggctcactgaggaggggctgttccgcatgccaggccaggccaacctggtgagggacctgcaggattccttcgactgtggggagaagccactgtttgacagcacaacagacgtgcacacggtggcctccctgctgaagctgtacctgcgggagctccccgagcccgtggtccccttcgccaggtacgaggacttcctcagctgcgcccagctgctcaccaaggacgagggggagggcactctggagttggctaaacaagtgagcaaccttcctcaggcaaattacaacctgctcagatacatctgcaagtttctggatgaagttcaggcatactcaaatgtcaacaagatgagtgtccagaatctggcaaccgtttttggacctaacattctgcggccacaggtagaggacccagtaaccatcatggaaggcacttccctcgtccagcacctgatgaccgtcctcatccgcaaacacagccagctcttcacggcaccggtcccggaagggcccacctccccgcgcgggggcctgcaatgcgcagtggggtggggctccgaggaggtcaccagggacagccaaggagagcccggcggccccggcctgcccgcgcacaggacctcttccctggacggggcggccgtggcggtgctctccagaacagcccccacggggccggggagccggtgcagccctgggaagaaggtgcagaccctgcccagttggaagtcctccttccggcagccgaggtccctatcgggaagcccgaaggggggcggctcatccctggaggtgcccatcatctcctccggcgggaactggcttatgaacgggctgtcctccctgcgcggacaccgccgggcctcgtcgggagaccggctcaaggactcgggctccgtgcagagactctccacctacgacaatgtgcccgcgccgggcctggtccccggcatacccagcgtggccagtatggcgtggtccggggcctcgtccagcgagtcgtcggtggggggctcactcagcagctgcacggcctgccgcgccagcgactcgtctgcccgcagttccctgcacaccgactgggccctggagccctccccgctccccagcagcagcgaggaccccaagtccctggacctggaccacagcatggacgaggcgggcgcgggtgccagcaacagcgagcccagcgagccggacagccccacccgggaacacgcgcgccgctccgaggccttacaggggctggtcactgagctcagggccgagctgtgccgccagcggactgagtacgagaggagtgtgaaaagaatcgaagaagggagtgctgacctgagaaaacgaatgtcccggttagaagaagaactggaccaggaaaagaaaaaatacatcatgctggaaataaagctgcggaactctgaacgggcgcgggaggatgcggagaggaggaaccagctgttgcagagggaaatggaggagtttttttcgaccctaggaagcttgactgttggggcaaaaggtgccagggccccaaagtaaaaggaatggcagagctcacttctgtaccacgtctgctggtctccagccttgtatggagttagaagcgtctgtatctctggagcagccaggcgctctggagccagctggagagagagagatcctgatacctctgtggggactgtggggacttttgggaccccacacactccaggtgggatcagatgctgctccaaccatgcagttcctggtgagggtcagaaggggacggtaccaagagtagcgcttagcccttacccaggaaatatccttcatggccacagaaatggagggcgcccaggatccaggcagccaccgggaacagtcagctttctttattaaatgtgctcacaaagc

SEQ ID NO: 89458 - DNA, 1827 bp, Artificial Sequence
  derived and/or modified sequence
atgcctttttggcctatcagatgtttgaaaaggagtagacgcatgccaaggggcggtgcaggagagcgggagaaggtgcctgcaaaccctgaggcactgctgttgatggcctcttcacaacgcgacatggaagactgggttcaagcaatacgtcgggtcatatgggctcctttaggcggaggtatatttgggcagcgcctagaagagactgttcaccatgagaggaaatacggccctaggctggccccacttctcgtggagcagtgcgtcgattttattcgagaacgcggacttactgaagaggggttgttccggatgcctgggcaggctaatctcgtaagagatctgcaggattctttcgactgtggtgagaagcccctgttcgacagcacgacagacgtccacacggtggcatcactgctgaagttgtatcttcgcgagttacctgagccagtggttccatttgccaggtacgaggatttcctgtcttgtgcccaactgctaaccaaagacgaaggagagggcaccctggagcttgcgaagcaggtatcaaacctgcctcaagctaattacaacctgctaagatacatatgtaaatttttagacgaagtgcaggcctactccaacgtgaacaagatgtctgtgcagaacctggccaccgtgtttgggcctaatatactgcgtccccaagtggaggatcctgttaccatcatggagggaacaagtctggtccaacaccttatgacggtgctcataaggaagcacagccagttattcactgcccctgtccctgagggacccacgtccccccgtgggggactccagtgtgctgtgggctggggttctgaggaggtaactcgcgatagccagggcgagccgggaggcccagggttgcctgctcatcgcacctcaagtctcgatggcgctgcagtggctgtcctctctagaaccgccccaaccgggccagggtcgcggtgcagcccgggtaaaaaagtccaaacactaccctcgtggaagtcaagtttcaggcagccgcgaagcctgtctggttctcccaagggcggaggctccagcttggaggttcctattatttctagcggagggaattggctcatgaacggactgagctctctgagagggcatcggagagcatcaagtggagacagactgaaggacagcggttcggttcagagactgtcaacctatgacaacgttccggctcctggccttgttccgggaattccgtccgtcgctagtatggcttggtccggcgcttcttcgtctgagtccagtgtgggaggaagtctgagctcctgcactgcttgtcgcgcttcagactcctcagctcgctcttctctgcacaccgattgggcactcgaacccagccctctcccaagttcctcggaagatccaaaatctctggatctggatcattcaatggatgaagctggagcaggagcttccaatagcgagcccagcgaacccgactcccctacacgggaacatgctcggaggtcagaggccctgcagggactggtaaccgagctgcgggcagagctctgcagacagaggactgaatacgagagaagcgtgaagcgaattgaggaagggtctgccgacttgcgcaaacggatgtcgagactagaggaggagctggaccaggaaaagaagaagtatattatgcttgaaattaagcttagaaattcagagagagcgagagaagatgccgaaaggcgcaaccagctcctgcaaagagagatggaagaattttttagtacactgggctctttgaccgtgggggctaaaggagccagagccccaaagtag

SEQ ID NO: 89459 - protein, 107 aa, Artificial Sequence
  derived and/or modified sequence
MTIMVEDIMKLLCSLSGERKMKAAVKHSGKGALVTGAMAFVGGLVGGPPGLAVGGAVGGLLGAWMTSGQFKPVPQILMELPPAEQQRLFNEAAAITRPCSSSCWPCW

SEQ ID NO: 89460 - DNA, 324 bp, Artificial Sequence
  derived and/or modified sequence
atgacaattatggttgaggacatcatgaagctgctttgttctctttccggggaacgcaagatgaaggctgctgtcaagcactctggaaaaggcgccctggtcacgggagccatggcctttgtaggaggactagttggcggacccccaggactggccgtggggggtgcggtgggcgggttactgggcgcatggatgacctctgggcagtttaaacctgtgccacagattctgatggagcttcccccagccgaacagcagcgtctgttcaatgaggctgctgcaattacacgcccttgctcttcttcctgctggccctgctggtag

SEQ ID NO: 89461 - DNA, 324 bp, Artificial Sequence
  derived and/or modified sequence
atgaccatcatggtggaggacatcatgaagctgctgtgcagcctgagcggggagaggaagatgaaggctgctgtgaagcacagcggcaagggggccctggtgactggagccatggcctttgtgggcggcctggtgggcggccccccaggcctggccgtgggcggcgctgtgggcggcctgctgggcgcctggatgaccagcggccagttcaagcctgtgccccagatcctgatggagctgcccccagctgagcagcagaggctcttcaatgaggccgccgccatcacccggccctgcagcagcagctgctggccctgctggtag

SEQ ID NO: 89462 - DNA, 324 bp, Artificial Sequence
  derived and/or modified sequence
atgaccatcatggtggaggacatcatgaagctgctgtgcagcctgtccggcgaacgaaagatgaaagccgccgttaaacatagcggcaaaggggcgctggtgactggcgcgatggcatttgtgggaggcctcgtgggaggacctcccggtctggcagtgggcggtgccgttggcgggctgcttggcgcctggatgacttccggccagttcaaacctgttcctcagatactgatggagttgcctcctgccgagcagcagcggttattcaatgaagccgctgccattacacgtccctgttcctcctcatgctggccctgctggtag

SEQ ID NO: 89463 - DNA, 324 bp, Artificial Sequence
  derived and/or modified sequence
atgacaattatggtagaggacattatgaaacttctgtgtagtctcagcggcgagcgcaaaatgaaggcagcggtgaagcactcaggaaagggggctctggttacaggggctatggcctttgtggggggactggtagggggacccccaggattggctgtggggggtgcagtcgggggactcctgggtgcctggatgacgagcggacagtttaagccagtaccacagattctgatggaactgcccccagccgaacagcaacggttgtttaacgaggccgctgctattacaagaccatgctctagttcttgctggccctgctggtag

SEQ ID NO: 89464 - DNA, 452 bp, Artificial Sequence
  derived and/or modified sequence
aggcctgcgcgaccctccgcggggctggggagctgggcggggagcccggggcctgccaggcccgggctgcagccgcgtctgatcgccgagcgcgccgcgtagacctccgctcccccaggcccgccacgatgactatcatggtggaggacatcatgaagctgctgtgctccctttctggggagaggaagatgaaggcggctgtcaagcactctgggaagggtgccctggtcacaggggccatggccttcgtcgggggtttggtgggcggcccaccgggactcgccgttgggggggctgtcggggggctgttaggtgcctggatgacaagtggacagtttaagccggttcctcagatcctaatggagctgccccctgccgagcaacagaggctctttaacgaagccgcagccatcacgaggccctgcagcagcagctgctggccatgctggtga

SEQ ID NO: 89465 - DNA, 324 bp, Artificial Sequence
  derived and/or modified sequence
atgaccatcatggtggaggacatcatgaagctgctgtgcagcctgagcggcgagagaaagatgaaggccgccgtgaagcacagcggcaagggcgccctggtgaccggcgccatggccttcgtgggcggcctggtgggcggcccccccggcctggccgtgggcggcgccgtgggcggcctgctgggcgcctggatgaccagcggccagttcaagcccgtgccccagatcctgatggagctgccccccgccgagcagcagagactgttcaacgaggccgccgccatcaccagaccctgcagcagcagctgctggccctgctggtag

SEQ ID NO: 89466 - protein, 627 aa, Artificial Sequence
  derived and/or modified sequence
MKMWLLVSHLVIISITTCLAEFTWYRRYGHGVSEEDKGFGPIFEEQPINTIYPEESLEGKVSLNCRARASPFPVYKWRMNNGDVDLTSDRYSMVGGNLVINNPDKQKDAGIYYCLASNNYGMVRSTEATLSFGYLDPFPPEERPEVRVKEGKGMVLLCDPPYHFPDDLSYRWLLNEFPVFITMDKRRFVSQTNGNLYIANVEASDKGNYSCFVSSPSITKSVFSKFIPLIPIPERTTKPYPADIVVQFKDVYALMGQNVTLECFALGNPVPDIRWRKVLEPMPSTAEISTSGAVLKIFNIQLEDEGIYECEAENIRGKDKHQARIYVQAFPEWVEHINDTEVDIGSDLYWPCVATGKPIPTIRWLKNGYAYHKGELRLYDVTFENAGMYQCIAENTYGAIYANAELKILALAPTFEMNPMKKKILAAKGGRVIIECKPKAAPKPKFSWSKGTEWLVNSSRILIWEDGSLEINNITRNDGGIYTCFAENNRGKANSTGTLVITDPTRIILAPINADITVGENATMQCAASFDPALDLTFVWSFNGYVIDFNKENIHYQRNFMLDSNGELLIRNAQLKHAGRYTCTAQTIVDNSSASADLVVRGKNRKGGEKNMVDSFLPVCASLPPTW

SEQ ID NO: 89467 - protein, 63 aa, Artificial Sequence
  derived and/or modified sequence
MKMWLLVSHLVIISITTCLAEFTWYRRYGHGVSEEDKGFGPIFEEQPINTIYPEESLEGKVSL

SEQ ID NO: 89468 - DNA, 1884 bp, Artificial Sequence
  derived and/or modified sequence
atgaaaatgtggcttctggtcagtcacttggtgataattagcattaccacctgtctggccgagttcacatggtatcgaagatacggtcatggagtgtcggaggaagataagggcttcggacccatcttcgaagagcagccgataaataccatctacccggaggaaagcctggaagggaaggtgagcctgaactgcagagccagagcctctccattccctgtgtacaaatggcggatgaacaacggtgacgtcgacctcacaagtgatcggtactctatggtgggcggtaacctggtcattaataatcccgacaaacagaaagacgcgggcatttactattgccttgcaagcaataattatggcatggtgaggtccactgaggcgactctgtcttttggctatttggatcctttcccacccgaagaaagacccgaagtgcgggtgaaggagggcaaggggatggttctgctttgtgaccctccttaccactttcctgacgatttgagttatcggtggctgctgaacgagttccccgttttcattacgatggacaagcgccggttcgtgtctcagactaatgggaatctttacattgcaaatgttgaggcttcagataaggggaactacagttgttttgtctctagtccctctattactaagagtgtgtttagcaaatttatacccctcatccctatacctgagagaacaactaaaccataccctgccgacatcgtggtgcaattcaaggacgtctacgctctcatggggcagaacgtgacactggagtgtttcgcattaggcaatcccgtccccgacataagatggcgaaaagtgttagaacccatgcccagtaccgccgagatctctacgagtggcgcagtgttgaagatatttaatatccagctcgaggatgagggcatttatgagtgcgaagcggaaaacatcaggggcaaggataaacaccaggctcgcatctacgttcaggcattccccgagtgggttgaacatattaacgatacagaagtcgacataggttcagacttgtactggccctgcgtggcaaccggtaagcctatcccgactattagatggttgaaaaacggctacgcctaccataagggggagctgcgattatacgacgttacatttgagaacgcgggcatgtatcagtgcatcgccgagaacacatatggggctatctacgccaatgccgagctgaagattctcgccctcgctccaacatttgaaatgaaccccatgaagaagaaaattctcgcggctaaaggggggagagtgatcatagaatgtaagcccaaagccgcccctaaacctaaatttagctggagtaaaggcaccgagtggcttgtgaacagtagccggattctcatttgggaagatggaagcctggaaattaacaacatcactagaaacgatgggggaatatacacctgtttcgcagaaaataaccgcgggaaggcaaactcaactggtacactggtgattaccgaccccacaagaataatacttgctccgattaacgccgatatcacagtcggtgaaaacgcaacgatgcagtgcgccgcctcatttgacccagccctggacttgaccttcgtatggtcatttaacgggtacgtcatcgacttcaacaaagaaaatattcattatcagaggaactttatgcttgacagtaacggagaattactcatccggaatgcacagctgaaacatgccggcaggtacacttgtaccgctcagaccatcgtggataatagttccgcaagcgctgacctggttgtacggggaaagaaccgaaaaggcggggaaaagaacatggtagattcgttcctgcctgtttgtgcttcgctgccgccaacctggtag

SEQ ID NO: 89469 - DNA, 1884 bp, Artificial Sequence
  derived and/or modified sequence
atgaaaatgtggctgttagtgtctcatctggtaatcattagcatcactacgtgtctggcagaattcacgtggtataggagatatggccatggggtatcggaggaagacaaggggtttggccccattttcgaagaacagccaattaatactatctatcctgaggaaagcttagagggcaaggtgagcttaaattgcagggcccgagcttcccctttccctgtttataaatggaggatgaataacggagacgtcgatctcactagtgacaggtacagtatggtgggtggcaacttggtaattaataaccctgacaaacagaaggatgctggcatctactactgcctcgcgtccaacaattatgggatggtgcggtcaaccgaggctacattatcttttggttacttggaccctttcccgccagaggagagacctgaagttagagtgaaggagggaaagggaatggtgttgttatgcgatcctccttatcactttccagacgatctctcgtatcgttggctcctcaatgagttccctgttttcatcacaatggataagcggcggtttgtaagccagaccaacggaaacttatacatcgcaaacgtggaggcctcagataaggggaattattcttgtttcgtcagtagcccttctattaccaagtctgtgttctctaagttcattccacttattcccatacctgaacgtaccacaaaaccgtatcccgccgatatagtggttcagtttaaggacgtttacgctttaatgggacagaacgtaaccctggaatgcttcgccctaggtaaccctgtccccgatatcagatggaggaaagtcctggagccaatgcctagcacagctgaaatcagtacaagtggagcagtgctgaagatatttaacatccagctggaggatgaggggatatacgagtgtgaggccgaaaatatcagaggcaaagataagcatcaggcccggatttacgtgcaggcctttcctgagtgggtcgagcatataaatgatactgaggtggatatcggtagcgacctctactggccttgcgtggcaacaggcaagcccattccaactatccgatggttgaagaacggctacgcttatcacaaaggcgaactgcggctgtatgacgtgacgtttgagaatgccggcatgtatcagtgtattgcggaaaatacctatggtgccatttacgctaatgcggagctgaagatccttgctttggccccaacatttgagatgaatccaatgaaaaagaagatcttggccgcgaaaggggggagggtaatcattgagtgcaagcccaaggccgcacccaaacccaagttttcctggtccaagggcacagaatggctggtgaatagttctcgcatactaatctgggaggacggctctctggaaattaataatattacccgaaacgatggaggaatatatacatgttttgctgagaacaatcgtgggaaggccaattccacaggtacgttggtgattaccgacccgacgagaattattttggcccccattaatgcagacattacagtgggggaaaatgcaaccatgcaatgtgccgctagctttgaccctgcactagacctgaccttcgtgtggtctttcaacggatacgtaattgatttcaataaagaaaatatacactatcagaggaatttcatgctcgactccaacggggagctgttgataaggaatgcccagctgaagcatgcggggcgatatacgtgcaccgcacagactatcgttgacaatagctcagcctctgccgacctcgttgtcagaggtaagaacaggaaggggggagagaaaaatatggtagactcctttctgcctgtttgtgccagtctgcctcccacatggtag

SEQ ID NO: 89470 - DNA, 1884 bp, Artificial Sequence
  derived and/or modified sequence
atgaagatgtggctcctggttagccatctggtgattataagtataaccacatgtctggccgagttcacctggtaccggaggtatggtcatggcgtgtctgaagaagataagggattcggacctatctttgaagaacagcccatcaacactatatatccagaagagagccttgagggtaaggtgtcactgaattgcagggctcgagctagtccctttccagtgtacaaatggcgtatgaacaacggcgacgtcgacctgacaagcgacaggtattcaatggtgggaggtaatcttgtcatcaacaaccccgacaagcaaaaggacgctggtatctattattgtctggcgagcaataattacggaatggtcaggtctaccgaagcgaccctgtcattcggatacctggatccattccccccggaagaaagacctgaggtcagggttaaggagggcaaaggtatggtcctcctctgtgatcccccttatcatttccccgatgatttgtcttatcggtggctcctgaatgagttcccagtgttcatcactatggacaagcgcaggtttgtcagtcagactaatggcaatctgtatatcgcaaacgtggaggcgagcgacaaaggtaattactcatgcttcgtaagttcccccagtattaccaaaagcgtgttttcaaagttcatccccctcatacctatccccgagaggacgacaaagccctatccagcagacatcgtagtgcaattcaaggacgtatatgcacttatgggacagaatgtgaccctggaatgcttcgcgctggggaaccccgtgcctgatatccggtggcgcaaggtgctggagcccatgccaagtaccgctgaaatatccacttctggcgctgtgctgaaaatctttaacatccaactggaggacgaggggatttacgagtgtgaagctgagaacattcgtggcaaagataagcaccaagctcgcatctatgtgcaagcttttccagaatgggtagaacatatcaacgatacagaggttgatatcggcagcgacctttattggccttgcgtggctacaggaaagccaattccaacgattcgctggctgaagaacggttacgcttaccacaaaggcgaacttagactttatgatgtgacctttgagaatgccgggatgtaccagtgcatagcagagaatacctatggagctatttacgcaaacgctgagttgaaaattttagccctggccccgaccttcgaaatgaaccccatgaagaagaaaattctggcagccaaaggagggagggtgataatagagtgcaaacctaaggccgctccgaaacctaagttttcctggagcaaaggcacagagtggctcgtcaactcaagcaggattctgatttgggaggatggctctctggagataaataacattacccgtaatgatggaggaatttacacttgtttcgccgagaataacaggggtaaagccaactcgacgggcactctggttattactgatcccaccaggataattctggcaccaattaatgccgatatcaccgtgggagagaacgccacgatgcagtgtgccgcttcattcgatccagcactggatctcacatttgtgtggagcttcaacgggtacgtgattgacttcaacaaagagaacattcattatcagcggaactttatgctggactccaacggcgagctcctcattcggaatgcacagctaaagcacgcaggcagatatacctgtacagctcagactatcgttgacaactcttccgcctcagctgatttggtggtgaggggtaaaaaccggaagggcggggaaaaaaatatggtggactccttccttcccgtatgtgcctcgctgcctcccacatggtag

SEQ ID NO: 89471 - DNA, 258 bp, Artificial Sequence
  derived and/or modified sequence
atgaagatgtggctactggtctcccacctggtgataatctccatcacgacctgtctggctgagttcacctggtacagaagatatggtcacggagtcagcgaggaagacaaaggttttggcccgatatttgaggagcagccaattaacacaatttatcccgaagagagcttggaagggaaggttagcctcaattgccgagcgagagcctctccattccccgtgtacaagtggcgaatgaacaacggggatgttgactag

SEQ ID NO: 89472 - DNA, 192 bp, Artificial Sequence
  derived and/or modified sequence
atgaagatgtggctgctcgtatcacatcttgttataattagtatcacaacttgcctcgcagagttcacctggtatcgcagatacgggcatggggtgagtgaggaggataaggggttcggacccatttttgaggagcagccgattaatacgatctaccctgaagagagtcttgagggcaaggttagtctgtag

SEQ ID NO: 89473 - DNA, 273 bp, Artificial Sequence
  derived and/or modified sequence
atgaagatgtggctgctcgtttcgcacttggtgatcattagcattaccacctgtctggcagaattcacgtggtaccggcggtatggtcatggggtctctgaggaagacaaagggttcgggcctatctttgaggaacagccaattaatactatctaccccgaggagtctctcgagggcaaagtctcactgaactgccgagctcgagcctcacctttcccagtgtataagtggcgaatgaataatggagatgtcgatttaactagtgaccgttag

SEQ ID NO: 89474 - DNA, 222 bp, Artificial Sequence
  derived and/or modified sequence
atgaaaatgtggttgttagtgtctcatttggtgatcatctccataaccacctgcctggcagaattcacatggtaccgacggtatggccatggggttagcgaagaagataaaggattcggcccaatctttgaggaacagcccattaacacaatataccccgaggaatcactagaagggaaggtctccctcaactgcagagcccgtgcctccccttttccatag

SEQ ID NO: 89475 - DNA, 1884 bp, Artificial Sequence
  derived and/or modified sequence
atgaagatgtggctgctggtgagccacctggtgatcatcagcatcaccacctgcctggccgagttcacctggtaccgccgctatggccacggcgtgtctgaagaagataaaggatttggccccatctttgaggagcagcccatcaacaccatctacccagaggagagcctggagggcaaggtgtccctgaactgccgggcccgggccagccccttccctgtgtacaagtggaggatgaacaatggagatgtggacctgaccagtgaccgctacagcatggtgggcggcaacctggtgatcaacaacccagacaagcagaaggatgctggcatctactactgcctggccagcaacaactacggcatggtgcgcagcacagaggccaccctgagctttggctacctggaccccttccccccagaggagaggcctgaggtgcgggtgaaggagggcaagggcatggtgctgctgtgtgaccccccctaccacttcccagatgacctgagctaccgctggctgctgaatgagttccctgtgttcatcaccatggacaagagaagatttgtgtcccagaccaatggaaacctgtacatcgccaacgtggaggccagtgacaagggcaactacagctgctttgtgagcagccccagcatcaccaagtctgtgttcagcaagttcatccccctcatccccatccctgagaggaccaccaagccctacccagctgacatcgtggtgcagttcaaggatgtgtatgccctgatgggccagaatgtgaccctggagtgctttgccctgggcaaccctgtgcctgacatccgctggaggaaggtgctggagcccatgcccagcacagctgagatcagcaccagcggggctgtgctgaagatcttcaacatccagctggaggatgagggcatctatgaatgtgaggccgagaacatccggggcaaggacaagcaccaggcccgcatctacgtgcaggccttccctgagtgggtggagcacatcaatgacacagaggtggacatcggcagtgacctgtactggccctgtgtggccaccgggaagcccatccccaccatccgctggctgaagaatggctacgcctaccacaagggggagctgcggctgtatgatgtgacctttgaaaatgccggcatgtaccagtgcatcgccgagaacacctatggagccatctatgccaatgctgagctgaagatcctggccctggcccccacctttgagatgaaccccatgaagaagaagatcctggccgccaagggcggccgggtcatcatcgagtgcaagcccaaggccgcccccaagcccaagttctcctggagcaagggcacagagtggctggtgaacagcagccgcatcctgatctgggaggatggcagcctggagatcaacaacatcaccagaaatgatggcggcatctacacctgctttgctgagaacaacagaggcaaggccaacagcacaggcaccctggtgatcacagaccccacccgcatcatcctggcccccatcaatgctgacatcaccgtgggggagaatgccaccatgcagtgtgccgccagctttgatcctgccctggacctgacctttgtgtggagcttcaacggctacgtgattgacttcaacaaggagaacatccactaccagaggaacttcatgctggacagcaatggagagctgctgatcagaaatgcccagctgaagcacgccggccgctacacctgcacagcccagaccatcgtggacaacagcagcgccagcgctgacctggtggtgcggggcaagaacaggaagggcggggagaagaacatggtggacagcttcctgcctgtgtgtgccagcctgccccccacctggtag

SEQ ID NO: 89476 - DNA, 258 bp, Artificial Sequence
  derived and/or modified sequence
atgaagatgtggctgctggtgagccacctggtgatcatcagcatcaccacctgcctggccgagttcacctggtaccgccgctatggccacggcgtgtctgaagaagataaaggatttggccccatctttgaggagcagcccatcaacaccatctacccagaggagagcctggagggcaaggtgtccctgaactgccgggcccgggccagccccttccctgtgtacaagtggaggatgaacaatggagatgtggactag

SEQ ID NO: 89477 - DNA, 192 bp, Artificial Sequence
  derived and/or modified sequence
atgaagatgtggctgctggtgagccacctggtgatcatcagcatcaccacctgcctggccgagttcacctggtaccgccgctatggccacggcgtgtctgaagaagataaaggatttggccccatctttgaggagcagcccatcaacaccatctacccagaggagagcctggagggcaaggtgtccctgtag

SEQ ID NO: 89478 - DNA, 273 bp, Artificial Sequence
  derived and/or modified sequence
atgaagatgtggctgctggtgagccacctggtgatcatcagcatcaccacctgcctggccgagttcacctggtaccgccgctatggccacggcgtgtctgaagaagataaaggatttggccccatctttgaggagcagcccatcaacaccatctacccagaggagagcctggagggcaaggtgtccctgaactgccgggcccgggccagccccttccctgtgtacaagtggaggatgaacaatggagatgtggacctgaccagtgacagatag

SEQ ID NO: 89479 - DNA, 222 bp, Artificial Sequence
  derived and/or modified sequence
atgaagatgtggctgctggtgagccacctggtgatcatcagcatcaccacctgcctggccgagttcacctggtaccgccgctatggccacggcgtgtctgaagaagataaaggatttggccccatctttgaggagcagcccatcaacaccatctacccagaggagagcctggagggcaaggtgtccctgaactgccgggcccgggccagccccttcccctag

SEQ ID NO: 89480 - DNA, 1884 bp, Artificial Sequence
  derived and/or modified sequence
atgaagatgtggctgctggtgagccacctggtgatcatcagcatcacaacttgcctggctgagtttacttggtaccgccgatatgggcatggtgtcagcgaggaggataaaggctttggaccgatttttgaagaacagccgattaatactatttatccagaggaatctttggagggtaaggttagtctaaactgtcgggcccgagcctcaccctttcccgtgtacaagtggcggatgaacaacggggatgttgacctcactagtgaccgttacagcatggtgggcggtaacctagtcatcaataaccccgacaagcagaaagatgctggcatttactactgcttagcctctaataactacgggatggtgcgttctaccgaagccaccctgtctttcggatacctggatcctttcccacctgaggagcgcccggaggtgcgcgtcaaggaaggtaaaggcatggtgctactatgcgatccaccataccattttccagacgacctgagctaccgttggctgctaaacgaatttcctgtgttcattacaatggataagcgacggttcgtctcccagaccaatggcaatttgtatatagctaatgtggaagcctccgacaaagggaactactcctgcttcgtgagttccccctcaattaccaagagcgtgtttagcaaattcattccattgatccccatacccgagaggacaacgaaaccttaccctgccgacatcgtagtgcagttcaaggacgtatacgccctaatgggacagaacgtgactctggaatgctttgctctggggaatcctgtccctgacattaggtggcgtaaagtgcttgagccaatgcccagcaccgcagagatttctacctccggggccgtcttaaagatctttaatattcaattagaagatgaggggatctacgagtgtgaggctgaaaacatccgcggaaaggataagcaccaggccagaatttacgtacaagccttcccagaatgggtggagcatatcaacgacacagaggtagatatcggaagtgacctgtactggccctgcgtggcaaccggtaagcccatccccacaattcgctggttaaagaatggctacgcttatcacaaaggagagctcaggctgtatgatgtcacatttgagaacgcgggaatgtaccaatgtattgctgaaaatacgtatggcgccatttacgccaatgctgaattaaagatactcgccttagcacccacattcgagatgaaccccatgaagaaaaagatactggctgcgaaagggggtcgtgttatcatcgagtgtaaacccaaggcagcgccaaaacccaagttcagctggtccaaagggaccgaatggttagtgaacagctctaggatcttgatatgggaagacggttctctagaaatcaacaatataacacggaatgacgggggaatctacacctgcttcgccgagaataatcgcgggaaggccaacagtacaggtactttggttatcaccgatccaactagaataatcctggcaccaattaatgcagacatcacagtcggggagaatgctaccatgcagtgcgccgctagcttcgaccccgctctcgacctcacatttgtttggtccttcaatgggtacgtcattgattttaataaagagaacatccattaccagcgcaactttatgctggactctaacggagagctgctgatccggaacgcgcaattaaaacatgctggacggtacacctgtaccgcgcagactatagtggacaacagctctgcctccgcagatcttgttgtgcgtggaaagaatcggaaaggcggagagaagaacatggtggattccttcctcccggtctgcgctagtctgccccctacctggtag

SEQ ID NO: 89481 - DNA, 1884 bp, Artificial Sequence
  derived and/or modified sequence
atgaagatgtggctgctggtgagccacctggtgatcatcagcatcacaacctgtctggcggagttcacctggtacaggaggtatggccatggagtgagcgaggaggacaaggggttcggccctattttcgaggagcagccaattaataccatctacccagaggaaagcttagaaggcaaagtgtctctgaactgcagggcgagggcctctccttttcccgtctataagtggagaatgaataatggggacgtggatctgacctctgataggtatagcatggtcggcggcaatctcgtgatcaacaatcctgataagcaaaaagatgccggcatctactattgtctggccagtaacaactacggcatggttagatctaccgaggccacactgagcttcgggtacctggacccattcccacccgaggaaagacccgaagtccgagtgaaggaagggaaaggcatggtgctgctttgcgaccccccttaccacttccctgacgatctatcgtatagatggctgctgaacgagttccccgtgtttatcacaatggacaagagacgatttgtctcccagactaacggcaacctgtacatagctaacgttgaagcctcggataaagggaattatagttgctttgtgtccagcccatctatcaccaaatctgtgttctctaagttcataccactcatcccaatacccgagagaaccactaaaccctacccagccgacattgttgtccagtttaaggatgtgtacgccctcatgggccaaaatgtgaccctcgagtgctttgccctcggaaatccggttcccgacatcagatggaggaaggtgcttgagcccatgccctcaaccgctgagatctccacttcaggggctgtactgaaaatcttcaatattcagttggaagacgaaggcatctacgagtgcgaggctgagaatattaggggcaaggacaagcatcaggctcgcatatatgtacaggcattccccgagtgggttgaacacatcaatgacacagaggtggatatagggtccgacctctactggccttgcgtcgcgaccggcaaacccatcccgactatccgatggctgaaaaacggctacgcctaccataaaggggagctgcgcctctatgatgttacatttgagaacgccgggatgtaccagtgtattgctgagaatacttatggggctatctacgccaacgccgagctgaagatactggctctggcccctacattcgagatgaatcccatgaaaaagaagatactcgccgcaaaagggggccgtgtgatcatcgaatgtaaaccgaaagcagcgcccaagccaaaattcagctggagtaaaggcaccgagtggttggtgaactcatccagaatactgatttgggaggatggttctctcgaaattaacaatataacacgcaacgatggcggtatctacacatgttttgctgagaacaatcgcggtaaagcaaactccactgggactctggtcattaccgatccaacacggatcatcctcgcacctatcaacgccgatatcacagtcggagagaacgccactatgcagtgcgctgccagctttgaccccgccctcgatctcacattcgtgtggagtttcaatggttatgtgattgattttaataaagagaatatacactaccagcgaaatttcatgctggactccaatggcgagcttttgatcaggaatgctcagctcaaacatgcagggagatatacctgtaccgcccaaactattgtggacaattcctctgccagtgctgacttggtggtcaggggcaagaaccgcaagggaggtgagaaaaatatggtggattcctttctgccggtatgtgctagcctgcctccaacgtggtag

SEQ ID NO: 89482 - DNA, 1884 bp, Artificial Sequence
  derived and/or modified sequence
atgaagatgtggctgctggtgagccacctggtgatcatcagcatcacaacctgcctggccgagtttacgtggtatagacggtacggacacggagtttctgaggaggacaagggctttggtcccattttcgaggagcagcctataaacaccatctatcccgaagaaagcctggagggaaaggtgagcctcaactgccgggctcgagcctccccctttcccgtttataaatggagaatgaataatggcgacgtagacttaaccagcgacagatacagtatggttgggggtaatttagttatcaacaaccccgataagcagaaagacgcaggaatctactactgcttagcatctaacaattacggcatggtgagaagtaccgaagctactctgtcgtttggatatctggacccttttcctccggaagagaggccggaagtgagagtgaaggagggcaaaggaatggtcctgctttgtgaccccccatatcatttcccggacgacttgagttaccgatggctgctgaacgagttccctgtattcataacaatggacaagaggagattcgtcagtcagacaaatgggaacctatatatcgccaacgttgaagcgagcgacaaaggaaactactcatgttttgtgagctctccctcaatcactaaatctgttttctcaaagttcattcccttgatccccatcccagagcgtacgaccaaaccataccctgcggacattgttgtgcagttcaaggacgtgtatgcattaatgggccagaatgtcactttggagtgctttgccctgggtaaccctgtacctgacattaggtggcggaaggtgttagaacccatgccttctacggcggaaataagtactagtggtgccgtgttaaagatattcaacatccagcttgaggatgagggcatatacgagtgcgaggcggaaaacattagagggaaggacaaacaccaggcgaggatttatgttcaggcgttccccgaatgggtggagcacatcaacgacactgaggttgacattggcagtgacttgtactggccctgcgtggctacgggaaaacctattccaaccattagatggctgaagaacggctacgcatatcacaagggggaattgagactctacgatgtgactttcgagaacgccggcatgtatcagtgcattgccgagaatacctacggcgccatctatgcgaacgccgagctgaaaatcttggctctcgcgccaaccttcgaaatgaacccaatgaagaaaaaaattttagccgcgaaagggggacgtgtgattatcgaatgcaagcctaaagcagcgcccaagcccaagtttagttggtcaaaagggaccgagtggttggtgaactctagtcgcattcttatttgggaggatggcagcctggagatcaacaacatcacccggaatgacggcggaatctacacgtgctttgccgagaacaaccggggtaaggctaattctacagggaccctggttattaccgaccctacacgcattatactggccccaatcaacgccgatattaccgttggcgaaaacgccacaatgcagtgtgctgccagttttgatcctgccttagacttgacattcgtatggagctttaacggatatgtgattgactttaacaaggaaaatatccattaccagcggaactttatgctggacagcaatggcgagctactgatacgcaacgcccagctgaaacatgccggcagatacacctgtacggctcaaactatagtcgacaatagttctgcctcggctgatttggtggtgaggggtaagaataggaaggggggcgagaagaacatggtggactccttcctgcccgtgtgtgcaagcctgcctcctacttggtag

SEQ ID NO: 89483 - DNA, 258 bp, Artificial Sequence
  derived and/or modified sequence
atgaagatgtggctgctggtgagccacctggtgatcatcagcatcaccacctgcctagcagagttcacgtggtaccgccgatacgggcatggagtgagtgaagaggataagggctttggtcctattttcgaagagcagccgattaatacgatttatccagaagaatcactcgagggaaaagtctcactgaattgtcgcgcccgggcctctccatttcctgtgtacaagtggaggatgaacaacggcgacgtcgactag

SEQ ID NO: 89484 - DNA, 192 bp, Artificial Sequence
  derived and/or modified sequence
atgaagatgtggctgctggtgagccacctggtgatcatcagcatcaccacgtgcctagctgagttcacatggtatcgccgctacggtcacggcgtgtctgaagaagataaaggatttggccctatcttcgaggaacagccgattaacacaatatatccagaggaatctcttgaaggcaaggtgtctttatag

SEQ ID NO: 89485 - DNA, 273 bp, Artificial Sequence
  derived and/or modified sequence
atgaagatgtggctgctggtgagccacctggtgatcatcagcatcaccacatgtctcgccgagttcacttggtaccggcggtatgggcatggcgtttccgaggaagacaaaggcttcggacctatatttgaagagcagcccattaatactatttaccctgaagaatccttggaagggaaagtttctcttaactgtcgtgccagagcttcaccttttcctgtttacaaatggcggatgaacaacggggacgtggatttgacgagcgaccggtag

SEQ ID NO: 89486 - DNA, 222 bp, Artificial Sequence
  derived and/or modified sequence
atgaagatgtggctgctggtgagccacctggtgatcatcagcatcacgacttgtctggcggagttcacgtggtatagacgctatggtcacggggtgagtgaagaggataagggctttgggccgatcttcgaggaacaaccaattaacacaatttaccctgaagagtctcttgagggtaaggtgtctctaaattgccgcgctcgggcatcccctttcccatag

SEQ ID NO: 89487 - DNA, 1884 bp, Artificial Sequence
  derived and/or modified sequence
atgaaaatgtggctgctggtctctcacctagtgattatatctatcaccacgtgcctcgctgagttcacgtggtatcgaagatacgggcatggcgtatccgaagaagacaagggattcggcccaatctttgaagagcagcctataaatacgatctacccagaagagtcccttgaggggaaggtttcattgaattgtcgagccagagcttctccttttcccgtgtataagtggcggatgaataatggagacgtagacctgacgtcagatcgatatagtatggttggcggaaatctggtaatcaacaatcctgacaaacaaaaagacgctggaatatattattgtctggcttccaacaattatggtatggtgagatccactgaagccacactttccttcgggtatctggacccatttccaccggaggagagacctgaggtaagagtcaaggagggcaagggtatggtactgttgtgcgatccaccatatcactttcccgatgatctatcttatcgatggctcttaaacgagttcccagtgttcattactatggataaaagaagatttgtgtctcagacgaacgggaatctttacattgccaacgtcgaagcaagtgacaaagggaactactcctgcttcgtttctagcccctctattacaaagtctgtcttttctaaatttatccctctcatccctatccctgagaggaccacaaagccataccccgcagatattgtggttcagtttaaagatgtgtacgctctgatgggtcagaacgtgacccttgagtgcttcgccctagggaatccagtccctgatatacgatggcggaaagtgctggagcccatgccatctacggccgagatctctacttcgggagctgtgctgaaaatcttcaatattcaactggaagacgaagggatttacgaatgcgaagcggagaacatcaggggaaaagataaacatcaagcacgaatttacgtgcaggcctttcccgagtgggtagaacacatcaatgacaccgaagttgacatcggatccgacctctattggccttgcgtagccactggtaagccaatccccacgatcaggtggttaaagaacggctatgcttaccacaagggtgagctcagattatatgacgttaccttcgaaaacgctggcatgtaccaatgtatcgcggagaacacatatggcgcaatatatgcaaatgcagaactgaaaatcttggctctggctccaacctttgagatgaatccgatgaaaaagaagattttggccgctaaggggggtcgggtgatcatcgagtgcaaacctaaggcagcaccaaagccaaagttttcgtggagtaagggaaccgagtggctggtcaactcctctagaatcctgatctgggaagacggctccctcgagataaacaacattaccaggaatgacggaggcatatatacctgctttgccgaaaacaaccggggaaaggctaactcaaccgggacgctcgtcatcactgaccccactcgaataatcttggcgcctattaatgctgatattaccgtgggcgaaaatgcgaccatgcagtgcgcagccagctttgaccctgcgcttgacttaacattcgtgtggtccttcaacgggtacgttattgattttaataaggaaaacatacattatcagagaaacttcatgttagacagcaatggagagctcttgataaggaacgcacaactgaaacacgcaggtcgctacacatgcacagctcaaacaattgtcgataactctagcgcaagcgccgaccttgtggtgagaggaaaaaacaggaaaggtggagaaaaaaatatggtggacagcttccttccagtatgcgcgagtttgccaccaacgtggtag

SEQ ID NO: 89488 - DNA, 1884 bp, Artificial Sequence
  derived and/or modified sequence
atgaagatgtggctcctggtgtcccacctggtgatcatatccatcacaacatgtttagccgagtttacttggtaccggagatacggacacggggtgtcagaggaagacaagggctttggacctatctttgaggagcaacccatcaatacgatctacccagaggagagcctggaggggaaggtgtctcttaactgtagggccagggcttcacctttccccgtttataagtggaggatgaataacggcgatgtggatctcacgtctgaccgctacagcatggtggggggaaatctggtcatcaataaccctgacaagcagaaggatgccggaatttactactgtttggcaagtaataactatggaatggtgaggtccacagaggcgacacttagctttggatacctggacccattccctccggaggagcgacccgaggtacgggtaaaggaaggcaaagggatggtcctgctgtgcgaccctccgtaccacttcccggatgacctaagttatcgttggcttttgaacgagtttcccgtcttcatcaccatggacaagaggagattcgtgtcacaaaccaatggtaacctgtatattgctaacgtcgaggccagcgacaaaggcaactactcctgctttgtgtcatccccaagcattactaagagcgtgttctccaagttcataccacttatccctattccagagcgtacaacgaagccgtaccctgcagacattgtggtgcagttcaaagacgtttacgcgttaatgggacagaacgtcacactggaatgcttcgccttgggaaatccggtccccgatataagatggcggaaggtcctggagccaatgccaagtactgccgagatttctacctcgggtgccgttctgaaaattttcaacatccagctggaggatgagggtatatatgagtgtgaagccgagaatatcagaggaaaggacaagcaccaagctcgaatatacgtgcaggcattcccagaatgggtggaacacatcaacgacacagaagtggacattggaagtgatctgtattggccttgtgtagcaactggaaagcccatcccgacgatcagatggttgaagaatggctacgcctatcacaagggtgagctcagactgtatgatgtgacattcgagaatgctggaatgtaccagtgcattgccgaaaatacatatggtgctatttacgccaatgcggagctgaagatcctggccttagctcccacatttgaaatgaatcccatgaaaaaaaagatcttggctgccaaggggggaagggtgattatcgagtgcaagcccaaggcggcacccaagccaaaattctcatggagcaagggaaccgaatggctggtcaactcatccagaatcttaatctgggaggatggatcccttgaaattaacaacatcacccggaatgacgggggaatctacacatgctttgccgagaataatcggggaaaggccaattccaccgggaccctagtcattacagaccctacccggattatactggctcccatcaacgccgatattacagtcggcgaaaatgcgacaatgcagtgtgcagcatcctttgaccccgctctagatctaacctttgtctggtcttttaacggctatgtcattgatttcaataaagagaacattcactaccaaagaaacttcatgctggacagcaatggggagctgctaattcggaacgcccaactgaagcacgctggaaggtatacatgtacagctcagacaatcgtggataatagctccgccagcgctgacctggtcgtgcgcggaaagaatagaaagggaggagagaaaaatatggttgatagtttcttgccagtctgcgctagccttccacccacttggtag

SEQ ID NO: 89489 - DNA, 1884 bp, Artificial Sequence
  derived and/or modified sequence
atgaaaatgtggctgctggtctcccacttagtgatcatttctataacaacctgcctggcagagtttacatggtatcgccgatacgggcatggagtctcagaagaagataagggattcggccctatctttgaagagcaaccgattaacacaatctaccccgaagagagcctggaggggaaggtttcgttgaattgtagagccagggcttctccttttcctgtgtataaatggagaatgaataatggtgacgtggacctgaccagcgaccgctattctatggtaggcggtaatctggttatcaataaccccgacaagcaaaaggatgccggtatctactactgcttggcctccaataattatgggatggttcggagcacggaggcaacactaagctttggctatttagaccctttcccacccgaggagagaccggaagtgcgcgtgaaagaagggaagggaatggttctgctgtgcgatccaccttatcattttcctgatgatctgagctaccgctggctcctaaacgagtttcccgtcttcatcacgatggataagcgcaggttcgtgtcgcagactaatggaaacctgtacattgccaacgtagaggccagtgacaaggggaattacagttgcttcgtatcttcacctagcattacaaagagcgtgttttccaagttcatccctctgatacctattcccgagaggaccacaaagccatatcccgctgacatcgtcgtgcagttcaaggacgtgtacgcattaatgggccagaacgtcactctagagtgctttgcactaggcaatccagtgccggatatcaggtggaggaaggtcctcgaaccaatgcctagcactgctgaaatcagtacctcaggcgcagtgttgaagatcttcaacatccagcttgaggacgaaggcatatacgaatgcgaggctgaaaacatcagaggaaaagataaacatcaagccagaatctacgtgcaggcgttccccgaatgggtagagcacattaatgataccgaggtggatatcgggagtgacctttactggccttgcgtggctaccggaaaaccaattcccacaataaggtggctgaaaaacggttacgcctatcacaagggagagcttcggttgtacgatgtcacctttgaaaatgcaggaatgtaccaatgcattgctgaaaacacctatggggctatctacgccaacgccgagctgaaaatcctggccctggccccaacattcgagatgaatcccatgaagaaaaaaatcctggctgccaaggggggtcgcgttatcatcgaatgtaagcctaaggccgcacccaaacccaaatttagttggtccaaagggacggagtggctggtgaatagttctcggatcctgatatgggaggacggaagcctcgaaataaacaatatcacccgaaatgatgggggaatatatacttgttttgccgaaaataaccgaggaaaggccaactcaactgggacactcgttatcacggaccccacacggataatactggccccaattaacgctgacatcacagtgggggaaaacgccacaatgcagtgcgctgcaagctttgatcctgctctcgaccttaccttcgtgtggagttttaacggatatgtgatagatttcaacaaggaaaatattcactatcagcgtaatttcatgcttgactcaaacggtgagctcctcatccgcaacgcccaactgaagcacgccggaagatatacatgcacagcacagacgatagtcgacaatagtagcgcttctgcggatttggtggtgcggggaaagaacaggaagggtggggagaagaacatggtggattcctttttgccggtctgcgcttcgctccctcccacttggtag

SEQ ID NO: 89490 - DNA, 258 bp, Artificial Sequence
  derived and/or modified sequence
atgaaaatgtggctccttgtaagtcacctagtaatcatcagcataaccacgtgccttgctgaattcacttggtatcgtaggtacggtcacggcgtgagtgaagaggataagggctttgggccaatttttgaagagcagcccatcaacaccatctaccctgaagagtccctcgagggaaaggtttcattaaattgccgagcaagagcttctccattccctgtgtataaatggcgaatgaacaacggtgatgtcgattag

SEQ ID NO: 89491 - DNA, 192 bp, Artificial Sequence
  derived and/or modified sequence
atgaagatgtggcttttggtctctcacctggttattatcagtatcaccacatgcctggccgagtttacttggtatcgcagatacggccatggcgtgagtgaggaggataagggtttcggccctatctttgaagaacagcccataaataccatttatcccgaggagtcactcgaaggtaaggtttctctgtag

SEQ ID NO: 89492 - DNA, 273 bp, Artificial Sequence
  derived and/or modified sequence
atgaaaatgtggcttctagtgtcacacctcgtgattattagcataaccacctgtctggccgagttcacatggtatcgcaggtacggccacggcgtgtctgaagaagataaaggatttgggccaattttcgaggagcagccgataaacacaatttaccccgaagaaagcctcgagggcaaagttagccttaactgccgtgcgagagcctctcctttccccgtctacaagtggaggatgaataatggtgacgttgatctgacatccgatcggtag

SEQ ID NO: 89493 - DNA, 222 bp, Artificial Sequence
  derived and/or modified sequence
atgaaaatgtggctccttgtcagtcacctggtgatcatttccatcactacctgccttgccgaatttacttggtatagacggtatgggcacggcgtttccgaggaggataaggggtttggccctatcttcgaggagcaaccaatcaataccatatacccggaagaatccctagaggggaaagtgtcgctcaattgtcgggctcgggcttcgccattcccatag

SEQ ID NO: 89494 - DNA, 1963 bp, Artificial Sequence
  derived and/or modified sequence
caggtgtttaaaattatccaactgccatagagctaaattcttttttggaaaattgaaccgaacttctactgaatacaagatgaaaatgtggttgctggtcagtcatcttgtgataatatctattactacctgtttagcagagtttacatggtatagaagatatggtcatggagtttctgaggaagacaaaggatttggaccaatttttgaagagcagccaatcaataccatttatccagaggaatcactggaaggaaaagtctcactcaactgtagggcacgagccagccctttcccggtttacaaatggagaatgaataatggggacgttgatctcacaagtgatcgatacagtatggtaggaggaaaccttgttatcaacaaccctgacaaacagaaagatgctggaatatactactgtttagcatctaataactacgggatggtcagaagcactgaagcaaccctgagctttggatatcttgatcctttcccacctgaggaacgtcctgaggtcagagtaaaagaagggaaaggaatggtgcttctctgtgaccccccataccattttccagatgatcttagctatcgctggcttctaaatgaatttcctgtatttatcacaatggataaacggcgatttgtgtctcagacaaatggcaatctctacattgcaaatgttgaggcttccgacaaaggcaattattcctgctttgtttccagtccttctattacaaagagcgtgttcagcaaattcatcccactcattccaatacctgaacgaacaacaaaaccatatcctgctgatattgtagttcagttcaaggatgtatatgcattgatgggccaaaatgtgaccttagaatgttttgcacttggaaatcctgttccggatatccgatggcggaaggttctagaaccaatgccaagcactgctgagattagcacctctggggctgttcttaagatcttcaatattcagctagaagatgaaggcatctatgaatgtgaggctgagaacattagaggaaaggataaacatcaagcaagaatttatgttcaagcattccctgagtgggtagaacacatcaatgacacagaggtggacataggcagtgatctctactggccttgtgtggccacaggaaagcccatccctacaatccgatggttgaaaaatggatatgcgtatcataaaggggaattaagactgtatgatgtgacttttgaaaatgccggaatgtatcagtgcatagctgaaaacacatatggagccatttatgcaaatgctgagttgaagatcttggcgttggctccaacttttgaaatgaatcctatgaagaaaaagatcctggctgctaaaggtggaagggtgataattgaatgcaaacctaaagctgcaccgaaaccaaagttttcatggagtaaagggacagagtggcttgtcaatagcagcagaatactcatttgggaagatggtagcttggaaatcaacaacattacaaggaatgatggaggtatctatacatgctttgcagaaaataacagagggaaagctaatagcactggaacccttgttatcacagatcctacgcgaattatattggccccaattaatgccgatatcacagttggagaaaacgccaccatgcagtgtgctgcgtcctttgatcctgccttggatctcacatttgtttggtccttcaatggctatgtgatcgattttaacaaagagaatattcactaccagaggaattttatgctggattccaatggggaattactaatccgaaatgcgcagctgaaacatgctggaagatacacatgcactgcccagacaattgtggacaattcttcagcttcagctgaccttgtagtgagaggtaaaaacagaaaaggtggagagaaaaacatggtggattcctttctccccgtctgtgcaagcctgcctccaacctggtga

SEQ ID NO: 89495 - DNA, 3033 bp, Artificial Sequence
  derived and/or modified sequence
cttctgctgtcaagtagccagggtgggctccgccgaggcgaggaggggcgccggtggggagatgcgctcccaggtgtttgcagcggaagtgggaaacctgtagggtatggtccagctgtgccgcaccgaggcgagcaggagcagggaacaggtgtttaaaattatccaactgccatagagctaaattcttttttggaaaattgaaccgaacttctactgaatacaagatgaaaatgtggttgctggtcagtcatcttgtgataatatctattactacctgtttagcagagtttacatggtatagaagatatggtcatggagtttctgaggaagacaaaggatttggaccaatttttgaagagcagccaatcaataccatttatccagaggaatcactggaaggaaaagtctcactcaactgtagggcacgagccagccctttcccggtttacaaatggagaatgaataatggggacgttgatctcacaagtgatcgatacagtatggtaggaggaaaccttgttatcaacaaccctgacaaacagaaagatgctggaatatactactgtttagcatctaataactacgggatggtcagaagcactgaagcaaccctgagctttggatatcttgatcctttcccacctgaggaacgtcctgaggtcagagtaaaagaagggaaaggaatggtgcttctctgtgaccccccataccattttccagatgatcttagctatcgctggcttctaaatgaatttcctgtatttatcacaatggataaacggcgatttgtgtctcagacaaatggcaatctctacattgcaaatgttgaggcttccgacaaaggcaattattcctgctttgtttccagtccttctattacaaagagcgtgttcagcaaattcatcccactcattccaatacctgaacgaacaacaaaaccatatcctgctgatattgtagttcagttcaaggatgtatatgcattgatgggccaaaatgtgaccttagaatgttttgcacttggaaatcctgttccggatatccgatggcggaaggttctagaaccaatgccaagcactgctgagattagcacctctggggctgttcttaagatcttcaatattcagctagaagatgaaggcatctatgaatgtgaggctgagaacattagaggaaaggataaacatcaagcaagaatttatgttcaagcattccctgagtgggtagaacacatcaatgacacagaggtggacataggcagtgatctctactggccttgtgtggccacaggaaagcccatccctacaatccgatggttgaaaaatggatatgcgtatcataaaggggaattaagactgtatgatgtgacttttgaaaatgccggaatgtatcagtgcatagctgaaaacacatatggagccatttatgcaaatgctgagttgaagatcttggcgttggctccaacttttgaaatgaatcctatgaagaaaaagatcctggctgctaaaggtggaagggtgataattgaatgcaaacctaaagctgcaccgaaaccaaagttttcatggagtaaagggacagagtggcttgtcaatagcagcagaatactcatttgggaagatggtagcttggaaatcaacaacattacaaggaatgatggaggtatctatacatgctttgcagaaaataacagagggaaagctaatagcactggaacccttgttatcacagatcctacgcgaattatattggccccaattaatgccgatatcacagttggagaaaacgccaccatgcagtgtgctgcgtcctttgatcctgccttggatctcacatttgtttggtccttcaatggctatgtgatcgattttaacaaagagaatattcactaccagaggaattttatgctggattccaatggggaattactaatccgaaatgcgcagctgaaacatgctggaagatacacatgcactgcccagacaattgtggacaattcttcagcttcagctgaccttgtagtgagaggtaaaaacagaaaaggtggagagaaaaacatggtggattcctttctccccgtctgtgcaagcctgcctccaacctggtgatcgttgacactcaccatttctgtgaaagacttttttttttttaacatattatactagatttgactaactcaatcttgtagcttctgcagttctccccacccccaacctagttcttagagtatgtttccccttttgaaacatgtaaacatactttgggcataaatattttttaaaatataactataatgcttcactaataccttaaaaatgcctagtgaactaactcagtacattatataatggccaagtgaaagttttgtgttttcatgtcctgtttttctttgaaattatatagcccagaaattagctcattatctgaaaaacgtatgaagaactgatgaattgtataatacaggagtattgccattgaatgtactgtttgatttattcaagcaggtaatgaacaatgttgtcaaactctctaatgagacatcataattaggacataagctaaaaggggcattactccggcagtctttttttcttaatcctagtaccatacatattctttggcatgaaagaatgaaaagcattagtaaacaactgaagtcctaccatggctctgtagggtttttggaacaattcctggaattggaaagtgaaaatggatagcatgtgggggaaaccctcatctgagtagcaagattttagtaaagatgactaagccattaacagcatgcattcatatttaattttattgactcctgccatcagcttttgtagatcgtttgggtggaaggttgtgatttttactgggaggacttgagtagaagtggatgattaaaattgaggagtatataattctttctgggactgcttaaatgttattgtttgaaaataccttcactttccccctttggtcaaagagatgtgcttaaaattcttattccttcacaataaataattttgattttcttagaca

SEQ ID NO: 89496 - DNA, 3125 bp, Artificial Sequence
  derived and/or modified sequence
gctttatttgaaagtattgctatgtagacagccggcttttctgtcatctaacctgctctccccaggttggctgaaggatgggagcggctgtgcctgcctgtgaggtcacagcatgaagtccttttaacttgctttctgctgcaggagagaggcgtattgtggtataactgttgctgtatttattcaaatggacaatttgcaatagatattatacccaggacgacagataagtcaacacataaggtgtttaaaattatccaactgccatagagctaaattcttttttggaaaattgaaccgaacttctactgaatacaagatgaaaatgtggttgctggtcagtcatcttgtgataatatctattactacctgtttagcagagtttacatggtatagaagatatggtcatggagtttctgaggaagacaaaggatttggaccaatttttgaagagcagccaatcaataccatttatccagaggaatcactggaaggaaaagtctcactcaactgtagggcacgagccagccctttcccggtttacaaatggagaatgaataatggggacgttgatctcacaagtgatcgatacagtatggtaggaggaaaccttgttatcaacaaccctgacaaacagaaagatgctggaatatactactgtttagcatctaataactacgggatggtcagaagcactgaagcaaccctgagctttggatatcttgatcctttcccacctgaggaacgtcctgaggtcagagtaaaagaagggaaaggaatggtgcttctctgtgaccccccataccattttccagatgatcttagctatcgctggcttctaaatgaatttcctgtatttatcacaatggataaacggcgatttgtgtctcagacaaatggcaatctctacattgcaaatgttgaggcttccgacaaaggcaattattcctgctttgtttccagtccttctattacaaagagcgtgttcagcaaattcatcccactcattccaatacctgaacgaacaacaaaaccatatcctgctgatattgtagttcagttcaaggatgtatatgcattgatgggccaaaatgtgaccttagaatgttttgcacttggaaatcctgttccggatatccgatggcggaaggttctagaaccaatgccaagcactgctgagattagcacctctggggctgttcttaagatcttcaatattcagctagaagatgaaggcatctatgaatgtgaggctgagaacattagaggaaaggataaacatcaagcaagaatttatgttcaagcattccctgagtgggtagaacacatcaatgacacagaggtggacataggcagtgatctctactggccttgtgtggccacaggaaagcccatccctacaatccgatggttgaaaaatggatatgcgtatcataaaggggaattaagactgtatgatgtgacttttgaaaatgccggaatgtatcagtgcatagctgaaaacacatatggagccatttatgcaaatgctgagttgaagatcttggcgttggctccaacttttgaaatgaatcctatgaagaaaaagatcctggctgctaaaggtggaagggtgataattgaatgcaaacctaaagctgcaccgaaaccaaagttttcatggagtaaagggacagagtggcttgtcaatagcagcagaatactcatttgggaagatggtagcttggaaatcaacaacattacaaggaatgatggaggtatctatacatgctttgcagaaaataacagagggaaagctaatagcactggaacccttgttatcacagatcctacgcgaattatattggccccaattaatgccgatatcacagttggagaaaacgccaccatgcagtgtgctgcgtcctttgatcctgccttggatctcacatttgtttggtccttcaatggctatgtgatcgattttaacaaagagaatattcactaccagaggaattttatgctggattccaatggggaattactaatccgaaatgcgcagctgaaacatgctggaagatacacatgcactgcccagacaattgtggacaattcttcagcttcagctgaccttgtagtgagaggtaaaaacagaaaaggtggagagaaaaacatggtggattcctttctccccgtctgtgcaagcctgcctccaacctggtgatcgttgacactcaccatttctgtgaaagacttttttttttttaacatattatactagatttgactaactcaatcttgtagcttctgcagttctccccacccccaacctagttcttagagtatgtttccccttttgaaacatgtaaacatactttgggcataaatattttttaaaatataactataatgcttcactaataccttaaaaatgcctagtgaactaactcagtacattatataatggccaagtgaaagttttgtgttttcatgtcctgtttttctttgaaattatatagcccagaaattagctcattatctgaaaaacgtatgaagaactgatgaattgtataatacaggagtattgccattgaatgtactgtttgatttattcaagcaggtaatgaacaatgttgtcaaactctctaatgagacatcataattaggacataagctaaaaggggcattactccggcagtctttttttcttaatcctagtaccatacatattctttggcatgaaagaatgaaaagcattagtaaacaactgaagtcctaccatggctctgtagggtttttggaacaattcctggaattggaaagtgaaaatggatagcatgtgggggaaaccctcatctgagtagcaagattttagtaaagatgactaagccattaacagcatgcattcatatttaattttattgactcctgccatcagcttttgtagatcgtttgggtggaaggttgtgatttttactgggaggacttgagtagaagtggatgattaaaattgaggagtatataattctttctgggactgcttaaatgttattgtttgaaaataccttcactttccccctttggtcaaagagatgtgcttaaaattcttattccttcacaataaataattttgattttcttagaca

SEQ ID NO: 89497 - DNA, 553 bp, Artificial Sequence
  derived and/or modified sequence
agctgaactgaatttacacgaaaagggaaggaggaaaatggtttgtctttttttgcagagaattctatccaaattcacttgcatttaattacttcatattttggaaatgacattttcaaccatgtgacaaatctgcagcccctttgccatgattaaaggtctcctgaggccctgaccagaagcaaacgctagtgccaggcttcttgtacagcccgcaaaactgtgtttaaaattatccaactgccatagagctaaattcttttttggaaaattgaaccgaacttctactgaatacaagatgaaaatgtggttgctggtcagtcatcttgtgataatatctattactacctgtttagcagagtttacatggtatagaagatatggtcatggagtttctgaggaagacaaaggatttggaccaatttttgaagagcagccaatcaataccatttatccagaggaatcactggaaggaaaagtctcactcaactgtagggcacgagccagccctttcccggtttacaaatggagaatgaataatggggacgttgat

SEQ ID NO: 89498 - DNA, 555 bp, Artificial Sequence
  derived and/or modified sequence
gggtgggctccgccgaggcgaggaggggcgccggtggggagatgcgctcccaggtgtttgcagcggaagtgggaaacctgtagggtatggtccagctgtgccgcaccgaggcgagcaggagcagggaacagtagagacggggtttcaccgtgttagccaagatggtctcgatctcctgacttcgtgatccgcccgcctcgacctcccaaagtgctgggattacaggcgtgagccaccgtgcccggccgcttcaagatttcttaatgaaggtagttgcatcgatgttcataggtgtttaaaattatccaactgccatagagctaaattcttttttggaaaattgaaccgaacttctactgaatacaagatgaaaatgtggttgctggtcagtcatcttgtgataatatctattactacctgtttagcagagtttacatggtatagaagatatggtcatggagtttctgaggaagacaaaggatttggaccaatttttgaagagcagccaatcaataccatttatccagaggaatcactggaaggaaaagtctcact

SEQ ID NO: 89499 - DNA, 463 bp, Artificial Sequence
  derived and/or modified sequence
ctgaactgaatttacacgaaaagggaaggaggaaaatggtttgtctttttttgcagagaattctatccaaattcacttgcatttaattacttcatattttggaaatgacattttcaagtgtttaaaattatccaactgccatagagctaaattcttttttggaaaattgaaccgaacttctactgaatacaagatgaaaatgtggttgctggtcagtcatcttgtgataatatctattactacctgtttagcagagtttacatggtatagaagatatggtcatggagtttctgaggaagacaaaggatttggaccaatttttgaagagcagccaatcaataccatttatccagaggaatcactggaaggaaaagtctcactcaactgtagggcacgagccagccctttcccggtttacaaatggagaatgaataatggggacgttgatctcacaagtgatcga

SEQ ID NO: 89500 - DNA, 572 bp, Artificial Sequence
  derived and/or modified sequence
aacttgctttctgctgcaggagagaggcgtattgtggtataactgttgctgtatttattcaaatggacaatttgcaatagatattatacccaggacgacagataagtcaacacataagtagagacggggtttcaccgtgttagccaagatggtctcgatctcctgacttcgtgatccgcccgcctcgacctcccaaagtgctgggattacaggcgtgagccaccgtgcccggccgcttcaagatttcttaatgaaggtagttgcatcgatgttcataggtgtttaaaattatccaactgccatagagctaaattcttttttggaaaattgaaccgaacttctactgaatacaagatgaaaatgtggttgctggtcagtcatcttgtgataatatctattactacctgtttagcagagtttacatggtatagaagatatggtcatggagtttctgaggaagacaaaggatttggaccaatttttgaagagcagccaatcaataccatttatccagaggaatcactggaaggaaaagtctcactcaactgtagggcacgagccagccctttccc

SEQ ID NO: 89501 - DNA, 1884 bp, Artificial Sequence
  derived and/or modified sequence
atgaagatgtggctgctggtgagccacctggtgatcatcagcatcaccacctgcctggccgagttcacctggtacagaagatacggccacggcgtgagcgaggaggacaagggcttcggccccatcttcgaggagcagcccatcaacaccatctaccccgaggagagcctggagggcaaggtgagcctgaactgcagagccagagccagccccttccccgtgtacaagtggagaatgaacaacggcgacgtggacctgaccagcgacagatacagcatggtgggcggcaacctggtgatcaacaaccccgacaagcagaaggacgccggcatctactactgcctggccagcaacaactacggcatggtgagaagcaccgaggccaccctgagcttcggctacctggaccccttcccccccgaggagagacccgaggtgagagtgaaggagggcaagggcatggtgctgctgtgcgaccccccctaccacttccccgacgacctgagctacagatggctgctgaacgagttccccgtgttcatcaccatggacaagagaagattcgtgagccagaccaacggcaacctgtacatcgccaacgtggaggccagcgacaagggcaactacagctgcttcgtgagcagccccagcatcaccaagagcgtgttcagcaagttcatccccctgatccccatccccgagagaaccaccaagccctaccccgccgacatcgtggtgcagttcaaggacgtgtacgccctgatgggccagaacgtgaccctggagtgcttcgccctgggcaaccccgtgcccgacatcagatggagaaaggtgctggagcccatgcccagcaccgccgagatcagcaccagcggcgccgtgctgaagatcttcaacatccagctggaggacgagggcatctacgagtgcgaggccgagaacatcagaggcaaggacaagcaccaggccagaatctacgtgcaggccttccccgagtgggtggagcacatcaacgacaccgaggtggacatcggcagcgacctgtactggccctgcgtggccaccggcaagcccatccccaccatcagatggctgaagaacggctacgcctaccacaagggcgagctgagactgtacgacgtgaccttcgagaacgccggcatgtaccagtgcatcgccgagaacacctacggcgccatctacgccaacgccgagctgaagatcctggccctggcccccaccttcgagatgaaccccatgaagaagaagatcctggccgccaagggcggcagagtgatcatcgagtgcaagcccaaggccgcccccaagcccaagttcagctggagcaagggcaccgagtggctggtgaacagcagcagaatcctgatctgggaggacggcagcctggagatcaacaacatcaccagaaacgacggcggcatctacacctgcttcgccgagaacaacagaggcaaggccaacagcaccggcaccctggtgatcaccgaccccaccagaatcatcctggcccccatcaacgccgacatcaccgtgggcgagaacgccaccatgcagtgcgccgccagcttcgaccccgccctggacctgaccttcgtgtggagcttcaacggctacgtgatcgacttcaacaaggagaacatccactaccagagaaacttcatgctggacagcaacggcgagctgctgatcagaaacgcccagctgaagcacgccggcagatacacctgcaccgcccagaccatcgtggacaacagcagcgccagcgccgacctggtggtgagaggcaagaacagaaagggcggcgagaagaacatggtggacagcttcctgcccgtgtgcgccagcctgccccccacctggtag

SEQ ID NO: 89502 - DNA, 258 bp, Artificial Sequence
  derived and/or modified sequence
atgaagatgtggctgctggtgagccacctggtgatcatcagcatcaccacctgcctggccgagttcacctggtacagaagatacggccacggcgtgagcgaggaggacaagggcttcggccccatcttcgaggagcagcccatcaacaccatctaccccgaggagagcctggagggcaaggtgagcctgaactgcagagccagagccagccccttccccgtgtacaagtggagaatgaacaacggcgacgtggactag

SEQ ID NO: 89503 - DNA, 192 bp, Artificial Sequence
  derived and/or modified sequence
atgaagatgtggctgctggtgagccacctggtgatcatcagcatcaccacctgcctggccgagttcacctggtacagaagatacggccacggcgtgagcgaggaggacaagggcttcggccccatcttcgaggagcagcccatcaacaccatctaccccgaggagagcctggagggcaaggtgagcctgtag

SEQ ID NO: 89504 - DNA, 273 bp, Artificial Sequence
  derived and/or modified sequence
atgaagatgtggctgctggtgagccacctggtgatcatcagcatcaccacctgcctggccgagttcacctggtacagaagatacggccacggcgtgagcgaggaggacaagggcttcggccccatcttcgaggagcagcccatcaacaccatctaccccgaggagagcctggagggcaaggtgagcctgaactgcagagccagagccagccccttccccgtgtacaagtggagaatgaacaacggcgacgtggacctgaccagcgacagatag

SEQ ID NO: 89505 - DNA, 222 bp, Artificial Sequence
  derived and/or modified sequence
atgaagatgtggctgctggtgagccacctggtgatcatcagcatcaccacctgcctggccgagttcacctggtacagaagatacggccacggcgtgagcgaggaggacaagggcttcggccccatcttcgaggagcagcccatcaacaccatctaccccgaggagagcctggagggcaaggtgagcctgaactgcagagccagagccagccccttcccctag

SEQ ID NO: 89506 - protein, 427 aa, Artificial Sequence
  derived and/or modified sequence
MASLGDLVRAWHLGAQAVDRGDWARALHLFSGVPAPPARLCFNAGCVHLLAGDPEAALRAFDQAVTKDTCMAVGFFQRGVANFQLARFQEALSDFWLALEQLRGHAAIDYTQLGLRFKLQAWEVLHNVASAQCQLGLWTEAASSLREAMSKWPEGSLNGLDSALDQVQGPGANHDARSLIMDSPRAGTHQGPLDAETEVGADRCTSTAYQEQRPQVEQVGKQAPLSPGLPAMGGPGPGPCEDPAGAGGAGAGGSEPLVTVTVQCAFTVALRARRGADLSSLRALLGQALPHQAQLGQLSYLAPGEDGHWVPIPEEESLQRAWQDAAACPRGLQLQCRGAGGRPVLYQVVAQHSYSAQGPEDLGFRQGDTVDVLCEEPDVPLAVDQAWLEGHCDGRIGIFPKCFVVPAGPRMSGAPGRLPRSQQGDQP

SEQ ID NO: 89507 - DNA, 1284 bp, Artificial Sequence
  derived and/or modified sequence
atggccagcctgggcgacctggtgagagcctggcacctgggcgcccaggccgtggacagaggcgactgggccagagccctgcacctgttcagcggcgtgcccgccccccccgccagactgtgcttcaacgccggctgcgtgcacctgctggccggcgaccccgaggccgccctgagagccttcgaccaggccgtgaccaaggacacctgcatggccgtgggcttcttccagagaggcgtggccaacttccagctggccagattccaggaggccctgagcgacttctggctggccctggagcagctgagaggccacgccgccatcgactacacccagctgggcctgagattcaagctgcaggcctgggaggtgctgcacaacgtggccagcgcccagtgccagctgggcctgtggaccgaggccgccagcagcctgagagaggccatgagcaagtggcccgagggcagcctgaacggcctggacagcgccctggaccaggtgcagggccccggcgccaaccacgacgccagaagcctgatcatggacagccccagagccggcacccaccagggccccctggacgccgagaccgaggtgggcgccgacagatgcaccagcaccgcctaccaggagcagagaccccaggtggagcaggtgggcaagcaggcccccctgagccccggcctgcccgccatgggcggccccggccccggcccctgcgaggaccccgccggcgccggcggcgccggcgccggcggcagcgagcccctggtgaccgtgaccgtgcagtgcgccttcaccgtggccctgagagccagaagaggcgccgacctgagcagcctgagagccctgctgggccaggccctgccccaccaggcccagctgggccagctgagctacctggcccccggcgaggacggccactgggtgcccatccccgaggaggagagcctgcagagagcctggcaggacgccgccgcctgccccagaggcctgcagctgcagtgcagaggcgccggcggcagacccgtgctgtaccaggtggtggcccagcacagctacagcgcccagggccccgaggacctgggcttcagacagggcgacaccgtggacgtgctgtgcgaggagcccgacgtgcccctggccgtggaccaggcctggctggagggccactgcgacggcagaatcggcatcttccccaagtgcttcgtggtgcccgccggccccagaatgagcggcgcccccggcagactgcccagaagccagcagggcgaccagccctag

SEQ ID NO: 89508 - DNA, 1284 bp, Artificial Sequence
  derived and/or modified sequence
atggcgagcctaggcgatctcgtacgggcctggcacttaggcgctcaagccgtcgaccgcggggattgggcccgggctctgcatctattcagtggggttcctgcaccgcctgcacgcttatgtttcaacgccggatgcgtgcaccttttggccggcgatccagaggccgctttgcgggccttcgatcaagctgtgaccaaggacacctgcatggccgttggcttttttcagcggggggttgcgaactttcagctggccagattccaggaggcactcagcgatttctggctggccctggagcaactccgcgggcacgccgcgatcgattacacacagcttggactgaggttcaaacttcaagcttgggaagtgcttcacaatgtcgcctcagcccagtgtcagttgggcctatggacagaagccgcctcttctctgcgtgaagccatgagtaaatggccggagggtagcctgaatggcctggacagcgccttggaccaggtccaggggccaggggcaaaccacgatgcaagatccctgattatggattctcctcgcgctggaactcatcaaggcccccttgatgcagagaccgaagtaggtgctgaccggtgcacctctactgcataccaagagcagcgtcctcaggtcgaacaggtcggaaaacaggctccactcagtccaggtctgcctgcaatgggcggccccggaccaggcccatgtgaggaccccgctggcgcgggaggggccggagccggcggctcagagcccttggtgacagtaacagttcagtgcgcattcaccgtcgcccttagggcaagaaggggtgcagacttaagtagcctgagggcattattgggacaggccctgccacaccaagcccagttaggtcagctgtcatacctggcccccggggaagacgggcattgggttccaattccagaagaggagtcattacaacgggcctggcaggacgctgcagcctgccctagggggctgcagctgcagtgtcgcggagcaggggggagaccagtactgtaccaggtggtggcccagcatagctacagtgcacagggaccagaggatctgggcttccggcagggcgatacagtggacgtcctttgtgaagagccggatgtgccgttagctgtggatcaggcatggctggagggacattgcgatggcagaatcggcattttccctaagtgcttcgtggtcccggctgggcctagaatgtctggggcacctggcaggctcccacgatcacaacagggggaccagccttag

SEQ ID NO: 89509 - DNA, 1284 bp, Artificial Sequence
  derived and/or modified sequence
atggccagcctgggggacctggtgcgggcctggcacctgggcgcccaggccgtggacagaggagactgggcccgggccctgcacctgttctctggagtgcctgcccccccagcccggctgtgcttcaatgccggctgtgtgcacctgctggccggggaccctgaggccgccctgcgggcctttgaccaggccgtgaccaaggacacctgcatggctgtgggcttcttccagaggggcgtggccaacttccagctggcccgcttccaggaggccctgagtgacttctggctggccctggagcagctgcggggccacgccgccatcgactacacccagctgggcctgcgcttcaagctgcaggcctgggaggtgctgcacaacgtggccagcgcccagtgccagctgggcctgtggacagaagctgccagcagcctgcgggaggccatgagcaagtggccagagggcagcctgaatggcctggacagcgccctggaccaggtgcagggccctggggccaaccatgatgcccggagcctcatcatggacagcccccgggccggcacccaccagggccccctggatgctgagacagaggtgggcgctgaccgctgcaccagcacagcctaccaggagcagaggccccaggtggagcaggtgggcaagcaggcccccctgagccctggcctgcctgccatgggcggccctggccctggcccctgtgaagatcctgctggggccggcggggccggggccggcggcagcgagcccctggtgacagtgacagtgcagtgtgccttcaccgtggccctgcgggccaggagaggagctgacctgagcagcctgcgggccctgctgggccaggccctgccccaccaggcccagctgggccagctgagctacctggcccctggagaagatggccactgggtgcccatccctgaggaggagagcctgcagagggcctggcaggatgctgctgcctgcccccggggcctgcagctgcagtgcagaggagctgggggccggcctgtgctgtaccaggtggtggcccagcacagctacagcgcccagggccctgaggacctgggcttccggcagggcgacacagtggatgtgctgtgtgaggagccagatgtgcccctggccgtggaccaggcctggctggagggccactgtgatggccgcatcggcatcttccccaagtgctttgtggtgcctgctggccccaggatgtctggggcccctggccgcctgcccaggagccagcagggcgaccagccctag

SEQ ID NO: 89510 - DNA, 1464 bp, Artificial Sequence
  derived and/or modified sequence
cggggttgcacctggcgcttggcgcccgcacctctgcccgcctcggagaccccgcagccccgcgccgccgcctggccccggccccggcccctccgcgggatcctggcccctcctcgagcgccgccaccggccgccatggcctctctgggggacctggtgcgcgcctggcacctgggcgcgcaggctgtggatcgtggggactgggcccgcgccttgcacctcttctcgggcgtcccggcgccgcccgccaggctgtgcttcaacgcgggctgcgtgcacctgctggccggggaccccgaggccgcgctgcgggcatttgaccaagccgtgaccaaggacacctgcatggcggttggcttcttccagcgaggagtggccaacttccagctggcaaggttccaggaggctctgtctgacttctggctggccctggagcagctgaggggccacgctgccatcgactacacgcagctgggcctgcggttcaagctgcaagcctgggaggtgctacacaatgtggcgtcggcacagtgccagctggggctctggacagaggcggccagcagcctaagggaggccatgtccaagtggccggaggggtccctgaatggcctggactcagccctggaccaagtgcagggaccaggagcgaaccatgatgccaggtccctaatcatggactccccaagagctggcacccaccagggccccctcgatgcagagacagaggtcggtgctgaccgctgcacgtcgactgcctaccaggagcagaggccccaggtggagcaagttggcaaacaggctcctctctccccagggctgccggcaatgggggggcctggccccggcccctgtgaggaccccgcgggtgctgggggagcaggtgcagggggctccgagcccctggtgactgtcaccgtgcagtgcgccttcacagtggccctgagggcacgaagaggagccgacctgtccagcctgcgggcactgctgggccaagccctccctcaccaggcccagcttgggcaactcagttacctagccccaggtgaggacgggcactgggtccccatccccgaggaggagtcgctgcagagggcctggcaggacgcagctgcctgccccagggggctgcagctgcagtgcaggggagccgggggtcggccggtcctctaccaggtggtggcccagcacagctactccgcccaggggccagaggacctgggcttccgacagggggacacggtggacgtcctgtgtgaagagcccgatgtcccccttgcagtggaccaggcatggctggagggccactgtgacggccgcatcggcatcttccccaagtgcttcgtggtccccgccggccctcggatgtcaggagcccccggccgcctgccccgatcccagcagggagatcagccctaatgatgctgtgtccatgatgcttttaataaaaacaacccccactgc

SEQ ID NO: 89511 - DNA, 1284 bp, Artificial Sequence
  derived and/or modified sequence
atggccagcctgggcgacctggtgcgggcctggcacctgggcgcccaggctgtcgataggggggactgggcacgagctttgcaccttttttccggcgttccggctcccccagcacgcctttgtttcaatgcgggatgtgtgcatctcttggctggtgaccccgaagctgcccttcgtgcattcgaccaagcagtcaccaaagatacatgcatggcagtcgggttcttccagaggggcgttgcaaactttcagttggcccgattccaggaggccctgtcagacttctggctggccttggagcagctgagaggtcatgccgccattgattatacgcagttggggctgagattcaagcttcaggcatgggaagtcttacacaatgtggcctctgctcaatgccagctggggctctggacggaagcggcttccagcctgcgcgaagccatgagcaagtggccagagggttcactgaatggtcttgattctgcgctggaccaggtgcaagggcctggagcaaatcatgacgcccggagcctaattatggactctcctcgagcaggcacccaccaggggccattggatgcagaaacggaagtaggcgccgatagatgtacctctacggcataccaggagcagagacctcaggtggagcaggtaggtaaacaggctcctttatccccaggactgcccgcaatggggggccccgggcccggcccatgtgaggaccccgctggcgctggcggggcaggagctggaggatctgagcctcttgttacggtgacagtccagtgtgccttcacagtagccctcagagccagacggggggctgacctgtccagcctccgggctctcttgggccaggctttgcctcatcaagctcaactgggccagttgagctacctggcccctggcgaagacgggcactgggtcccaatcccggaggaagagtcccttcagagggcctggcaggacgccgccgcttgcccccggggcctgcagctccaatgtcggggggccggaggccggccggtgctgtatcaggtcgtggcccagcatagctactcagcccaggggcctgaggatttaggctttagacagggcgacaccgttgacgttctctgcgaagagcccgacgtacctctggcggtcgaccaggcttggttggagggtcactgtgatggtcggattggcatttttcctaagtgcttcgtcgtgcccgctggtccccgcatgtccggcgctcctgggcgcctcccaagaagccagcagggtgatcagccatag

SEQ ID NO: 89512 - DNA, 1284 bp, Artificial Sequence
  derived and/or modified sequence
atggcttctctcggagacttagtgagagcctggcatttaggagcacaagctgtcgatcggggagactgggccagggcgttacatttattcagcggtgtgcccgcaccacccgctagactatgcttcaacgccggatgtgtgcatctgctggccggtgacccagaagcagcgctgcgagcattcgatcaggcagttaccaaagacacctgcatggcagttggattctttcaacggggagtggccaatttccagctggcgagatttcaggaggccttgtctgacttctggttggccctggagcaactgcgtgggcacgccgctatcgattatacgcagctgggattgcgcttcaagcttcaggcatgggaggtattgcataacgtggcaagcgcccaatgccagctgggcttgtggactgaggccgcatcctccctcagagaagcaatgagcaagtggcctgagggctcactcaatggccttgatagtgctctcgatcaggttcaggggcctggcgctaaccacgacgcccgatctctgatcatggactcaccaagagccggtactcatcagggaccgctagatgccgagacagaagtcggagcagaccgctgcacatccactgcgtaccaggagcagcggccacaagtggaacaggtgggcaagcaggcccctctatccccagggctgcccgcaatgggcggacctggacccggtccctgcgaagatccagccggagcaggaggtgccggtgctggcggatccgaaccactcgtcaccgtaactgtgcaatgcgccttcaccgtcgcgctacgggcacgaaggggggctgatctttcttctttacgggctctgcttggccaggctcttcctcaccaggctcagctgggccaactgtcttatctcgctcctggagaggacggccactgggtgcccattcccgaagaggaatctctgcagagagcatggcaagatgccgctgcatgcccgagaggcctgcaattgcagtgccggggagcaggaggacgacctgtcctctaccaggttgttgcgcagcacagctattctgctcaggggcctgaagacctcgggttccgccaaggcgatactgtagacgtgctgtgtgaggaacctgacgtgccattggccgtggatcaggcttggctcgaggggcactgtgatggcagaataggaatttttccaaagtgctttgtggtgcccgcaggaccacggatgtcaggggcaccaggcaggctgcctaggtcacagcagggcgaccagccatag

SEQ ID NO: 89513 - protein, 354 aa, Artificial Sequence
  derived and/or modified sequence
MRLAVLFSGALLGLLAAQGTGNDCPHKKSATLLPSFTVTPTVTESTGTTSHRTTKSHKTTTHRTTTTGTTSHGPTTATHNPTTTSHGNVTVHPTSNSTATSQGPSTATHSPATTSHGNATVHPTSNSTATSPGFTSSAHPEPPPPSPSPSPTSKETIGDYTWTNGSQPCVHLQAQIQIRVMYTTQGGGEAWGISVLNPNKTKVQGSCEGAHPHLLLSFPYGHLSFGFMQDLQQKVVYLSYMAVEYNVSFPHAAQWTFSAQNASLRDLQAPLGQSFSCSNSSIILSPAVHLDLLSLRLQAAQLPHTGVFGQSFSCPSDRSILLPLIIGLILLGLLALVLIAFCIIRRRPSAYQAL

SEQ ID NO: 89514 - protein, 1550 aa, Artificial Sequence
  derived and/or modified sequence
MECPSCQHVSKEETPKFCSQCGERLPPAAPIADSENNNSTMASASEGEMECGQELKEEGGPCLFPGSDSWQENPEEPCSKASWTVQESKKKKRKKKKKGNKSASSELASLPLSPASPCHLTLLSNPWPQDTALPHSQAQQSGPTGQPSQPPGTATTPLEGDGLSAPTEVGDSPLQAQALGEAGVATGSEAQSSPQFQDHTEGEDQDASIPSGGRGLSQEGTGPPTSAGEGHSRTEDAAQELLLPESKGGSSEPGTELQTTEQQAGASASMAVDAVAEPANAVKGAGKEMKEKTQRMKQPPATTPPFKTHCQEAETKTKDEMAAAEEKVGKNEQGEPEDLKKPEGKNRSAAAVKNEKEQKNQEADVQEVKASTLSPGGGVTVFFHAIISLHFPFNPDLHKVFIRGGEEFGESKWDSNICELHYTRDLGHDRVLVEGIVCISKKHLDKYIPYKYVIYNGESFEYEFIYKHQQKKGEYVNRCLFIKSSLLGSGDWHQYYDIVYMKPHGRLQKVMNHITDGPRKDLVKGKQIAAALMLDSTFSILQTWDTINLNSFFTQFEQFCFVLQQPMIYEGQAQLWTDLQYREKEVKRYLWQHLKKHVVPLPDGKSTDFLPVDCPVRSKLKTGLIVLFVVEKIELLLEGSLDWLCHLLTSDASSPDEFHRDLSHILGIPQSWRLYLVNLCQRCMDTRTYTWLGALPVLHCCMELAPRHKDAWRQPEDTWAALEGLSFSPFREQMLDTSSLLQFMREKQHLLSIDEPLFRSWFSLLPLSHLVMYMENFIEHLGRFPAHILDCLSGIYYRLPGLEQVLNTQDVQDVQNVQNILEMLLRLLDTYRDKIPEEALSPSYLTVCLKLHEAICSSTKLLKFYELPALSAEIVCRMIRLLSLVDSAGQRDETGNNSVQTVFQGTLAATKRWLREVFTKNMLTSSGASFTYVKEIEVWRRLVEIQFPAEHGWKESLLGDMEWRLTKEEPLSQITAYCNSCWDTKGLEDSVAKTFEKCIIEAVSSACQSQTSILQGFSYSDLRKFGIVLSAVITKSWPRTADNFNDILKHLLTLADVKHVFRLCGTDEKILANVTEDAKRLIAVADSVLTKVVGDLLSGTILVGQLELIIKHKNQFLDIWQLREKSLSPQDEQCAVEEALDWRREELLLLKKEKRCVDSLLKMCGNVKHLIQVDFGVLAVRHSQDLSSKRLNDTVTVRLSTSSNSQRATHYHLSSQVQEMAGKIDLLRDSHIFQLFWREAAEPLSEPKEDQEAAELLSEPEEESERHILELEEVYDYLYQPSYRKFIKLHQDLKSGEVTLAEIDVIFKDFVNKYTDLDSELKIMCTVDHQDQRDWIKDRVEQIKEYHHLHQAVHAAKVILQVKESLGLNGDFSVLNTLLNFTDNFDDFRRETLDQINQELIQAKKLLQDISEARCKGLQALSLRKEFICWVREALGGINELKVFVDLASISAGENDIDVDRVACFHDAVQGYASLLFKLDPSVDFSAFMKHLKKLWKALDKDQYLPRKLVSLILSLMQILLNRALLSNVRAVTVEMVAHLCGRFVHSRFQ

SEQ ID NO: 89515 - protein, 5207 aa, Artificial Sequence
  derived and/or modified sequence
MECPSCQHVSKEETPKFCSQCGERLPPAAPIADSENNNSTMASASEGEMECGQELKEEGGPCLFPGSDSWQENPEEPCSKASWTVQESKKKKRKKKKKGNKSASSELASLPLSPASPCHLTLLSNPWPQDTALPHSQAQQSGPTGQPSQPPGTATTPLEGDGLSAPTEVGDSPLQAQALGEAGVATGSEAQSSPQFQDHTEGEDQDASIPSGGRGLSQEGTGPPTSAGEGHSRTEDAAQELLLPESKGGSSEPGTELQTTEQQAGASASMAVDAVAEPANAVKGAGKEMKEKTQRMKQPPATTPPFKTHCQEAETKTKDEMAAAEEKVGKNEQGEPEDLKKPEGKNRSAAAVKNEKEQKNQEADVQEVKASTLSPGGGVTVFFHAIISLHFPFNPDLHKVFIRGGEEFGESKWDSNICELHYTRDLGHDRVLVEGIVCISKKHLDKYIPYKYVIYNGESFEYEFIYKHQQKKGEYVNRCLFIKSSLLGSGDWHQYYDIVYMKPHGRLQKVMNHITDGPRKDLVKGKQIAAALMLDSTFSILQTWDTINLNSFFTQFEQFCFVLQQPMIYEGQAQLWTDLQYREKEVKRYLWQHLKKHVVPLPDGKSTDFLPVDCPVRSKLKTGLIVLFVVEKIELLLEGSLDWLCHLLTSDASSPDEFHRDLSHILGIPQSWRLYLVNLCQRCMDTRTYTWLGALPVLHCCMELAPRHKDAWRQPEDTWAALEGLSFSPFREQMLDTSSLLQFMREKQHLLSIDEPLFRSWFSLLPLSHLVMYMENFIEHLGRFPAHILDCLSGIYYRLPGLEQVLNTQDVQDVQNVQNILEMLLRLLDTYRDKIPEEALSPSYLTVCLKLHEAICSSTKLLKFYELPALSAEIVCRMIRLLSLVDSAGQRDETGNNSVQTVFQGTLAATKRWLREVFTKNMLTSSGASFTYVKEIEVWRRLVEIQFPAEHGWKESLLGDMEWRLTKEEPLSQITAYCNSCWDTKGLEDSVAKTFEKCIIEAVSSACQSQTSILQGFSYSDLRKFGIVLSAVITKSWPRTADNFNDILKHLLTLADVKHVFRLCGTDEKILANVTEDAKRLIAVADSVLTKVVGDLLSGTILVGQLELIIKHKNQFLDIWQLREKSLSPQDEQCAVEEALDWRREELLLLKKEKRCVDSLLKMCGNVKHLIQVDFGVLAVRHSQDLSSKRLNDTVTVRLSTSSNSQRATHYHLSSQVQEMAGKIDLLRDSHIFQLFWREAAEPLSEPKEDQEAAELLSEPEEESERHILELEEVYDYLYQPSYRKFIKLHQDLKSGEVTLAEIDVIFKDFVNKYTDLDSELKIMCTVDHQDQRDWIKDRVEQIKEYHHLHQAVHAAKVILQVKESLGLNGDFSVLNTLLNFTDNFDDFRRETLDQINQELIQAKKLLQDISEARCKGLQALSLRKEFICWVREALGGINELKVFVDLASISAGENDIDVDRVACFHDAVQGYASLLFKLDPSVDFSAFMKHLKKLWKALDKDQYLPRKLCDSARNLEWLKTVNESHGSVERSSLTLATAINQRGIYVIQAPKGGQKISPDTVLHLILPESPGSHEESREYSLEEVKELLNKLMLMSGKKDRNNTEVERFSEVFCSVQRLSQAFIDLHSAGNMLFRTWIAMAYCSPKQGVSLQMDFGLDLVTELKEGGDVTELLAALCRQMEHFLDSWKRFVTQKRMEHFYLNFYTAEQLVYLSTELRKQPPSDAALTMLSFIKSNCTLRDVLRASVGCGSEAARYRMRRVMEELPLMLLSEFSLVDKLRIIMEQSMRCLPAFLPDCLDLETLGHCLAHLAGMGGSPVERCLPRGLQVGQPNLVVCGHSEVLPAALAVYMQTPSQPLPTYDEVLLCTPATTFEEVALLLRRCLTLGSLGHKVYSLLFADQLSYEVARQAEELFHNLCTQQHREDYQLVMVCDGDWEHCYLPSAFSQHKVFVTPQAPLEAIQAYLAGHYRVPKQTLSAAAVFNDRLCVGIVASERAGVGKSLYVKRLHDKMKMQLNVKNVPLKTIRLIDPQVDESRVLGALLPFLDAQYQKVPVLFHLDVTSSVQTGIWVFLFKLLILQYLMDINGKMWLRNPCHLYIVEILERRTSVPSRSSSALRTRVPQFSFLDIFPKVTCRPPKEVIDMELSALRSDTEPGMDLWEFCSETFQRPYQYLRRFNQNQDLDTFQYQEGSVEGTPEECLQHFLFHCGVINPSWSELRNFARFLNYQLRDCEASLFCNPSFIGDTLRGFKKFVVTFMIFMARDFATPSLHTSDQSPGKHMVTMDGVREEDLAPFSLRKRWESEPHPYVFFNDDHTTMTFIGFHLQPNINGSVDAISHLTGKVIKRDVMTRDLYQGLLLQRVPFNVDFDKLPRHKKLERLCLTLGIPQATDPDKTYELTTDNMLKILAIEMRFRCGIPVIIMGETGCGKTRLIKFLSDLRRGGTNADTIKLVKVHGGTTADMIYSRVREAENVAFANKDQHQLDTILFFDEANTTEAISCIKEVLCDHMVDGQPLAEDSGLHIIAACNPYRKHSEEMICRLESAGLGYRVSMEETADRLGSIPLRQLVYRVHALPPSLIPLVWDFGQLSDVAEKLYIQQIVQRLVESISLDENGTRVITEVLCASQGFMRKTEDECSFVSLRDVERCVKVFRWFHEHSAMLLAQLNAFLSKSSVSKNHTERDPVLWSLMLAIGVCYHASLEKKDSYRKAIARFFPKPYDDSRLLLDEITRAQDLFLDGVPLRKTIAKNLALKENVFMMVVCIELKIPLFLVGKPGSSKSLAKTIVADAMQGPAAYSDLFRSLKQVHLVSFQCSPHSTPQGIISTFRQCARFQQGKDLQQYVSVVVLDEVGLAEDSPKMPLKTLHPLLEDGCIEDDPAPHKKVGFVGISNWALDPAKMNRGIFVSRGSPNETELIESAKGICSSDILVQDRVQGYFASFAKAYETVCKRQDKEFFGLRDYYSLIKMVFAAAKASNRKPSPQDIAQAVLRNFSGKDDIQALDIFLANLPEAKCSEEVSPMQLIKQNIFGPSQKVPGGEQEDAESRYLLVLTKNYVALQILQQTFFEGDQQPEIIFGSGFPKDQEYTQLCRNINRVKICMETGKMVLLLNLQNLYESLYDALNQYYVHLGGQKYVDLGLGTHRVKCRVHPNFRLIVIEEKDVVYKHFPIPLINRLEKHYLDINTVLEKWQKSIVEELCAWVEKFINVKAHHFQKRHKYSPSDVFIGYHSDACASVVLQVIERQGPRALTEELHQKVSEEAKSILLNCATPDAVVRLSAYSLGGFAAEWLSQEYFHRQRHNSFADFLQAHLHTADLERHAIFTEITTFSRLLTSHDCEILESEVTGRAPKPTLLWLQQFDTEYSFLKEVRNCLTNTAKCKILIFQTDFEDGIRSAQLIASAKYSVINEINKIRENEDRIFVYFITKLSRVGRGTAYVGFHGGLWQSVHIDDLRRSTLMVSDVTRLQHVTISQLFAPGDLPELGLEHRAEDGHEEAMETEASTSGEVAEVAEEAMETESSEKVGKETSELGGSDVSILDTTRLLRSCVQSAVGMLRDQNESCTRNMRRVVLLLGLLNEDDACHASFLRVSKMRLSVFLKKQEESQFHPLEWLAREACNQDALQEAGTFRHTLWKRVQGAVTPLLASMISFIDRDGNLELLTRPDTPPWARDLWMFIFSDTMLLNIPLVMNNERHKGEMAYIVVQNHMNLSENASNNVPFSWKIKDYLEELWVQAQYITDAEGLPKKFVDIFQQTPLGRFLAQLHGEPQQELLQCYLKDFILLTMRVSTEEELKFLQMALWSCTRKLKAASEAPEEEVSLPWVHLAYQRFRSRLQNFSRILTIYPQVLHSLMEARWNHELAGCEMTLDAFAAMACTEMLTRNTLKPSPQAWLQLVKNLSMPLELICSDEHMQGSGSLAQAVIREVRAQWSRIFSTALFVEHVLLGTESRVPELQGLVTEHVFLLDKCLRENSDVKTHGPFEAVMRTLCECKETASKTLSRFGIQPCSICLGDAKDPVCLPCDHVHCLRCLRAWFASEQMICPYCLTALPDEFSPAVSQAHREAIEKHARFRQMCNSFFVDLVSTICFKDNAPPEKEVIESLLSLLFVQKGRLRDAAQRHCEHTKSLSPFNDVVDKTPVIRSVILKLLLKYSFHDVKDYIQEYLTLLKKKAFITEDKTELYMLFINCLEDSILEKTSAYSRNDELNHLEEEGRFLKAYSPASRGREPANEASVEYLQEVARIRLCLDRAADFLSEPEGGPEMAKEKQCYLQQVKQFCIRVENDWHRVYLVRKLSSQRGMEFVQGLSKPGRPHQWVFPKDVVKQQGLRQDHPGQMDRYLVYGDEYKALRDAVAKAVLECKPLGIKTALKACKTPQSQQSAYFLLTLFREVAILYRSHNASLHPTPEQCEAVSKFIGECKILSPPDISRFATSLVDNSVPLLRAGPSDSNLDGTVTEMAIHAAAVLLCGQNELLEPLKNLAFSPATMAHAFLPTMPEDLLAQARRWKGLERVHWYTCPNGHPCSVGECGRPMEQSICIDCHAPIGGIDHKPRDGFHLVKDKADRTQTGHVLGNPQRRDVVTCDRGLPPVVFLLIRLLTHLALLLGASQSSQALINIIKPPVRDPKGFLQQHILKDLEQLAKMLGHSADETIGVVHLVLRRLLQEQHQLSSRRLLNFDTELSTKEMRNNWEKEIAAVISPELEHLDKTLPTMNNLISQDKRISSNPVAKIIYGDPVTFLPHLPRKSVVHCSKIWSCRKRITVEYLQHIVEQKNGKERVPILWHFLQKEAELRLVKFLPEILALQRDLVKQFQNVQQVEYSSIRGFLSKHSSDGLRQLLHNRITVFLSTWNKLRRSLETNGEINLPKDYCSTDLDLDTEFEILLPRRRGLGLCATALVSYLIRLHNEIVYAVEKLSKENNSYSVDAAEVTELHVISYEVERDLTPLILSNCQYQVEEGRETVQEFDLEKIQRQIVSRFLQGKPRLSLKGIPTLVYRHDWNYEHLFMDIKNKMAQDSLPSSVISAISGQLQSYSDACEVLSVVEVTLGFLSTAGGDPNMQLNVYTQDILQMGDQTIHVLKALNRCQLKHTIALWQFLSAHKSEQLLRLHKEPFGEISSRYKADLSPENAKLLSTFLNQTGLDAFLLELHEMIILKLKNPQTQTEERFRPQWSLRDTLVSYMQTKESEILPEMASQFPEEILLASCVSVWKTAAVLKWNREMR

SEQ ID NO: 89516 - DNA, 4653 bp, Artificial Sequence
  derived and/or modified sequence
atggagtgtccgagctgccagcacgtgagtaaagaagaaacaccaaagttttgttcacagtgcggtgaacgattgcctcctgcagcacccattgccgacagtgaaaacaacaatagtaccatggctagtgctagtgagggggaaatggaatgtggccaagagttaaaggaagaaggtggtccctgcctcttcccagggtccgactcttggcaagaaaatcccgaagagccttgtagcaaagcctcatggactgttcaagaatcaaagaaaaaaaagcgaaaaaagaaaaaaaagggaaacaaaagcgcgagttccgaacttgcctcccttccactttcacctgccagtccctgccacctgaccctgctcagtaatccatggccacaggatacagcacttcctcacagccaagctcagcaaagtgggcctacagggcagccctcccagcctccgggcacggcaaccacgccgctcgagggcgacggacttagcgcacccacagaagtgggagatagcccacttcaggcccaagcccttggcgaagccggagttgcgacagggtccgaggcacagtcctctccgcagttccaggatcacaccgagggggaagaccaggatgcaagcatcccatccgggggtaggggtttaagccaggagggcaccggacccccgacctcagccggagaaggtcactccaggaccgaagacgctgcccaggagctcctcctcccagagtctaaggggggatctagtgagccggggaccgaactgcagacaactgaacagcaggcgggcgctagcgcctcaatggcggtggacgcggtcgccgagccagcgaatgcggtgaaaggcgccgggaaagagatgaaggagaaaactcagcgcatgaagcagccacctgcaacaaccccgcctttcaagacacattgccaggaagccgaaacaaagacaaaggacgagatggccgcggcggaggagaaggtggggaagaatgaacagggtgagccagaagatctgaaaaagcccgaggggaaaaatagatcggctgccgcagtgaagaacgaaaaggagcagaagaatcaggaagctgacgtccaggaggtgaaggcctctaccctgagtccagggggaggagtcaccgtctttttccacgccataatttcattgcactttccattcaatccagatctacataaggtttttatacggggtggagaagaattcggagagtctaagtgggactcaaatatctgcgagctccattataccagggatctgggtcacgaccgggtgctggtggaggggatcgtgtgcatctccaagaagcacctggataaatacatcccttataagtacgtcatctacaacggggaatctttcgagtacgaattcatttacaagcatcagcagaaaaaaggcgagtacgtgaataggtgcttgttcattaaatcttccctactgggaagcggggactggcatcagtactatgacatagtctacatgaagccacatggacgactgcagaaagtaatgaaccatattacagatgggcctcggaaggacctcgtaaagggaaagcagatcgccgctgctttaatgttggatagtacgtttagcattctgcagacttgggatacaatcaatctaaatagcttcttcactcagtttgaacagttctgcttcgtgctccaacagccaatgatttatgaggggcaggctcagctgtggacggatctccagtacagagaaaaggaggtgaaaagatatctttggcagcatttaaaaaagcatgtggtgccacttcctgacgggaagtccactgacttcttgcctgtcgattgtccagtccggtccaagctgaagaccggcctgatcgtgttattcgtggtggagaagatcgaactcttgttggaggggtctctcgactggttgtgtcacctgctgacttcagatgcctcttctcccgatgaattccatcgtgacctgtcgcacatcctgggaatcccacagagctggcgactgtatcttgtcaacctatgccagcggtgcatggacaccaggacgtacacatggctgggcgcactccccgtcctgcattgctgcatggaattagcccccaggcataaagacgcctggcggcagccagaggacacttgggccgcgctcgaaggtctatcctttagtccctttcgtgagcagatgctagacacatcatcactgctacagttcatgagagaaaaacagcatctgctgtctatcgacgaacctctgtttcgctcttggtttagcctgctgcctctttcacacctggttatgtacatggaaaacttcattgagcatctcggcagatttccggcccacattctggattgcttgtcgggcatatattatagactccccggcctggagcaggtcctgaacactcaagacgttcaggatgttcagaacgtgcagaatattctcgagatgctgctgaggctgttggacacctatagagacaagataccggaagaagccctcagtcccagctacctgacagtgtgtttaaaactgcatgaagccatttgcagcagcaccaagctcctgaagttttatgagctgcctgccctcagcgccgagatcgtgtgtcgaatgatccgactgctctcccttgtggatagtgcaggacaacgcgacgagactgggaacaactcagtgcagactgtgttccagggtacgctggccgcaactaagaggtggcttagagaagttttcacgaaaaatatgctgaccagcagcggagcctcttttacttacgtaaaggagatcgaggtgtggagacggttagtcgagatacagtttcccgcagagcatgggtggaaggagtcacttctcggcgatatggaatggaggcttactaaggaagagcccctctctcagatcaccgcctattgcaacagttgctgggacaccaaaggattggaagattctgtggcaaagacttttgaaaagtgtatcatcgaagccgtttcatccgcttgtcagtctcaaacttccatcctgcaaggcttttcgtacagtgaccttaggaagttcggcattgtgcttagcgccgtcattacaaagtcttggcctaggacagccgacaactttaatgacatccttaagcacctccttaccctggcagatgtgaagcatgtcttccggctgtgcggtaccgatgagaaaattttggcgaatgtgactgaggatgcaaaacggctcatcgccgtcgccgattccgtgttgacaaaggtggtgggagatcttttaagtggaacgatcttggtaggccagcttgagcttataatcaagcacaagaatcagttcctggatatctggcagttgcgggaaaagagtctgagcccccaagacgagcaatgcgccgttgaggaggccctcgactggcggcgagaggagctgcttctgttaaagaaagaaaagcgatgtgtggattctctgcttaagatgtgtggcaacgttaaacacctcatacaggtagacttcggggtgctggccgtgcgccatagccaggacctatcaagcaagcgactaaatgacacggtgacagttaggctttccacttcctcaaacagccaacgcgcaactcattaccacctgtcgtcacaagtgcaggaaatggcaggtaagattgacctgttgcgggattcacatatcttccagctgttctggcgcgaagctgctgagccgctgtccgagccaaaggaggatcaggaggccgccgagcttctgtcagagcccgaggaagagtctgaacgtcacattcttgaattggaagaggtttacgactatttgtatcaaccgtcataccgaaagtttattaagcttcatcaggacctaaagagcggagaagtgacactggcagagatcgatgtcatatttaaagatttcgtcaacaagtacacagatttagacagcgagctgaaaataatgtgtaccgttgatcatcaggaccagcgagattggataaaggatagggtggagcaaatcaaggagtatcaccatttgcatcaggcggtgcatgccgcgaaggttattctccaagtgaaagagagtctgggtctgaacggtgacttcagcgttctgaacaccctgcttaacttcaccgataatttcgatgactttcgacgcgaaacccttgaccaaattaaccaggaacttatccaggccaagaagcttcttcaggatatttcagaggccagatgtaaagggctgcaagcacttagcctcaggaaggagttcatttgctgggtgcgggaagcactcggcgggattaatgagcttaaggtatttgtggacttggcctctatcagtgcgggtgaaaacgacattgatgtggacagggtggcttgcttccacgacgccgtccagggatatgctagcttactttttaagttagacccgtccgttgacttctcagcatttatgaagcacttgaaaaagctatggaaggccctggataaagaccaatacctgcctagaaagcttgtgtctcttattctgtctctaatgcaaattctactcaacagagctctgttgtcaaacgtccgagcggtcaccgtggaaatggtcgcccatctgtgcggtagattcgttcattcaaggtttcagtag

SEQ ID NO: 89517 - DNA, 15624 bp, Artificial Sequence
  derived and/or modified sequence
atggaatgccctagctgccagcatgtctccaaggaggagactcccaaattctgctctcagtgcggggaacgactgccgcccgccgcccccatcgccgacagcgaaaacaacaattccacaatggctagcgcgtccgaaggagaaatggaatgtggccaagagctcaaggaggagggcggtccctgtttgtttccgggaagtgatagttggcaggaaaatcctgaggagccatgttccaaagcatcatggaccgtccaggaaagcaagaaaaaaaaacggaagaagaaaaagaagggcaacaaatccgcgagttcagagctcgcctcactcccactgtctcctgcttctccctgccatcttacgctactgtcaaatccctggccacaagataccgcactgcctcactcccaagcccagcagagcggtcccacgggccaacctagccaaccgcccggcaccgcgacgacccccctggaaggcgatggcctcagtgctcctaccgaagtgggagactccccgctgcaggcacaggctctgggagaggcaggggtggccaccgggtccgaggcccaatctagcccacaattccaagatcacactgaaggagaggatcaggacgcctccattccttctggtgggagagggctgtcccaagagggcaccggcccacccacgtccgctggagaaggccattcacggacggaggatgccgcccaggagctgcttctccccgagagcaagggcggatcaagcgagcctggcacagagctgcaaacaacagagcagcaggccggcgcgtcagcaagcatggccgtggatgccgtagcagagcctgctaatgccgtgaaaggggccggcaaagagatgaaggaaaaaactcagagaatgaaacagcctcccgccaccacccctccctttaaaacgcactgccaggaagccgaaactaagaccaaggacgaaatggccgccgctgaggaaaaagtgggcaaaaacgagcagggagagcctgaagatctgaagaaacctgagggcaaaaaccggtccgccgctgccgtcaaaaatgagaaggagcaaaaaaaccaggaggccgacgtgcaggaagtgaaggctagcaccttatcccctggagggggagttaccgtattcttccacgctatcatcagtctgcattttccgttcaacccagacctgcacaaagttttcattcgcggcggggaggagtttggcgaatccaaatgggattctaatatttgtgaactgcactacacaagagacttaggacatgacagagtgctggtggaagggattgtttgtatttccaaaaagcacctggacaaatacatcccctacaaatatgtgatctataacggagagagttttgagtacgaattcatatacaagcatcagcagaaaaagggcgagtacgtaaacaggtgcctattcatcaagtccagcctcctgggaagcggtgattggcaccaatactacgacatcgtgtacatgaagcctcacggaagactccagaaagttatgaatcatatcacggatggtccccgtaaggatttggttaagggaaaacagatcgccgcggcgttgatgctggacagtacctttagtattctgcagacctgggacactattaacctgaattcattctttacccagtttgagcaattctgttttgtcttacagcagccaatgatatacgagggccaggcacaactgtggacagacttacagtaccgcgaaaaggaggtaaagcgctatctgtggcagcatctgaaaaaacatgtggtgccccttccagatggtaagtcaaccgactttttaccagtagattgccctgtccgatccaagctaaaaaccgggttgattgtactgttcgtggtggaaaagattgaactgctgctcgaaggttcactggactggctgtgccacctgctcacatctgacgcctctagccccgacgagttccatagggatctgtcccacatactggggattcctcaatcttggcgtctgtatctggtgaatctatgtcaaaggtgtatggatacaaggacctatacgtggttaggagctcttcccgtgctgcactgctgtatggaactggcaccacgccacaaagatgcatggaggcagccagaggatacgtgggccgctttggaaggtctttctttctctcctttccgggagcaaatgctcgatacatctagcttattgcagttcatgcgcgagaagcagcacctgttgtctatcgatgagccactatttcgatcatggttcagcttactgccgctctcccacctggtaatgtatatggagaacttcatcgaacacctcggccgcttcccagcacacatcctggactgtctgagcggcatttactacagacttcccggcctcgaacaggtactcaatacccaagatgtccaagacgtgcagaatgtccagaacattctggaaatgctccttaggttactcgatacatatagggataaaataccggaagaagccctcagccccagctatttaactgtgtgtttgaaactgcatgaggctatttgctcatccacaaagcttcttaagttctatgagttgcccgccctttctgctgagatcgtatgtcggatgataaggctcttgagtttagtggactccgcaggccagcgggacgagaccggtaacaactccgtgcagacagtgtttcagggcaccctggccgcaaccaaacggtggcttcgggaggtgttcaccaagaatatgctcacttcttctggtgcctcttttacttatgtcaaagagattgaggtgtggcggcgactcgtggagatccaatttccggcggagcatggctggaaagagtccctgctgggagacatggaatggagactgactaaggaggagcctctttcccagattacagcttattgtaatagctgctgggacacaaagggattagaagacagtgtcgccaaaacattcgagaaatgcatcatagaggcagtgtccagcgcatgccagagccagactagcatcctgcagggcttcagctactcagatctgcggaaattcgggattgtgctttctgcagtgatcactaagtcttggccacggaccgccgacaacttcaacgacatcctcaagcacctgctgaccttggccgatgttaagcatgtatttaggctctgcggaacagatgagaagattctggctaacgtgactgaagacgctaagcgattaatcgccgttgccgactctgtgctgacgaaggtggttggtgatctgctgagcggtaccatcttagtgggacagcttgagctcatcatcaagcacaaaaatcaatttctagacatctggcagctaagggaaaaaagcttgagcccccaggacgagcagtgcgccgtggaggaagccctggattggcggagggaagagctcctgctgcttaaaaaggagaaacggtgcgtcgactcactgctaaaaatgtgcggaaatgtcaagcacttgatccaagtggactttggagttctggccgtcagacactcccaggatctatcatctaagcgtttaaatgatactgtgacagtccggctgagtacatcctctaacagccagcgggccacgcactatcacctgtcctcacaggttcaagaaatggccggcaagatagatctcctgagggacagtcacattttccaactgttttggagggaggcagcagagccactttctgagccgaaggaggatcaggaggctgccgagctcctgtctgagcctgaagaggaatccgaacggcatatactggaactcgaggaggtgtacgattacctctaccagcccagctataggaagtttatcaagctgcaccaggacttgaaatcaggagaggttacactcgcagaaatcgatgtcattttcaaggatttcgtcaataagtataccgatctggatagtgagttgaagattatgtgtacggtggatcatcaggaccagagggactggatcaaagaccgagttgaacagattaaagagtatcaccacctgcatcaggccgtccatgcagccaaagtgattctgcaggtaaaggagtccctgggactcaacggggatttcagtgtattgaacacgctgctgaacttcactgacaattttgatgacttcaggagggaaactctggatcagattaatcaggagctgattcaggctaaaaaactgttacaggatatatcagaagctcgatgcaaaggacttcaagctctgtctctgcgcaaggagttcatctgttgggtgcgagaggcgcttgggggcataaatgaactgaaggtattcgtggacctggcttccatctctgccggcgaaaatgatatcgatgtcgatagggtcgcatgttttcacgacgcagtccagggttacgccagcctgcttttcaagctcgacccctccgtcgatttctcagccttcatgaagcaccttaagaaactgtggaaagccctcgataaggaccagtaccttcctcgaaaactttgcgattcagcacggaacctcgaatggctgaagaccgtcaacgagagtcatggttctgtggaacgatctagcctgactctcgcgactgcaatcaatcagcgaggaatttatgtcatccaggcccctaaaggtggacagaagattagccctgatactgtgctgcacttaattctgcctgagagcccaggaagtcacgaagagagccgcgaatatagtctcgaagaagttaaggaactcctgaataagctgatgctgatgtctgggaaaaaagaccgtaacaacacggaagtggaacggttcagcgaagtgttttgtagcgtgcaacggttgagccaggcctttatagatctgcattctgcagggaacatgctgttccgcacgtggatcgccatggcctattgtagtcctaaacagggtgtgtctctgcaaatggacttcgggcttgatcttgtgaccgagctcaaagagggaggcgacgtcaccgagcttctggccgcactgtgtaggcagatggagcacttcctggattcctggaaaaggttcgttacccagaaacggatggaacatttttatctcaatttctatactgcggagcagctggtatatctgagcaccgagctgagaaagcagccaccttccgatgctgccctgacaatgctctcatttatcaagtctaattgcacccttcgtgacgtcctcagggccagcgtgggttgcggaagcgaggcagcgcgatacagaatgcggcgggtgatggaagagttgcccctgatgctgctctccgagttcagtttggtcgacaaactgagaattattatggaacagtcaatgaggtgtctgccggctttcctacccgattgccttgatctcgagactctgggccactgtctcgcccatctggccggcatgggaggctcccccgtagagcgatgcttgccacgtggcttgcaggtgggccaaccgaacctcgtcgtgtgcgggcactcggaagtcctccccgcagccctggccgtgtatatgcaaaccccctctcagcccttaccgacatatgatgaggtgttgttgtgcacccctgccacgacttttgaagaggtagccttgttattgagacggtgtttgactctgggctctctgggacataaggtgtatagcttactgtttgctgaccagttaagttacgaggtcgctcgacaggccgaggaacttttccataatttgtgtactcagcaacaccgtgaggactaccagttggtgatggtgtgcgacggggattgggagcactgttacctgccttcagccttttcacagcacaaggtctttgtaaccccccaagcccccctcgaagccatccaagcttacctcgccggtcactaccgcgtgcccaaacagacgttatctgccgcagctgtgttcaacgatagactgtgcgtgggaatcgtcgcaagtgaacgggccggagtgggaaagagcctgtatgttaagagactccacgataaaatgaaaatgcagctgaatgtaaaaaacgtcccactcaagaccattaggctcatcgacccccaggtcgatgaaagtcgtgtgcttggggctcttctaccctttctagatgcccagtaccaaaaagtacccgtcctcttccatctagacgtgacgtctagcgttcagactggtatttgggtttttctcttcaagctcctaattctacaatatctcatggatatcaacgggaaaatgtggctccgcaacccgtgccatctgtatatcgtggagatactggagcggcgcacaagtgtgccatccaggtcttcttccgccctgcggacccgggtgcctcaattcagcttcctcgatatcttccccaaggtcacctgtagaccgccaaaggaagtgattgacatggagctttctgctctgaggagcgacacagaaccgggtatggacctatgggagttctgttctgaaacattccagcggccataccagtacctgcgccgatttaatcagaatcaggatctggacacattccagtatcaggaaggctccgtcgaggggactcctgaagagtgcctgcaacacttcttgtttcactgtggtgtcattaacccatcctggagtgaactcagaaactttgcccgctttctgaactatcagttgagggactgtgaagcttcgctgttctgtaatccgtctttcataggcgacacactgcgaggatttaagaagtttgttgtgacattcatgatctttatggcccgggatttcgcgacaccaagtctgcacacaagtgatcaaagtccgggaaagcacatggtgaccatggacggagtgcgggaagaagacctggccccgttttcattgagaaaacggtgggagtctgaaccccacccatatgtcttctttaacgatgatcataccactatgacgttcatcgggttccatctacaaccaaatatcaatggtagtgttgacgccatttctcacctgacgggtaaggtaattaagagagatgtgatgactcgagatctgtaccagggactgctgctgcaaagggtcccttttaacgttgatttcgacaagctaccacggcataaaaaactggaaaggttgtgtctgacactcgggatacctcaagctacggaccccgacaagacttacgagcttaccacagataatatgctcaagatactggcaatagagatgcggtttcggtgtggcattcccgttattatcatgggcgagaccggctgcggaaaaacaagactgataaagttcctgtctgacctgaggagaggtggaaccaacgccgacaccattaaattggtcaaagttcacggaggcaccaccgcggacatgatatactcaagggttcgcgaagccgaaaatgttgcatttgccaataaagaccaacaccaactggatacaattttatttttcgacgaagccaatacaacggaggcaatctcctgtatcaaggaagtgctgtgcgaccatatggtggatggtcagccccttgccgaagactcaggacttcacatcattgccgcgtgtaatccttatcgcaagcacagtgaagagatgatttgccgcttggagagcgcaggccttgggtacagagtctcaatggaagagaccgctgataggcttggaagcatccccctcaggcagttagtgtaccgcgtgcatgctctaccgcctagcctaataccgctcgtgtgggattttggacagctttccgatgtcgccgagaaattgtatattcaacagatcgttcaacggctagttgagtccatctccttagacgagaacggcactcgcgttatcacggaggttttgtgtgcctcacaggggttcatgagaaagaccgaggacgaatgttcatttgtctccttgcgtgatgtggagcggtgtgtaaaggtgttcagatggttccatgaacatagcgccatgctgcttgctcagttaaatgcctttcttagtaagtcctccgtctctaagaatcataccgagcgtgaccctgtgctgtggtctctcatgctggccatcggcgtgtgctaccacgccagcctcgagaaaaaggacagttaccgtaaagccatagcaaggttcttcccgaaaccctatgacgactcacgactactcctggatgagataactcgggctcaagatctgttcctggatggggtccccctaagaaaaacaattgccaagaatttggccctgaaggaaaacgttttcatgatggtagtgtgcattgaactcaaaattccactgtttctggtaggcaaacctggctccagtaagagcctggctaaaaccattgtggccgatgcaatgcagggtccagcagcctacagcgaccttttccggagccttaagcaggttcatcttgtgtcttttcagtgttctccccatagcaccccgcagggaatcattagcacgttcaggcagtgcgctcggttccagcaggggaaggatctacagcagtacgtctctgtggtcgtgctcgacgaggtggggcttgccgaagattctccaaaaatgccactgaaaaccctccatcccttgctcgaggatgggtgcatagaggacgacccggctccccataagaaagtgggctttgtcggcatcagcaattgggcactcgaccctgccaagatgaacagggggatttttgttagccggggctctcccaatgagactgaactcattgagagcgccaaaggtatatgcagctcagacatcctggtgcaggacagggtccaaggctatttcgcttccttcgcgaaggcctacgagaccgtgtgtaagcgtcaagacaaagagttttttggtttgagggactactacagcctcataaagatggttttcgctgccgccaaagcctccaatagaaagccatctcctcaagacatcgcccaggctgtactgcggaacttcagcggcaaggatgatattcaggcactggacatattcctagccaatttgccagaggccaagtgttctgaggaggtgagtcccatgcaattgatcaagcagaatattttcgggccgtctcagaaagtcccaggcggggaacaggaagatgctgaatctagatatctgctggtactaacaaaaaattacgtggcgctgcagatcctgcaacagacattttttgagggggaccaacagcctgagattatcttcgggtccggctttcctaaggatcaggaatacacgcagctgtgcagaaacattaaccgcgtgaaaatttgcatggaaaccggaaaaatggtgttactgttgaacctccagaacctatatgagtctttatacgacgctctaaaccagtattacgtgcacctggggggacagaaatatgtagacctagggttgggcacccaccgtgttaagtgtagagtgcaccctaatttccgcctgatcgttatcgaagagaaggatgtggtgtataagcactttccaatccctctgattaaccgcttagaaaagcactacctcgacataaacaccgtcctggaaaaatggcagaaaagcattgtggaagagctgtgcgcctgggtggaaaaatttattaatgttaaagcacaccatttccagaaacgccataaatactctccatcagatgtatttatcggctatcacagcgacgcctgtgccagtgttgttctgcaagtgatagaacgacagggcccgcgcgccctgacggaagaactgcaccagaaggtctctgaggaagccaaatcaattttgcttaattgcgctacacctgatgccgtggtccggctcagcgcctattccctcggaggctttgcagctgagtggttgagccaggaatactttcaccggcaaaggcacaactccttcgccgacttcttgcaagcccacctgcacaccgcagacctggagcgtcacgccatctttacggagatcactaccttttcaagactcttgacctcccacgattgcgagatactggaatcagaggtgaccggacgggccccaaagccaaccctgctgtggctccagcagttcgacacagagtactcgttcttgaaagaagtccgaaattgtctcacgaacaccgccaagtgtaaaattctgatttttcagactgactttgaggacggcattcgcagcgcgcagctgattgcgagcgcgaaatactcagtgatcaatgagatcaacaagatcagggagaacgaggatcggatcttcgtctacttcattaccaaattatctcgggtgggccgcgggaccgcctacgtgggtttccacggcggtctttggcaatccgtgcacattgatgacctgcgacggtcgaccctcatggtctcagatgtaacccggctgcagcacgtgaccatcagccagctcttcgccccgggggatcttccagagctcggcttggaacatcgagcagaagacggacacgaggaggcaatggagaccgaagctagtacttcaggtgaagtggccgaagtggcagaggaggctatggaaacagaaagcagtgaaaaggtcgggaaagaaacctccgaactgggaggaagcgacgtttccatcctggatacaactcgtcttctcaggtcttgcgtgcagtcagcagtgggcatgttgcgagaccagaacgagagttgtacgcgcaatatgcgaagggtggtgttgctgctgggtctgctgaacgaggacgatgcctgccatgccagtttccttcgagtctctaaaatgagactttctgtgttcttgaagaagcaggaggaatctcaattccaccccctggaatggctcgctcgcgaggcatgcaatcaggacgctcttcaggaggcagggaccttccgtcatacactgtggaaaagggtgcagggggcggtaacaccactgctggcaagcatgatcagctttattgatcgcgatgggaatctggagcttctcacaagaccagatacacccccgtgggcaagggatctctggatgtttatcttttctgacacgatgctgttgaatataccgttagtaatgaataatgaaaggcataagggcgagatggcttacatcgttgtccagaaccatatgaatttgtcggaaaatgcctctaacaatgtgccattttcatggaagatcaaggattatctcgaggaactgtgggtgcaggcccagtatattacagatgccgaagggctgccaaagaaattcgtcgatattttccagcagacgcctctgggtagattcctggcccagctgcacggcgaaccccagcaggagttgttgcagtgttacctgaaggattttatcctcctgacgatgcgtgtttctaccgaggaggaactgaagttcctgcagatggccctctggtcttgtacacgcaagttaaaggctgcttctgaggcccctgaggaggaggtgagcctgccctgggtccatcttgcttaccagcgctttaggagcagattacaaaattttagtagaatactcacgatctacccacaggtcttacacagcctcatggaggctaggtggaaccatgaactagctggatgcgagatgacactcgatgcttttgccgctatggcatgcaccgagatgctgacccggaatacactgaaaccctcaccccaggcctggttacagctcgttaagaacctctccatgcccctggaattgatctgttccgatgagcatatgcaagggtccggcagcctggcacaggcagttattcgcgaggtccgggctcaatggagtaggatctttagcaccgccctgttcgtggagcatgtgttgcttgggaccgagtctcgagttcctgagcttcagggcctagtgaccgagcacgtttttcttttggacaaatgcctgagggagaacagtgacgtgaaaacccacggccctttcgaggcagtgatgaggacactgtgcgaatgtaaagaaaccgcctccaaaactctgtcgagatttggtattcagccatgctcgatttgtctgggagatgctaaggaccctgtctgcctaccctgtgatcacgtgcactgcttacggtgccttagagcctggttcgcaagcgagcagatgatttgcccttattgcctcaccgccttgccagacgaattcagccccgctgtttcacaggctcacagagaagcaattgagaagcacgcgaggtttcgtcagatgtgcaatagttttttcgtggacttggtgtccactatctgtttcaaggataacgcccccccggaaaaggaagtgatcgagtccttgctgagcctgttatttgtgcagaagggtagactccgggacgccgcccagcggcactgtgagcatactaagagtttgagcccgtttaacgatgtggtcgataagacccctgtgattcgctcggtaattctcaagctgctgctgaagtatagtttccacgacgtaaaggattacatacaggagtacctgacccttctgaaaaagaaagcttttataaccgaggacaaaaccgaactgtatatgctttttatcaactgcttggaggacagtatactcgagaagacttccgcatacagccggaacgacgaactgaaccaccttgaagaggagggtcgattcctcaaagcctattccccagccagcagaggtagggaaccagccaacgaggcaagtgttgaatatttacaagaggtggcccggattagactgtgcctcgacagggccgccgacttcctttctgagcccgaaggcggacccgagatggcgaaagagaaacagtgctacctgcagcaggtgaagcagttttgtattagggtggagaatgattggcatcgtgtgtatctggtcagaaaactgagttcacagcgggggatggaatttgttcaggggctttccaagcccggccgaccacatcagtgggtttttcccaaagacgtcgtgaaacagcaaggcctacggcaggaccaccccggacagatggatcgctatctagtatatggtgatgagtacaaggccttacgggatgctgtggctaaagcagtcttggaatgcaagccgcttggtattaaaacagccctgaaggcctgtaagactcctcaatcccagcagtcagcttacttcttactgaccctgtttcgggaagtcgccatactttaccgcagtcataatgccagccttcaccctacccctgaacagtgcgaggctgtgagcaagttcataggggagtgcaaaatcctctcacccccagacatatcacgctttgcaacatccctggtggataactcagtgcctttactgcgtgccggaccatccgattcaaatctcgatggcaccgtaaccgagatggccatccacgccgctgctgtgctgctgtgcggccaaaatgagctcctggagccactgaaaaatcttgcattttctccagccactatggcccacgcattcctgccaactatgcccgaggatttgctcgctcaggccagaagatggaagggccttgaaagagttcactggtatacttgccccaacgggcatccttgttccgtgggtgagtgtgggcgtcctatggagcagagcatttgtattgactgtcatgccccaattgggggaatcgatcacaaacctcgtgacggctttcacttagttaaggataaggcagaccgtacccaaactggccacgtcctcggaaatcctcagaggcgtgatgtcgtcacatgtgatagaggactcccacctgtcgtgtttctgttgatacgattgctgacccacctggcactacttttaggcgccagccagtcaagccaagccctcatcaacataattaagccgccggtacgagatccaaaaggatttctgcagcagcacatccttaaagatttagagcagctggccaagatgctcgggcactctgctgacgagaccatcggcgtcgtgcatctagtgctgcgcagacttctgcaagaacagcatcagctctcgtcgagacgtttactaaactttgacacggagcttagtactaaggagatgagaaataactgggaaaaggagattgcggccgtgataagtccagagcttgaacacctggacaaaaccttaccgacaatgaataacttgatctctcaggacaagcgcatctcctccaacccggttgcaaaaattatctacggcgatcccgtgacattcctaccacacctgccccgtaaaagtgtcgtgcactgttctaagatctggtcatgccgcaagcgtatcactgttgaatatcttcagcacatagtagagcagaagaatggcaaggagagagtgcctatactgtggcatttcctgcaaaaggaagccgagctaaggctcgtgaagttcttacctgagattctggctctgcaacgtgacctggttaagcagtttcaaaacgtccagcaagttgagtattcatcaattaggggctttttatccaagcattcctcagacggtctgcgccagctccttcataacaggatcacggtgtttctgtccacatggaacaagctgcgccgcagccttgagactaacggggagatcaaccttcctaaagactactgttccacggacttggaccttgacacagaatttgaaatattgttgccgcgacgaagaggtcttggcttgtgtgcaacagctctggtcagttatctgattcggctgcataacgagatagtgtacgccgtggagaaactgtctaaggagaataattcatactcagtagacgccgctgaggttaccgaactccacgtgattagttacgaagtcgaaagggatctcacacctcttatcctttccaactgccaataccaggtggaggaaggtcgggagacagtgcaggagttcgacctggaaaaaatccagaggcaaatcgtcagtcggttccttcaaggcaaaccaaggctgtctcttaaggggatccccacgttggtctaccggcatgactggaactacgagcatctcttcatggatataaagaataaaatggcacaggactccctcccctctagcgtgatttctgccatctctggacagctgcagagttactcagacgcatgcgaagtgctgagcgtcgtcgaagtgaccctcggattcttgagcacagccggtggtgaccccaacatgcagctgaatgtctatactcaagacatactgcaaatgggtgatcagaccatccacgtgctcaaagctctgaaccgttgccagctgaagcataccatcgccctgtggcaattcctctccgctcataaaagcgaacagcttttgcgtctgcacaaagaaccatttggcgagatcagcagtaggtataaagccgaccttagccctgaaaacgcaaagctgctgtcaacgttcctgaatcagaccgggctcgacgcttttttacttgaactccacgaaatgatcatcttgaagttgaaaaatccccagactcaaacagaggaacgctttagaccccagtggtcacttagagacaccctggtctcttacatgcagacaaaggagtccgagattttaccagaaatggccagtcaatttcctgaagagatccttcttgcctcctgcgtttctgtgtggaaaaccgccgcggtactaaagtggaatcgcgagatgcggtag

SEQ ID NO: 89518 - DNA, 4653 bp, Artificial Sequence
  derived and/or modified sequence
atggagtgccccagctgccagcacgtgtccaaggaggagacccccaagttctgcagccagtgtggggagcggctgcccccagctgcccccatcgctgacagcgagaacaacaacagcaccatggccagcgccagcgagggggagatggagtgtggccaggagctgaaggaggagggcggcccctgcctcttccctggcagtgacagctggcaggagaaccctgaggagccctgcagcaaggcctcctggacagtgcaggagagcaagaagaagaagaggaagaagaagaagaagggcaacaagagcgccagcagcgagctggccagcctgcccctgagccctgccagcccctgccacctgaccctgctgagcaacccctggccccaggacacagccctgccccacagccaggcccagcagagcggccccaccggccagcccagccagcccccaggcacagccaccacccccctggagggagatggcctgagcgcccccacagaggtgggggacagccccctgcaggcccaggccctgggggaggccggcgtggccaccggcagcgaggcccagagcagcccccagttccaggaccacacagaaggagaggaccaggatgccagcatccccagcggcggccggggcctgagccaggagggcactggaccacccaccagcgctggggagggccacagcaggacagaagatgctgcccaggagctgctgctgcctgagagcaaaggaggcagcagcgagcctggaacagagctgcagaccacagagcagcaggccggggccagcgcctccatggctgtggatgctgtggccgagcccgccaatgctgtgaagggagctgggaaggagatgaaggagaagacccagaggatgaagcagcccccagccaccaccccacccttcaagacccactgccaggaggccgagaccaagaccaaggatgagatggctgctgctgaggagaaggtgggcaagaatgagcagggcgagcctgaggacctgaagaagccagagggcaagaacagatctgctgctgctgtgaagaatgagaaggagcagaagaaccaggaggctgatgtgcaggaggtgaaggccagcaccctgagccctgggggcggcgtgaccgtcttcttccacgccatcatcagcctgcacttccccttcaacccagacctgcacaaggtgttcatccggggcggggaggagtttggagagagcaagtgggacagcaacatctgtgagctgcactacacccgggacctgggccatgacagagtgctggtggagggcatcgtgtgcatcagcaagaagcacctggacaagtacatcccctacaagtatgtgatctacaacggggagagctttgaatatgagttcatctacaagcaccagcagaagaagggggagtatgtgaaccgctgcctcttcatcaagagcagcctgctgggcagcggggactggcaccagtactatgacatcgtgtacatgaagccccacggccgcctgcagaaggtgatgaaccacatcacagatggccccaggaaggacctggtgaagggcaagcagattgctgctgccctgatgctggacagcaccttcagcatcctgcagacctgggacaccatcaacctgaacagcttcttcacccagtttgagcagttctgctttgtgctgcagcagcccatgatctatgagggccaggcccagctgtggacagacctgcagtaccgggagaaggaggtgaagcgctacctgtggcagcacctgaagaagcacgtggtgcccctgcctgatggcaagagcacagacttcctgcctgtggactgccctgtgcgcagcaagctgaagacaggcctgattgtgctgtttgtggtggagaagattgagctgctgctggagggcagcctggactggctgtgccacctgctgaccagtgatgccagcagcccagatgagttccaccgggacctgagccacatcctgggcatcccccagagctggaggctgtacctggtgaacctgtgccagcgctgcatggacaccaggacctacacctggctgggcgccctgcctgtgctgcactgctgcatggagctggcccccaggcacaaggatgcctggaggcagcctgaggacacctgggccgccctggagggcctgtccttcagccccttccgggagcagatgctggacaccagcagcctgctgcagttcatgagggagaagcagcacctgctgagcattgatgagcccctcttccgctcctggttcagcctgctgcccctgagccacctggtgatgtacatggagaacttcatcgagcacctgggccgcttccctgcccacatcctggactgcctgagcggcatctactaccgcctgcccggcctggagcaggtgctgaacacccaggatgtgcaggatgtgcagaatgtgcagaacatcctggagatgctgctgcggctgctggacacctacagagacaagatccctgaggaggccctgagccccagctacctgactgtgtgcctgaagctgcacgaggccatctgcagcagcaccaagctgctgaagttctatgagctgcctgccctgtctgctgagatcgtgtgcaggatgatccggctgctgagcctggtggacagcgctggccagagagatgagaccggcaacaacagcgtgcagacagtgttccagggcaccctggccgccaccaagcgctggctgcgggaggtgttcaccaagaacatgctgaccagcagcggggccagcttcacctacgtgaaggagattgaggtgtggaggcggctggtggagatccagtttcctgctgagcacggctggaaggagagcctgctgggggacatggagtggaggctgaccaaggaggagcccctgagccagatcacagcctactgcaacagctgctgggacaccaagggcctggaggacagcgtggccaagacctttgagaagtgcatcatcgaggccgtgtcctctgcctgccagagccagaccagcatcctgcagggcttctcctacagcgacctgaggaagtttggaattgtgctgtctgctgtgatcaccaagtcctggcccaggacagctgacaacttcaatgacatcctgaagcacctgctgaccctggctgatgtgaagcacgtgttccggctgtgtggcacagatgagaagatcctggccaacgtgacagaagatgccaagaggctgattgctgtggccgacagcgtgctgaccaaggtggtgggggacctgctgagcggcaccatcctggtgggccagctggagctgatcatcaagcacaagaaccagttcctggacatctggcagctgcgggagaagagcctgagcccccaggatgagcagtgtgctgtggaggaggccctggactggaggcgggaggagctgctgctgctgaagaaggagaagagatgtgtggacagcctgctgaagatgtgtggaaatgtgaagcacctgatccaggtggactttggagtgctggccgtgcgccacagccaggacctgagcagcaagaggctgaatgacacagtgacagtgcggctgagcaccagcagcaacagccagagggccacccactaccacctgagcagccaggtgcaggagatggccggcaagattgacctgctgcgggacagccacatcttccagctgttctggagggaggccgctgagcccctgtctgagcccaaggaggaccaggaggccgctgagctgctgtctgagcctgaggaggagagcgagcggcacatcctggagctggaggaggtgtatgactacctgtaccagcccagctacaggaagttcatcaagctgcaccaggacctgaagtctggagaggtgaccctggccgagattgatgtgatcttcaaggactttgtgaacaagtacacagacctggacagcgagctgaagatcatgtgcaccgtggaccaccaggaccagagggactggatcaaggacagagtggagcagatcaaggagtaccaccacctgcaccaggccgtgcatgctgccaaggtgatcctgcaggtgaaggagagcctgggcctgaatggagacttctctgtgctgaacaccctgctgaacttcacagacaactttgatgacttcagaagagagaccctggaccagatcaaccaggagctgatccaggccaagaagctgctgcaggacatcagcgaggcccgctgcaagggcctgcaggccctgagcctgaggaaggagttcatctgctgggtgcgggaggccctgggcggcatcaatgagctgaaggtgtttgtggacctggccagcatctctgctggggagaatgacattgatgtggacagagtggcctgcttccatgatgctgtgcagggctacgccagcctgctcttcaagctggaccccagcgtggacttcagcgccttcatgaagcacctgaagaagctgtggaaggccctggacaaggaccagtacctgcccaggaagctggtgtccctcatcctgagcctgatgcagatcctgctgaacagagccctgctgagcaatgtgcgggctgtgacagtggagatggtggcccacctgtgtggccgctttgtgcacagccgcttccagtag

SEQ ID NO: 89519 - DNA, 15624 bp, Artificial Sequence
  derived and/or modified sequence
atggagtgccccagctgccagcacgtgtccaaggaggagacccccaagttctgcagccagtgtggggagcggctgcccccagctgcccccatcgctgacagcgagaacaacaacagcaccatggccagcgccagcgagggggagatggagtgtggccaggagctgaaggaggagggcggcccctgcctcttccctggcagtgacagctggcaggagaaccctgaggagccctgcagcaaggcctcctggacagtgcaggagagcaagaagaagaagaggaagaagaagaagaagggcaacaagagcgccagcagcgagctggccagcctgcccctgagccctgccagcccctgccacctgaccctgctgagcaacccctggccccaggacacagccctgccccacagccaggcccagcagagcggccccaccggccagcccagccagcccccaggcacagccaccacccccctggagggagatggcctgagcgcccccacagaggtgggggacagccccctgcaggcccaggccctgggggaggccggcgtggccaccggcagcgaggcccagagcagcccccagttccaggaccacacagaaggagaggaccaggatgccagcatccccagcggcggccggggcctgagccaggagggcactggaccacccaccagcgctggggagggccacagcaggacagaagatgctgcccaggagctgctgctgcctgagagcaaaggaggcagcagcgagcctggaacagagctgcagaccacagagcagcaggccggggccagcgcctccatggctgtggatgctgtggccgagcccgccaatgctgtgaagggagctgggaaggagatgaaggagaagacccagaggatgaagcagcccccagccaccaccccacccttcaagacccactgccaggaggccgagaccaagaccaaggatgagatggctgctgctgaggagaaggtgggcaagaatgagcagggcgagcctgaggacctgaagaagccagagggcaagaacagatctgctgctgctgtgaagaatgagaaggagcagaagaaccaggaggctgatgtgcaggaggtgaaggccagcaccctgagccctgggggcggcgtgaccgtcttcttccacgccatcatcagcctgcacttccccttcaacccagacctgcacaaggtgttcatccggggcggggaggagtttggagagagcaagtgggacagcaacatctgtgagctgcactacacccgggacctgggccatgacagagtgctggtggagggcatcgtgtgcatcagcaagaagcacctggacaagtacatcccctacaagtatgtgatctacaacggggagagctttgaatatgagttcatctacaagcaccagcagaagaagggggagtatgtgaaccgctgcctcttcatcaagagcagcctgctgggcagcggggactggcaccagtactatgacatcgtgtacatgaagccccacggccgcctgcagaaggtgatgaaccacatcacagatggccccaggaaggacctggtgaagggcaagcagattgctgctgccctgatgctggacagcaccttcagcatcctgcagacctgggacaccatcaacctgaacagcttcttcacccagtttgagcagttctgctttgtgctgcagcagcccatgatctatgagggccaggcccagctgtggacagacctgcagtaccgggagaaggaggtgaagcgctacctgtggcagcacctgaagaagcacgtggtgcccctgcctgatggcaagagcacagacttcctgcctgtggactgccctgtgcgcagcaagctgaagacaggcctgattgtgctgtttgtggtggagaagattgagctgctgctggagggcagcctggactggctgtgccacctgctgaccagtgatgccagcagcccagatgagttccaccgggacctgagccacatcctgggcatcccccagagctggaggctgtacctggtgaacctgtgccagcgctgcatggacaccaggacctacacctggctgggcgccctgcctgtgctgcactgctgcatggagctggcccccaggcacaaggatgcctggaggcagcctgaggacacctgggccgccctggagggcctgtccttcagccccttccgggagcagatgctggacaccagcagcctgctgcagttcatgagggagaagcagcacctgctgagcattgatgagcccctcttccgctcctggttcagcctgctgcccctgagccacctggtgatgtacatggagaacttcatcgagcacctgggccgcttccctgcccacatcctggactgcctgagcggcatctactaccgcctgcccggcctggagcaggtgctgaacacccaggatgtgcaggatgtgcagaatgtgcagaacatcctggagatgctgctgcggctgctggacacctacagagacaagatccctgaggaggccctgagccccagctacctgactgtgtgcctgaagctgcacgaggccatctgcagcagcaccaagctgctgaagttctatgagctgcctgccctgtctgctgagatcgtgtgcaggatgatccggctgctgagcctggtggacagcgctggccagagagatgagaccggcaacaacagcgtgcagacagtgttccagggcaccctggccgccaccaagcgctggctgcgggaggtgttcaccaagaacatgctgaccagcagcggggccagcttcacctacgtgaaggagattgaggtgtggaggcggctggtggagatccagtttcctgctgagcacggctggaaggagagcctgctgggggacatggagtggaggctgaccaaggaggagcccctgagccagatcacagcctactgcaacagctgctgggacaccaagggcctggaggacagcgtggccaagacctttgagaagtgcatcatcgaggccgtgtcctctgcctgccagagccagaccagcatcctgcagggcttctcctacagcgacctgaggaagtttggaattgtgctgtctgctgtgatcaccaagtcctggcccaggacagctgacaacttcaatgacatcctgaagcacctgctgaccctggctgatgtgaagcacgtgttccggctgtgtggcacagatgagaagatcctggccaacgtgacagaagatgccaagaggctgattgctgtggccgacagcgtgctgaccaaggtggtgggggacctgctgagcggcaccatcctggtgggccagctggagctgatcatcaagcacaagaaccagttcctggacatctggcagctgcgggagaagagcctgagcccccaggatgagcagtgtgctgtggaggaggccctggactggaggcgggaggagctgctgctgctgaagaaggagaagagatgtgtggacagcctgctgaagatgtgtggaaatgtgaagcacctgatccaggtggactttggagtgctggccgtgcgccacagccaggacctgagcagcaagaggctgaatgacacagtgacagtgcggctgagcaccagcagcaacagccagagggccacccactaccacctgagcagccaggtgcaggagatggccggcaagattgacctgctgcgggacagccacatcttccagctgttctggagggaggccgctgagcccctgtctgagcccaaggaggaccaggaggccgctgagctgctgtctgagcctgaggaggagagcgagcggcacatcctggagctggaggaggtgtatgactacctgtaccagcccagctacaggaagttcatcaagctgcaccaggacctgaagtctggagaggtgaccctggccgagattgatgtgatcttcaaggactttgtgaacaagtacacagacctggacagcgagctgaagatcatgtgcaccgtggaccaccaggaccagagggactggatcaaggacagagtggagcagatcaaggagtaccaccacctgcaccaggccgtgcatgctgccaaggtgatcctgcaggtgaaggagagcctgggcctgaatggagacttctctgtgctgaacaccctgctgaacttcacagacaactttgatgacttcagaagagagaccctggaccagatcaaccaggagctgatccaggccaagaagctgctgcaggacatcagcgaggcccgctgcaagggcctgcaggccctgagcctgaggaaggagttcatctgctgggtgcgggaggccctgggcggcatcaatgagctgaaggtgtttgtggacctggccagcatctctgctggggagaatgacattgatgtggacagagtggcctgcttccatgatgctgtgcagggctacgccagcctgctcttcaagctggaccccagcgtggacttcagcgccttcatgaagcacctgaagaagctgtggaaggccctggacaaggaccagtacctgcccaggaagctgtgtgacagcgccaggaacctggagtggctgaagacagtgaatgaaagccacggctctgtggagaggagcagcctgaccctggccacagccatcaaccagaggggcatctacgtgatccaggcccccaagggcggccagaagatcagcccagacacagtgctgcacctgatcctgcctgagagccctggcagccatgaggagagccgggagtacagcctggaggaggtgaaggagctgctgaacaagctgatgctgatgtctgggaagaaggacaggaacaacacagaggtggagcgcttcagcgaggtgttctgcagcgtgcagaggctgagccaggccttcatcgacctgcacagcgctggcaacatgctgttccgcacctggatcgccatggcctactgcagccccaagcagggcgtgtccctgcagatggactttggcctggacctggtgacagagctgaaggagggcggagatgtgacagagctgctggccgccctgtgccggcagatggagcacttcctggacagctggaagagatttgtgacccagaagaggatggagcacttctacctgaacttctacacagctgagcagctggtgtacctgagcacagagctgaggaagcagcccccatctgatgctgccctgaccatgctgtccttcatcaagagcaactgcaccctgagagatgtgctgcgggcctctgtgggctgcggcagcgaggccgcccgctacaggatgagaagagtgatggaggagctgcccctgatgctgctgtctgagttcagcctggtggacaagctgcgcatcatcatggagcagagcatgcgctgcctgcctgccttcctgcctgactgcctggacctggagaccctgggccactgcctggcccacctggccggcatgggcggcagccctgtggagcgctgcctgccccggggcctgcaggtgggccagcccaacctggtggtgtgtggccacagcgaggtgctgcctgctgccctggccgtgtacatgcagacccccagccagcccctgcccacctatgatgaggtgctgctgtgcaccccagccaccacctttgaggaggtggccctgctgctgcggcgctgcctgaccctgggcagcctgggccacaaggtgtacagcctgctgtttgctgaccagctgtcctatgaggtggcccggcaggccgaggagctgttccacaacctgtgcacccagcagcaccgggaggactaccagctggtgatggtgtgtgatggagactgggagcactgctacctgcccagcgccttcagccagcacaaggtgtttgtgaccccccaggcccccctggaggccatccaggcctacctggccggccactacagagtgcccaagcagaccctgtctgctgctgctgtgttcaatgaccggctgtgtgtgggcatcgtggccagcgagcgggccggcgtgggcaagagcctgtatgtgaagaggctgcatgacaagatgaagatgcagctgaatgtgaagaatgtgcccctgaagaccatccggctgattgacccccaggtggatgagagccgggtgctgggcgccctgctgcccttcctggatgcccagtaccagaaggtgcctgtgctcttccacctggatgtgaccagctctgtgcagacaggcatctgggtgttcctgttcaagctgctgatcctgcagtacctgatggacatcaatggcaagatgtggctgaggaacccctgccacctgtacatcgtggagatcctggagaggaggacctctgtgcccagccgcagcagcagcgccctgcggaccagggtgccccagttctccttcctggacatcttccccaaggtgacctgccggccccccaaggaggtgattgacatggagctgagcgccctgcggagtgacacagagcccggcatggacctgtgggagttctgcagcgagaccttccagaggccctaccagtacctgcggcgcttcaaccagaaccaggacctggacaccttccagtaccaggagggctctgtggagggcaccccagaggagtgcctgcagcacttcctgttccactgtggggtcatcaaccccagctggagcgagctgaggaactttgcccgcttcctgaactaccagctgcgggactgtgaggccagcctcttctgcaaccccagcttcatcggggacaccctgcggggcttcaagaagtttgtggtgaccttcatgatcttcatggcccgggactttgccacccccagcctgcacaccagtgaccagagccctgggaagcacatggtgaccatggatggagtgcgggaggaggacctggcccccttcagcctgaggaagcgctgggagagcgagccccacccctacgtgttcttcaatgatgaccacaccaccatgaccttcatcggcttccacctgcagcccaacatcaatggatctgtggatgccatcagccacctgaccgggaaggtgatcaagagagatgtgatgacccgggacctgtaccagggcctgctgctgcagagggtgcccttcaacgtggactttgacaagctgcccaggcacaagaagctggagcggctgtgcctgaccctgggcatcccccaggccacagatcctgacaagacctatgagctgaccacagacaacatgctgaagatcctggccatcgagatgaggttccgctgtggcatccctgtgatcatcatgggagagaccggctgtgggaagaccaggctcatcaagttcctgagtgacctgcggcggggcggcaccaatgctgacaccatcaagctggtgaaggtgcacggcggcaccacagctgacatgatctacagccgggtgcgggaggccgagaatgtggcctttgccaacaaggaccagcaccagctggacaccatcctcttctttgatgaggccaacaccacagaggccatcagctgcatcaaggaggtgctgtgtgaccacatggtggatggccagcccctggccgaggacagcggcctgcacatcatcgccgcctgcaacccctacaggaagcacagcgaggagatgatctgccgcctggagagcgctggcctgggctacagagtgtccatggaggagacagctgaccggctgggcagcatccccctgcggcagctggtgtacagagtgcacgccctgccccccagcctcatccccctggtgtgggactttggccagctgagtgatgtggccgagaagctgtacatccagcagatcgtgcagaggctggtggagagcatcagcctggatgaaaatggcaccagggtcatcacagaggtgctgtgtgccagccagggcttcatgaggaagacagaagatgagtgcagctttgtgtccctgagagatgtggagcgctgtgtgaaggtgttccgctggttccacgagcacagcgccatgctgctggcccagctgaatgccttcctgagcaagagctctgtgtccaagaaccacacagagcgggaccctgtgctgtggagcctgatgctggccatcggcgtgtgctaccacgccagcctggagaagaaggacagctacaggaaggccatcgcccgcttcttccccaagccctatgatgacagccggctgctgctggatgagatcacccgggcccaggacctcttcctggatggagtgcccctgaggaagaccatcgccaagaacctggccctgaaggaaaatgtgttcatgatggtggtgtgcatcgagctgaagatccccctcttcctggtgggcaagccaggcagcagcaagagcctggccaagaccatcgtggctgatgccatgcagggccctgctgcctacagcgacctcttccgcagcctgaagcaggtgcacctggtgtccttccagtgcagcccccacagcaccccccagggcatcatcagcaccttccggcagtgtgcccgcttccagcagggcaaggacctgcagcagtatgtgtctgtggtggtgctggatgaggtgggcctggccgaggacagccccaagatgcccctgaagaccctgcaccccctgctggaggatggctgcattgaagatgatcctgccccccacaagaaggtgggctttgtgggcatcagcaactgggccctggaccctgccaagatgaacagaggcatctttgtgtcccggggcagccccaatgaaacagagctgattgaaagtgccaagggcatctgcagcagtgacatcctggtgcaggacagagtgcagggctactttgccagctttgccaaggcctatgaaacagtgtgcaagaggcaggacaaggagttcttcggcctgcgggactactacagcctcatcaagatggtgtttgctgctgccaaggccagcaacaggaagcccagcccccaggacatcgcccaggccgtgctgaggaacttcagcggcaaggatgacatccaggccctggacatcttcctggccaacctgcctgaggccaagtgcagcgaggaggtgagccccatgcagctgatcaagcagaacatcttcggccccagccagaaggtgcctggaggagagcaggaggatgctgagagccgctacctgctggtgctgaccaagaactacgtggccctgcagatcctgcagcagaccttctttgaaggagaccagcagcctgagatcatcttcggcagcggcttccccaaggaccaggagtacacccagctgtgcaggaacatcaacagagtgaagatctgcatggagaccgggaagatggtgctgctgctgaacctgcagaacctgtatgagagcctgtatgatgccctgaaccagtactacgtgcacctgggcggccagaagtatgtggacctgggcctgggcacccaccgggtgaagtgccgggtgcaccccaacttccggctgattgtgattgaggagaaggatgtggtgtacaagcacttccccatccccctcatcaaccggctggagaagcactacctggacatcaacacagtgctggagaagtggcagaagagcatcgtggaggagctgtgtgcctgggtggagaagttcatcaacgtgaaggcccaccacttccagaagaggcacaagtacagccccagtgatgtgttcatcggctaccacagtgatgcctgtgcctctgtggtgctgcaggtgattgaaaggcagggcccccgggccctgacagaggagctgcaccagaaggtgtctgaggaggccaagagcatcctgctgaactgtgccaccccagatgctgtggtgcggctgagcgcctacagcctgggcggctttgctgctgagtggctgagccaggagtacttccaccggcagaggcacaacagctttgctgacttcctgcaggcccacctgcacacagctgacctggagagacatgccatcttcacagagatcaccaccttcagccggctgctgaccagccatgactgtgagatcctggagagcgaggtgacaggccgggcccccaagcccaccctgctgtggctgcagcagtttgacacagagtacagcttcctgaaggaggtgaggaactgcctgaccaacacagccaagtgcaagatcctgatcttccagacagactttgaagatggcatccgcagcgcccagctgattgccagcgccaagtacagcgtcatcaatgagatcaacaagatcagagaaaatgaagatcgcatctttgtgtacttcatcaccaagctgagccgggtgggccggggcacagcctacgtgggcttccatggaggcctgtggcagagcgtgcacattgatgacctgcggcgcagcaccctgatggtgtctgatgtgacccggctgcagcacgtgaccatcagccagctgtttgcccctggggacctgcctgagctgggcctggagcacagagcagaagatggccacgaggaggccatggagacagaggccagcaccagcggggaggtggccgaggtggccgaggaggccatggagacagagagcagcgagaaggtgggcaaggagaccagcgagctgggcggcagtgatgtgtccatcctggacaccacccggctgctgcggagctgtgtgcagagcgctgtgggcatgctgcgggaccagaatgaaagctgcaccaggaacatgagaagagtggtgctgctgctgggcctgctgaatgaagatgatgcctgccacgccagcttcctgcgggtgtccaagatgaggctgtctgtgttcctgaagaagcaggaggagagccagttccaccccctggagtggctggcccgggaggcctgcaaccaggatgccctgcaggaggccggcaccttccgccacaccctgtggaagagggtgcagggcgctgtgacccccctgctggcctccatgatctccttcatcgacagagatggcaacctggagctgctgaccaggccagacaccccaccctgggcccgggacctgtggatgttcatcttcagtgacaccatgctgctgaacatccccctggtgatgaacaatgaaagacacaagggggagatggcctacatcgtggtgcagaaccacatgaacctgtctgaaaatgccagcaacaacgtgcccttctcctggaagatcaaggactacctggaggagctgtgggtgcaggcccagtacatcacagatgctgagggcctgcccaagaagtttgtggacatcttccagcagacccccctgggccgcttcctggcccagctgcacggggagccccagcaggagctgctgcagtgctacctgaaggacttcatcctgctgaccatgagggtgtccacagaggaggagctgaagttcctgcagatggccctgtggagctgcaccaggaagctgaaggccgccagcgaggcccctgaggaggaggtgtccctgccctgggtgcacctggcctaccagcgcttccgcagccggctgcagaacttcagccgcatcctgaccatctacccccaggtgctgcacagcctgatggaggcccgctggaaccacgagctggccggctgtgagatgaccctggatgcctttgctgccatggcctgcacagagatgctgaccaggaacaccctgaagcccagcccccaggcctggctgcagctggtgaagaacctgtccatgcccctggagctgatctgcagtgatgagcacatgcagggcagcggcagcctggcccaggccgtcatccgggaggtgcgggcccagtggagccgcatcttcagcacagccctgtttgtggagcacgtgctgctgggcacagagagccgggtgcctgagctgcagggcctggtgacagaacatgtgttcctgctggacaagtgcctgagagaaaattctgatgtgaagacccacggcccctttgaagctgtgatgaggaccctgtgtgagtgcaaggagacagccagcaagaccctgagccgcttcggcatccagccctgcagcatctgcctgggagatgccaaggaccctgtgtgcctgccctgtgaccacgtgcactgcctgcgctgcctgcgggcctggtttgccagcgagcagatgatctgcccctactgcctgacagccctgcctgatgagttctccccagctgtgtcccaggcccaccgggaggccatcgagaagcacgcccgcttccggcagatgtgcaacagcttctttgtggacctggtgtccaccatctgcttcaaggacaatgcccctcctgagaaggaggtgattgagagcctgctgagcctgctgtttgtgcagaagggccgcctgagagatgctgcccagaggcactgtgagcacaccaagagcctgagccccttcaatgatgtggtggacaagacccctgtgatccgcagcgtcatcctgaagctgctgctgaagtacagcttccatgatgtgaaggactacatccaggagtacctgaccctgctgaagaagaaggccttcatcacagaggacaagacagagctgtacatgctgttcatcaactgcctggaggacagcatcctggagaagaccagcgcctacagcagaaatgatgagctgaaccacctggaggaggagggccgcttcctgaaggcctacagccctgccagccggggccgggagcccgccaatgaggcctctgtggagtacctgcaggaggtggcccgcatccggctgtgcctggacagagctgctgacttcctgtctgagcctgagggcggccctgagatggccaaggagaagcagtgctacctgcagcaggtgaagcagttctgcatccgggtggagaatgactggcaccgggtgtacctggtgaggaagctgagcagccagaggggcatggagtttgtgcagggcctgagcaagccaggccggccccaccagtgggtgttccccaaggatgtggtgaagcagcagggcctgcggcaggaccaccctggccagatggaccgctacctggtgtatggagatgagtacaaggccctgagagatgctgtggccaaggctgtgctggagtgcaagcccctgggcatcaagacagccctgaaggcctgcaagaccccccagagccagcagagcgcctacttcctgctgaccctcttccgggaggtggccatcctgtaccgcagccacaatgccagcctgcaccccaccccagagcagtgtgaggccgtgtccaagttcatcggggagtgcaagatcctgagccccccagacatcagcagatttgccaccagcctggtggacaacagcgtgcccctgctgcgggccggccccagcgacagcaacctggatggcaccgtgacagagatggccatccacgccgctgctgtgctgctgtgtggccagaatgagctgctggagcccctgaagaacctggccttcagccctgccaccatggcccacgccttcctgcccaccatgcctgaggacctgctggcccaggcccggcgctggaagggcctggagcgggtgcactggtacacctgccccaacggccacccctgcagcgtgggagaatgtggccggcccatggagcagagcatctgcatcgactgccacgcccccatcggcggcatcgaccacaagcccagagatggcttccacctggtgaaggacaaggctgacaggacccagacaggccacgtgctgggcaacccccagaggagagatgtggtgacctgtgaccggggcctgccccctgtggtgttcctgctgatccggctgctgacccacctggccctgctgctgggcgccagccagagcagccaggccctgatcaacatcatcaagccccctgtgcgggaccccaagggcttcctgcagcagcacatcctgaaggacctggagcagctggccaagatgctgggccacagcgcagatgagaccatcggcgtggtgcacctggtgctgcggcggctgctgcaggagcagcaccagctgagcagccggcggctgctgaactttgacacagagctgagcaccaaggagatgaggaacaactgggagaaggagattgctgctgtgatcagccctgagctggagcacctggacaagaccctgcccaccatgaacaacctgatcagccaggacaagaggatcagcagcaaccctgtggccaagatcatctatggagaccctgtgaccttcctgccccacctgcccaggaagtctgtggtgcactgcagcaagatctggagctgcaggaagaggatcaccgtggagtacctgcagcacatcgtggagcagaagaatggcaaggagcgggtgcccatcctgtggcacttcctgcagaaggaggccgagctgcggctggtgaagttcctgcctgagatcctggccctgcagagggacctggtgaagcagttccagaatgtgcagcaggtggagtacagcagcatccggggcttcctgagcaagcacagcagtgatggcctgcggcagctgctgcacaaccgcatcaccgtcttcctgagcacctggaacaagctgcggcgcagcctggagaccaacggggagatcaacctgcccaaggactactgcagcacagacctggacctggacacagaatttgagatcctgctgcccaggagaagaggcctgggcctgtgtgccacagccctggtgtcctacctgatccggctgcacaatgagatcgtgtatgctgtggagaagctgagcaaggagaacaacagctacagcgtggatgctgctgaggtgacagagctgcacgtgatctcctatgaggtggagcgggacctgacccccctcatcctgagcaactgccagtaccaggtggaggagggccgggagaccgtgcaggagtttgacctggagaagatccagaggcagatcgtgagccgcttcctgcagggcaagccccggctgagcctgaagggcatccccaccctggtgtacagacatgactggaactatgagcacctgttcatggacatcaagaacaagatggcccaggacagcctgcccagcagcgtcatcagcgccatcagcggccagctgcagagctacagtgatgcctgtgaggtgctgtctgtggtggaggtgaccctgggcttcctgagcacagctggaggagaccccaacatgcagctgaatgtgtacacccaggacatcctgcagatgggagaccagaccatccacgtgctgaaggccctgaaccgctgccagctgaagcacaccatcgccctgtggcagttcctgagcgcccacaagtctgagcagctgctgcggctgcacaaggagccctttggagagatcagcagccgctacaaggctgacctgagcccagaaaatgccaagctgctgagcaccttcctgaaccagacaggcctggatgccttcctgctggagctgcacgagatgatcatcctgaagctgaagaacccccagacccagacagaggagcgcttccggccccagtggagcctgcgggacaccctggtgtcctacatgcagaccaaggagagcgagatcctgcctgagatggccagccagtttcctgaggagatcctgctggccagctgtgtgtctgtgtggaagacagctgctgtgctgaagtggaaccgggagatgaggtag

SEQ ID NO: 89520 - DNA, 4653 bp, Artificial Sequence
  derived and/or modified sequence
atggagtgccccagctgccagcacgtgagcaaggaggagacccccaaattctgttcccagtgtggtgagcgtttgccaccggcggcccctattgcagatagcgaaaataataattccacaatggcttctgcttcggagggcgagatggagtgcgggcaagagctaaaggaagaaggcggcccgtgcctatttcctggaagcgatagttggcaggaaaacccagaagagccgtgctccaaggcctcttggaccgttcaggagtctaagaaaaaaaaacgtaaaaagaagaagaaaggcaataaatccgcttcttccgagctcgcatccctgccattgtctccagcaagtccctgtcatctaaccctcctgagcaacccatggcctcaggataccgctctgccacatagccaggcccaacagtccggtcctacaggacagcccagccagcctccaggcacagcaacaaccccactggagggggatggactcagcgcccccaccgaggtcggagactctcctcttcaggctcaggctttgggcgaggctggcgtggccaccggctctgaagcccagtctagcccacagttccaggatcacacggaaggggaggatcaggatgccagcattccctctggcggacggggactgtcccaggagggcactgggccccctacaagtgctggggaaggccactccaggacagaggatgctgctcaggagctcctgctccctgaaagtaagggagggagcagtgagcctggtacagaactgcagaccaccgaacagcaggcaggagccagtgccagcatggccgtcgacgcggtagcggaaccagccaatgccgtgaagggagccgggaaagaaatgaaggaaaaaacccagcgaatgaaacagccacccgcgaccacacctccattcaaaacccactgccaggaggccgaaaccaagaccaaggatgaaatggcagccgctgaggaaaaggtggggaaaaatgagcaaggcgagcccgaggatttgaaaaagcccgaaggtaagaacagaagcgccgccgccgtgaagaacgaaaaagagcagaaaaatcaggaggccgatgtacaggaagtcaaggctagcactctctctcctggtgggggcgtgaccgtgttcttccacgcgattatcagcttacattttcccttcaaccctgatctccataaggtgttcattaggggcggggaagaatttggcgagtccaagtgggattcaaacatttgcgagctgcactacactcgggatcttggccacgaccgcgtgctggtagaaggaatcgtgtgcatcagcaaaaaacaccttgacaagtatattccctacaagtatgtgatctacaacggcgaaagcttcgagtatgaattcatatacaagcaccagcaaaagaagggggaatacgtgaaccggtgtttgttcatcaagagttcactgcttggatcaggagactggcatcaatactacgacatagtgtatatgaagccccacggccggctccagaaggtcatgaaccacatcactgatgggccccgtaaagacttagtcaaaggcaaacaaattgcggctgccctgatgctggattctacattctccatcctacagacttgggacaccattaacctgaacagttttttcacgcagttcgaacaattctgttttgtgctccaacagcccatgatctacgaaggccaggctcagctgtggaccgaccttcagtatcgtgaaaaagaagtgaaacgctacttgtggcaacacctgaagaagcatgttgtccctcttcctgacggaaagtctacagattttctgcctgtcgactgtcctgtgcgatccaagctgaaaactgggcttatcgtgctgtttgtcgttgaaaaaattgaactgctcctcgaaggcagcctggactggttgtgccaccttctgacaagcgatgcctccagccccgatgagttccacagagatctgagccatatactgggcattccccagtcttggcgcttgtatttggtgaatctatgtcagcggtgcatggatacgcgcacctacacgtggcttggtgccctgccagtccttcactgctgcatggaattggccccgagacacaaggacgcttggcgtcagccggaggacacttgggccgctcttgagggtctcagtttctcgccttttagagagcagatgctggatacctccagtctgcttcaattcatgcgagagaaacagcacttactgagtattgatgaacctttgtttagaagctggttcagtctgcttcccctgagccacctggtcatgtatatggagaattttattgaacatctcggcagattcccagcacacatattagattgcctgtccggaatatattacagattacccggtctggaacaagtgctgaacactcaggatgtacaagatgtgcaaaatgtacagaacattctggaaatgctgctgcggctacttgacacatacagggataaaataccggaagaagccctaagtccgagctatcttaccgtatgtctcaaactacacgaagccatctgctcatctactaagctgctcaagttttatgaactgcccgccctttctgctgaaatagtatgccggatgatcaggctgttgagtctagtggattccgccggtcaacgtgacgagacaggaaataattctgtgcaaacagtgttccaaggaactttagctgctacaaaacgctggttgagagaggtgttcaccaaaaatatgctcaccagtagtggcgctagtttcacatatgtaaaggagatcgaagtctggcgtagactcgtggaaatccagtttccagctgaacatggatggaaggagagcttactgggagatatggagtggcgacttacaaaggaagaacctctttcacagatcaccgcctactgtaactcttgctgggacaccaagggcctcgaagactccgtggcgaaaacattcgagaaatgcatcatcgaggccgtcagcagtgcctgccagtcccagacgtccattcttcagggattcagttactccgatttgaggaaatttgggatcgtgctcagcgccgtgatcacaaaaagttggccacgcacagccgacaattttaacgacatcctcaagcacctcctcacacttgcagatgtcaagcatgtgtttaggctttgcggtactgacgagaaaattctggccaatgtgaccgaagatgcgaaaaggctgatcgccgtggctgatagtgtcctcaccaaagtcgtgggggacctgctaagtggtaccatcctggtgggccagttggaactcattataaagcataaaaatcaattcctggatatttggcagctcagggagaagtcattatctcctcaggatgaacagtgtgccgtcgaggaggcattggattggcgcagagaggaactgctactactgaagaaggagaagagatgtgttgattcacttctgaaaatgtgcggaaacgttaaacacctgattcaggtcgacttcggcgtcctcgcagtgcggcattctcaggacttgtcctccaagaggttgaacgataccgtcaccgtacgattgtctacctcaagtaactcacagcgtgctactcactatcatctgtcatcccaggtgcaggaaatggcaggaaaaatcgacctactaagggattcacacatcttccagctcttctggcgggaggcggccgagcctctttcagaaccaaaggaggaccaggaggccgctgagcttctttcagaacccgaggaggagtctgaaaggcatattctggagctagaagaagtgtacgactacttataccagccgagctatagaaagtttatcaagttgcaccaggatctgaaaagcggcgaggtgaccttagctgaaattgatgtgatctttaaggacttcgtcaacaaatataccgatttggactccgagctcaagatcatgtgtacggtcgaccatcaggaccagagagactggatcaaggatcgtgttgaacaaataaaggaataccaccatctccaccaggccgttcatgcggccaaagtcatcctgcaagttaaggagtctctcggcctgaatggcgacttctcagtgctcaacacacttttaaactttaccgataattttgacgactttagaagagagacgctcgaccagataaaccaggagctgattcaggctaaaaaactgctgcaggacatcagcgaagcaagatgcaagggtctgcaagctctcagtctgaggaaggaatttatttgttgggtaagggaagctcttggcggcatcaacgaactcaaggtattcgttgatctagcgtccattagcgctggggagaatgatattgacgtggatcgagtggcgtgcttccacgatgccgtccaggggtatgcttctttgttgtttaagttggatccaagcgtggacttctctgccttcatgaagcacttgaagaaactctggaaggctctggataaggatcagtatctcccacggaagctcgtaagtctgattctctcccttatgcagatcctcctgaatcgggctctgttgagcaatgtcagagctgtcacagttgaaatggtcgcacacttgtgcgggcgttttgtgcattccagattccagtag

SEQ ID NO: 89521 - DNA, 15624 bp, Artificial Sequence
  derived and/or modified sequence
atggagtgccccagctgccagcacgtgagcaaggaggagacccccaaattctgttctcagtgcggggaaagactgcctcccgccgcacccatcgctgactccgagaataacaactccacaatggcctccgcctccgaaggcgagatggagtgcggacaggagcttaaagaggagggcggaccttgtctgtttcctggatccgatagttggcaggaaaaccctgaggaaccctgttcaaaagcctcttggactgtacaagaatctaaaaaaaaaaaacggaagaaaaaaaagaagggtaataagtctgcaagcagcgagcttgcttccctgcctttaagtccagcatctccatgccatctcacgttgctctccaatccttggccccaggacacagctctacctcatagccaggcacaacagtcgggccctaccggacaaccatcacaaccgcctggaactgccacaaccccccttgaaggcgatggattatccgccccaactgaggtgggagacagtcctctgcaggcccaagcactgggggaggctggcgtggcaacgggatccgaggcccaatccagcccccagttccaggaccacacagaaggggaggaccaggatgcttcaatcccttctggaggcaggggccttagtcaggagggcaccgggccccccacatcagccggagagggacattctaggaccgaggatgccgcccaagagctcctgttgcctgaatctaaagggggctcatctgagccaggcacggaattacagactaccgagcaacaggctggcgcatccgcaagcatggccgtggacgctgtcgccgagcccgctaacgcagtgaagggggccgggaaggaaatgaaagagaaaacgcaacgcatgaagcaaccccccgccacaacaccaccttttaaaacacactgccaggaagcggagactaagaccaaagatgaaatggctgcggcagaggagaaagtgggcaagaatgagcagggcgagcctgaagatctcaagaagcccgaaggtaagaacaggagcgctgccgcggtaaaaaacgaaaaagaacagaaaaatcaggaggccgatgtccaggaggtgaaagctagcaccctctcccccggaggcggcgtaactgttttttttcacgcgatcatcagcttgcacttcccatttaatcctgatctgcacaaggtgtttatcagaggcggagaggagttcggagagtccaaatgggactctaacatttgcgagctccattacacgagggacttggggcacgatcgcgtgctcgtggaaggtattgtctgcattagtaagaaacacctggacaaatatatcccttataaatacgtgatatataacggcgaatccttcgagtacgaattcatatacaaacaccagcagaaaaagggtgagtacgttaaccggtgcctcttcatcaaatcatctttgctggggtcaggagattggcaccagtactatgacatcgtgtacatgaagcctcatggcagattacaaaaggtcatgaaccacatcaccgatggcccaagaaaagatctggtgaaaggaaaacagatcgccgcagctctcatgctggatagtactttctcgattcttcaaacctgggataccattaacctcaactcattctttacacagtttgagcagttctgctttgttcttcagcagcctatgatttatgaggggcaggcccagctttggactgatctgcaatatcgggagaaggaagtgaaacgatacctgtggcagcatctgaagaagcatgtggtgcccctgcctgacggtaaatccactgacttcttgcctgtggattgtccagttcgaagcaagctgaagacgggactcatcgtgcttttcgtggtggagaaaattgagctcctattagaggggtcactcgattggctttgtcacttgctgaccagcgacgcaagttccccagacgagttccaccgcgatcttagtcatattctgggaatcccacagtcctggagactttatcttgtgaatctatgccagagatgtatggatacaaggacttacacctggcttggcgccttgcccgtgctccattgttgtatggagctggccccccgacacaaagatgcttggagacagcccgaagacacctgggcagcccttgaaggactaagcttctctccttttcgggagcagatgctagatacatcctctttacttcagtttatgagggagaagcagcatctgctgagtattgacgagccactcttccggtcatggttctcactcctgcctctgtcgcaccttgtgatgtacatggagaacttcatcgagcatctgggtaggttcccagcccacatcctggactgcttgagcggcatctattatcgattgccgggtctagaacaagtgctgaatactcaggacgttcaggacgtacaaaatgtgcagaacattctggaaatgctgctgcgcctgctagatacctacagagacaagattccggaggaagccttgagcccaagttacttgaccgtatgtctcaaactgcatgaagccatttgctcatctactaaacttctgaagttttacgagctacccgcgctgtcagcagaaatagtttgcaggatgattcgtcttcttagtctcgtggacagtgctggacagagagacgaaaccggtaacaactctgttcagactgtcttccagggcacacttgctgccacaaaacgctggttgagggaggtttttacaaaaaatatgctcacatcttccggtgcaagcttcacgtacgtgaaggagatagaggtgtggcggcgattggtcgaaattcaatttccggccgaacatggctggaaagagagcctcctcggtgatatggaatggaggctcaccaaggaagagcccctgtcccagataactgcttactgcaatagctgttgggacaccaaaggtttggaggatagcgttgctaaaacctttgagaaatgtatcatagaagcggtttctagcgcatgtcaatctcagacaagcatcctgcagggcttcagctattccgacctgcggaagttcggcattgtattgagtgctgtcattaccaaatcatggccccgtactgccgacaatttcaacgacatacttaagcatctactgaccctagcggacgttaaacatgtgttccggttgtgcggtaccgatgagaagatcctggcgaacgtgacagaagacgctaagcgacttattgctgtggccgattctgtgctaacgaaagtcgtcggcgacctcctgtccggaactattctcgtgggacagctggagctcattataaaacataaaaatcaattcctggacatctggcagctgcgagaaaagagtttaagtccacaggacgaacagtgcgctgttgaggaggccctggactggcgtagggaggaactcctgcttctgaaaaaagagaagcggtgtgtagacagcctgctgaaaatgtgtggcaatgtgaagcatctcatacaggtggactttggtgtgctggcagtaagacacagtcaggatctgtcgtccaagaggttgaatgataccgtgacagttcgactgtcgacatccagcaactcacagcgtgcgacacactaccatctgagcagtcaggtgcaagaaatggcaggcaagattgacctactccgggattcccatatttttcagctattttggcgcgaggcggctgaacctctgagcgagcctaaagaggaccaggaggccgctgagctgctgtccgaaccagaggaagagtccgagagacatatcctggagttggaggaggtgtacgactacctctatcagcccagttataggaagtttattaagctgcaccaggacttgaaatccggagaagtgacactggctgagatcgacgtgatcttcaaggacttcgtgaacaaatatactgacctcgattcagagcttaagatcatgtgcacagtagatcatcaggatcagcgagactggatcaaggaccgggtcgaacagatcaaagaatatcatcacttgcatcaggcagttcacgccgccaaagtgattttgcaggtgaaggagagcctgggtttgaacggcgattttagcgtgctgaatactcttctaaacttcactgataactttgacgacttccgtcgggagaccctggatcagatcaaccaggagcttatacaagcaaagaaattactccaggatatttccgaggccaggtgcaagggtttgcaggccctgtccctgagaaaggagttcatttgttgggtaagagaagctcttggtggaatcaatgagctaaaagtgttcgttgatttagcgagcatatcagcgggcgaaaacgacattgatgtggacagagttgcctgtttccacgatgctgtgcaaggctacgctagtctcctttttaaacttgaccctagcgtggacttttctgccttcatgaaacatctcaagaagctgtggaaggccctggataaagaccagtaccttccgcgtaagctctgcgactcagctaggaatctggagtggctgaaaactgtgaatgaatcacacggcagtgtggagaggtcaagcctaacactagccactgccattaatcagagagggatctacgtaattcaagccccaaaggggggacaaaaaatcagccccgacacagtcctccatctcatactacctgagtcccctggaagccatgaggagtcaagggagtactctttggaggaagtgaaagaactcttgaataaacttatgctgatgtcaggcaaaaaggatcgcaacaacactgaggttgaacgattctcagaagtgttctgttcagtgcagcgattgtcccaggcgttcattgacctccacagcgctggtaatatgcttttccgaacttggattgcaatggcctattgctctcctaagcaaggagtatctttgcagatggactttgggctggacttggtgacagaactcaaagagggaggtgacgtgacggaattgttggccgccctgtgtcgccaaatggagcatttcctcgattcctggaaacgctttgtgacccagaagagaatggagcatttctatcttaacttctataccgccgagcagcttgtgtatctcagcacagagctgcgtaagcagccacctagcgacgccgctttaacaatgctttcctttatcaagtctaactgcaccctgagggacgttctcagagcatcagtgggctgcggctccgaggctgcacgctataggatgaggagggtgatggaagagctcccattaatgctgctgagcgaattttccctggtagacaagctcaggataatcatggaacagtctatgagatgcctcccagcttttctcccggattgtctcgaccttgagacactggggcactgcttggcccatctggcgggcatgggaggtagtcccgttgaacgctgtctgccacgggggctccaggtcggacaaccgaacctggtagtctgtggccactccgaggtgctacctgccgctctggctgtttacatgcagactccttcacagccccttccgacatacgatgaagtgctgctatgcacccctgcaacaacctttgaagaagtggctttgctgttgcgccggtgtctgaccctggggtcactgggacacaaggtgtatagcttactcttcgccgatcaactgtcttacgaggtggcgagacaggccgaggagctgtttcataacctttgcacgcagcagcaccgggaggactatcagctggttatggtgtgtgacggtgactgggaacattgttatcttccatccgcattcagccaacacaaggtgttcgtcactcctcaggcgcctctcgaggctatccaggcttacctcgcgggtcactaccgagtgccgaaacaaacgttgtctgctgctgctgtctttaatgaccgcttgtgtgtaggtattgtcgccagcgagcgggccggggttggtaagagcctgtacgtcaaaaggttacacgacaaaatgaaaatgcagcttaacgtcaagaatgtgccacttaaaacgattaggctaatcgatccgcaggtcgacgaatctcgggtacttggagcgctactgcccttcttggacgctcagtatcagaaagttcccgttctgttccacttagatgtgaccagcagcgttcaaacaggaatctgggtttttttgtttaagttgcttattctgcaatatctgatggacatcaatggaaaaatgtggctgagaaacccctgccatttgtatattgtggagattctggaacgccgtaccagtgttccatctcggtcaagctccgccctgagaacccgcgttccccagttctcgttcctggatattttccccaaggtgacgtgcagacctccaaaagaggtgattgacatggagctctcagctcttcgatccgatacagagcccggaatggacctttgggagttttgtagcgaaaccttccaacgtccttaccaatacctgaggagattcaatcaaaaccaagacctggatacctttcagtaccaggagggatcagtcgagggtacaccggaggaatgcctccagcatttcctgtttcactgtggcgtgattaatcctagttggtctgagctcagaaacttcgcgaggtttttgaactaccaactgcgcgactgtgaagcatccctgttctgcaatcccagctttatcggagatacattacggggcttcaagaaatttgtggtgacatttatgatttttatggctagggactttgccactccatctctgcacacctctgaccaatcacctggcaagcacatggtgaccatggatggcgtgcgcgaggaagacttagctccgttctcacttcgaaaacgctgggaaagcgagccgcacccatacgtcttcttcaatgacgaccataccaccatgacatttattggcttccacctgcagcccaatataaacgggtcggtcgatgccattagtcatctgacaggcaaggttattaagcgtgacgtgatgacaagagatctgtaccagggtttgctattacagcgcgttccctttaatgtggacttcgacaaactaccccgacacaaaaaactggaacggctgtgcctcacactcgggataccacaggctacggatccagataagacctatgagctgaccactgataacatgttgaagattctggcgattgagatgagattcagatgcggcatcccagtgatcataatgggggaaacagggtgcgggaaaactcggctgatcaagttccttagcgatctcaggcggggaggaaccaacgccgacactataaaactcgtgaaggtacacgggggtaccaccgcagacatgatctacagtagagttagagaggctgaaaatgttgcctttgcaaataaggatcaacaccaattggataccattctgttttttgatgaggcaaataccaccgaagcaatctcctgcattaaggaggtactctgcgaccatatggtggacggccagcctctggctgaagactccggcctgcacattatcgctgcatgtaatccataccgtaagcacagtgaagagatgatttgccggcttgagtctgccgggttgggctaccgggtcagcatggaggagaccgccgaccgtctgggctccattcccctccgccagctcgtgtaccgcgtccatgcactgccaccgagcctgatccccttggtatgggacttcggacaacttagcgacgtggctgagaaactctacattcaacagatcgtccagcgcttagtagaaagcatctctttggatgagaacggcactagggtgatcacagaggtgctctgcgcctcgcagggatttatgcggaaaacagaggacgaatgtagcttcgtctcactgcgcgatgtcgaaagatgcgtaaaagtgttcagatggttccatgaacactccgcgatgctgttagcccagctgaacgcctttctgtcaaagtcttctgtgagtaagaatcacaccgagagagatcccgttctctggagcctcatgcttgcaatcggagtgtgctaccacgctagtctggaaaaaaaggattcttacagaaaggccatcgccagattcttccccaagccctatgacgactccagactgctgctagatgagataacacgggcccaggatctgttcctggacggcgtgcctctacgcaaaactattgcgaagaatctcgccctaaaggaaaacgtgtttatgatggtcgtatgtatcgaacttaagattccactgtttctcgttggtaagccagggtcgagtaaatctctggctaaaaccatcgttgccgacgccatgcaggggcctgctgcatattccgatttgtttcgctcacttaagcaggtgcacctcgtttccttccagtgttcacctcacagcactcctcagggcattatcagcaccttccgccagtgtgccagattccaacaaggaaaagacctgcagcagtacgtgtccgttgtggtactagatgaagtgggtctggccgaagattcaccaaaaatgccccttaaaactctgcaccccctgttggaagacggctgcatcgaggacgatccggctccacataagaaggtgggatttgttggtatctcgaattgggctcttgatcccgccaaaatgaatcggggcatctttgtaagccgcgggagtcccaatgaaactgagctcattgagagcgccaaaggaatctgtagttccgatattctggtccaggatcgagtgcagggctactttgccagttttgccaaggcatacgaaaccgtgtgtaaaagacaggacaaggaattctttggcctgagggactactatagcctcatcaagatggtctttgcagccgccaaggccagcaaccggaagcccagcccacaggacatcgctcaggctgtcctgcgtaatttcagtgggaaggacgacatccaggccctcgacatattcctggctaacctgcctgaggcaaagtgctctgaagaggtatcccccatgcagctcattaagcaaaatatcttcggtccaagtcagaaggttcccggcggtgagcaagaggatgcagagtccaggtacctgcttgtcctcacaaagaattatgtggcactccagattcttcaacagactttctttgaaggtgaccaacaaccagagatcatctttgggagcggcttccctaaggatcaggagtacacgcaactctgtaggaacatcaacagggtgaaaatctgcatggaaaccggtaaaatggtccttttgctcaatttacagaatctctatgagtccttgtacgacgccctgaaccagtactatgtgcacctcggcggccagaagtacgtcgatctcgggctcgggacacatcgggtcaaatgtagagtgcaccctaacttccgccttatcgtgatcgaggagaaagatgtggtctacaaacattttcccattcctcttattaatcgactggagaagcattatctggatatcaatacagtgttggagaagtggcagaaatcgattgtcgaggagctgtgcgcttgggtggaaaaattcattaacgtcaaggcacaccactttcaaaagagacataagtattctccctcagacgtctttatcgggtatcattctgacgcttgtgcgtcagtggtgcttcaagtaatagagcggcagggtccaagggccctaaccgaagaattacatcagaaggtttcggaggaggccaagtctattctccttaactgcgccactcccgacgcagttgtgcgcctgagcgcatattctctcggaggattcgctgcagagtggctgtctcaggaatattttcaccgtcagagacataacagcttcgccgattttctacaggctcacctgcatactgccgatctcgagaggcacgccatctttactgagataaccacctttagcaggctgttgacctctcacgactgtgagattcttgagagtgaggtgactggcagggcgcccaaaccgactctgttgtggctgcagcagtttgataccgagtattctttccttaaggaggtacgcaattgtttgaccaacacagctaaatgtaagatactgatcttccagaccgatttcgaagatggtatccgaagtgcgcagctgattgcctctgctaaatacagcgtcatcaacgaaatcaacaagattcgcgaaaatgaggacaggatattcgtatattttatcactaagctctctagagtgggccgaggcacagcttatgttggctttcacgggggcctgtggcagagcgtccatatcgacgacctgcggcgttccaccctgatggtgtccgatgtgacacggttacagcacgtgactatcagtcagctgtttgctcctggagacctgcctgagctcggtctcgaacaccgtgcagaagacggccatgaagaggccatggagaccgaggcatcgacttccggggaggtcgccgaggttgcagaggaggccatggaaaccgagtcatcagagaaggtagggaaggaaacatcagagctgggcggttccgacgttagcatcctggacaccactagactcctgaggtcttgtgtacagtccgctgtgggtatgctgcgagatcaaaacgagtcatgtacaaggaatatgaggagggtggtgcttctgcttgggcttcttaacgaggatgacgcgtgccatgccagttttcttcgcgtgtctaagatgagattgtcagtgttccttaagaaacaggaggagtcccaattccacccgctggaatggttggctcgtgaggcatgcaaccaggacgcacttcaggaggctggaacctttagacacaccctgtggaaacgtgtacagggcgcagtaacgcccctgctggcatcaatgataagctttatcgaccgcgacggcaatcttgagctgttgacgagacccgacacgccaccttgggctcgagatctgtggatgttcatcttttccgataccatgctcttaaacattcctctagtgatgaacaatgaacgtcataaaggcgaaatggcttatatcgtggtgcagaaccacatgaacctgtctgaaaatgcgagtaataatgtgccattctcttggaagataaaagattatttagaggagctgtgggtccaggcacagtatataaccgatgcggaaggattgcctaaaaagttcgttgacatcttccagcagacgcctctcggcaggttcttagctcagctccatggggagccacagcaagagctcctccaatgttacctgaaggacttcatcctgctaaccatgagggttagtacagaagaggagctgaagttcctccagatggccctgtggtcatgcacgagaaaactcaaagccgcctctgaagcccccgaggaagaggtgagtctgccttgggtccacctggcctaccagcgattcagatctcggttacagaattttagtagaatcctcaccatctatcctcaggtcctgcattctctcatggaggcacgctggaatcacgaactggccgggtgtgagatgaccttggatgcctttgctgcaatggcttgcaccgagatgctcactcggaacacgctcaagccatctccgcaggcttggctgcagctggtgaaaaatctgagcatgcctcttgagttgatctgctctgacgagcatatgcagggttcgggctccctcgcccaggctgttatacgagaggtgcgggcacagtggagccggatcttttcaaccgccctgttcgttgagcatgtgttgctgggcaccgagagcagagtccccgagctgcaaggcttggtgactgagcatgtgtttctgctggacaaatgtctgagagagaatagcgatgtaaagacgcacgggccttttgaagccgttatgcggactttatgcgaatgtaaagagaccgcctccaagaccctgagtcgttttggtattcagccctgcagcatatgtctgggtgatgcaaaggatccagtatgtctgccttgcgatcatgtgcattgcttacgttgcttacgggcctggttcgccagcgaacagatgatttgcccctactgcttgacagctctgcctgatgagttcagcccggccgtgagccaagcccatagggaagccatcgagaagcacgccagatttcgccagatgtgcaacagttttttcgtggacctggtcagtactatctgcttcaaggataatgcgccgcccgaaaaagaggtcattgagtccctgttatctctgctgttcgtccagaagggccgactgagagacgctgcccagaggcattgtgagcacaccaagtccctgagtcccttcaacgatgtagtcgacaaaacgccagttattaggtccgtgattctgaagctcctgctgaagtactcttttcacgacgtaaaagattatattcaggagtacctcacgctgctgaagaaaaaagccttcataacagaagacaagacagagctgtatatgttgttcattaattgtctggaggactctatacttgagaaaacctcagcttactcaaggaacgacgagctaaatcacctcgaggaggaggggcgcttcctcaaagcctattcacctgcttcacgagggcgcgagcccgctaatgaggcaagtgtggaataccttcaggaagtggctcggattagattatgcctggaccgcgctgcggattttctgtccgagcctgagggcggacccgaaatggcaaaagagaagcaatgttacctgcagcaggtgaagcagttttgcatccgagtggagaatgactggcaccgcgtatacttggtgagaaagctctcttctcagaggggaatggagtttgtgcagggactctccaagcctggacgcccccatcagtgggtattccctaaggatgtggtcaagcagcagggcctccggcaggatcatcctggccagatggaccgttatctagtctacggcgatgaatacaaagcgctgagagacgccgtagcaaaagcagtgctcgaatgcaagccactcggtatcaagactgccctgaaagcatgcaaaacgccccagtcccagcagagcgcctacttcttgctcacgctcttccgcgaggtcgcgattctatacaggagccacaacgcttccctccaccccacgcctgaacaatgcgaggcagtgtctaagtttatcggagagtgtaagattctctcaccaccagacatttcccgcttcgccacttctctcgtcgataatagcgtccccctccttagagctggaccatctgatagtaatctcgatgggactgtgacagaaatggctattcatgccgccgcggtcctcctttgcggccagaacgagctgttagaaccgctgaagaatttggcgttctctcccgcgactatggcccacgcttttctccctactatgcccgaggacctgttagcccaggccagacgctggaagggtttggagagggtgcattggtacacctgcccaaacgggcacccatgttctgtgggcgagtgtggcaggcctatggaacagtctatctgcatcgactgccacgctcctatcggcggtattgaccacaagcctcgggacggatttcatttggttaaagataaagcagataggacacagacagggcatgttctcggcaacccgcagagacgcgatgttgttacatgtgaccgaggtcttccgcccgtggtgtttctgttgattaggctcctgacccatctcgcactactgttaggagcatctcagtccagccaggccctcatcaacattattaagccccccgttcgtgacccaaagggcttcctgcaacagcatatcttgaaagacctggaacaacttgccaaaatgctcggccattccgccgacgagaccataggagtcgtgcacctggttctccgacgactcctacaggaacagcaccagctgtcttcgcgtaggctcctgaattttgacactgagctctcaaccaaggagatgcggaacaattgggaaaaggagatcgctgccgtcattagtcctgaacttgagcatctggacaaaacgctccctactatgaacaatttgatctctcaggacaagcgcatttcttccaaccccgtcgccaagatcatctatggcgaccctgtgacctttctgcctcatctgcccagaaaatccgtcgtgcattgcagtaaaatctggagctgcaggaaaagaatcactgtggagtatttgcagcacatcgtggaacaaaagaacgggaaggaacgggtccccatcctgtggcactttctccagaaggaggctgagttgaggctggtcaaattcctccctgagatcctcgctctccagcgcgatctcgtaaaacaattccagaatgtgcagcaggtcgaatactcctccatccgcggttttttgtctaagcactcttccgatggactcagacagcttttgcataatcgcattacagtgtttctcagcacatggaacaagctgcgaaggtccctggaaactaacggggagattaacctgccaaaagactactgctctaccgatctcgatctcgatactgagtttgagatattgttgcctaggcgccgcggattgggtttgtgtgctactgccctggtctcatatctgattcgcctgcacaatgaaatcgtttacgcggtggaaaagcttagcaaggaaaacaactcatacagtgtggacgccgcagaggtaacagaactgcacgttattagctacgaggttgaaagagacctaacacctcttattctgtccaactgtcaataccaggtcgaagaaggccgagaaactgttcaggagtttgatctcgaaaagatccagcgacaaatcgtttcaaggtttctccaaggcaagcctaggctgagcctgaagggtatacctacgctggtgtacaggcatgactggaactatgaacatctgtttatggatattaagaacaagatggcccaggatagtttaccttcctctgttatctcggcaatcagtggacagctgcagagttacagtgacgcatgtgaagtactgtcggtggtcgaagtgacccttggatttctgtcgaccgctgggggcgacccaaacatgcagttgaacgtctatactcaggatattctgcaaatgggcgaccagactattcatgtcctgaaggccctgaaccgctgccagcttaagcacactattgccttatggcagtttctttctgctcataaaagtgagcaactattacgattgcataaagaaccattcggagagatttcttcccggtataaagccgacctgagccccgagaatgctaagctcttaagcaccttcttaaaccagacaggtctcgacgcctttctgctcgagctgcacgagatgattatcctgaaattaaagaacccccagactcagaccgaggagcgctttcggccccagtggtctctccgggatacactagtctcttacatgcaaacaaaagagagtgaaatcctgcctgaaatggcttcccaattcccagaagagatcctacttgcaagctgcgtctccgtttggaagacggccgctgtccttaagtggaacagggagatgaggtag

SEQ ID NO: 89522 - DNA, 4653 bp, Artificial Sequence
  derived and/or modified sequence
atggagtgtccgtcttgtcagcatgtgagcaaggaagaaaccccgaaattctgctcccagtgcggtgaacgcctcccccctgcagcgccaatcgccgattccgaaaacaataactctaccatggcctccgcatccgagggcgagatggagtgtgggcaagagcttaaagaggagggaggcccttgcctgtttcccggaagcgactcttggcaggagaatcctgaagaaccttgcagcaaagcttcctggactgtacaggagtcaaaaaaaaaaaaacggaagaaaaaaaaaaagggaaacaaaagtgcctcttccgaactcgcaagcttgccactatctcccgcttctccttgccacctgaccttactgtctaatccttggccccaggacactgccctgccgcactctcaggcgcagcaaagtggtcccactggccagccatcccagcctcctgggactgcaaccactcccttggagggggacgggctttccgctcccactgaagtgggtgattcccctctgcaggcccaggctctgggggaggcgggtgtggcgaccggcagtgaggcacagagcagccctcagttccaggaccacaccgaaggagaggatcaggatgcctcaatcccaagcggcggtagaggacttagccaggaaggaactggacctcctacttctgccggagaggggcactctcggactgaagatgcagcgcaggagctccttctgccggagagtaaagggggttcaagtgaacccggtactgagcttcaaactactgagcagcaggccggagcctccgcttccatggctgtcgacgccgtcgccgaacccgcaaatgccgttaagggggctggcaaggaaatgaaggaaaagacccagaggatgaagcaacccccagccaccacaccacccttcaaaactcactgtcaggaggcagagactaagaccaaggacgaaatggctgccgctgaggagaaagtcggaaagaacgaacaaggcgagccagaggatctcaagaagcctgaagggaagaacaggagtgccgcagcagtcaaaaatgaaaaagagcagaaaaaccaggaagccgatgttcaggaggttaaggcctccactttgtcccccggaggcggtgtgaccgtattcttccacgctatcatctcccttcatttccccttcaatccagacttacacaaggttttcattagggggggagaagaatttggggagtccaaatgggactccaacatctgtgagctgcattatacgcgtgacctgggacatgatagagtgctggttgagggtattgtgtgtataagtaagaaacatttggacaagtatatcccatataagtatgtgatctataacggcgagagttttgaatatgagtttatttataagcaccagcagaaaaagggtgagtacgtaaataggtgtctctttatcaagtccagtctcctgggctccggagactggcaccagtactacgacatagtgtacatgaagccccacgggcgactgcagaaagttatgaaccatatcaccgatggcccaaggaaggacctggtgaagggtaaacaaatcgccgcagcattgatgctggattctacttttagtatccttcaaacgtgggatactattaacctgaacagtttctttacccagtttgaacaattttgtttcgtcctgcagcagcccatgatatacgagggccaggctcaactctggacagatctgcagtatagagaaaaggaggtaaagcgttacctgtggcagcacctgaagaaacacgttgtgcccctgccagatgggaaatctacagactttctgcccgttgactgtcccgtgcggtctaagttaaaaacaggactcatcgtcctttttgtggtcgaaaagatagagttactcctcgagggaagtcttgattggctttgtcatctcctcaccagtgatgcaagtagtcccgatgagtttcaccgagatcttagccacatccttggcataccacagtcctggaggttgtatcttgtgaacctgtgtcagcggtgcatggacacacggacatatacgtggctcggtgccctccctgtgctgcattgctgtatggagctcgccccacgacacaaggatgcttggagacagcctgaggatacctgggccgctctcgagggactgtcattttccccctttagagaacaaatgctggacacctcttctcttctacagttcatgagggagaagcagcatttgctgtcaatcgatgagcctctgttcaggtcttggttttctctcctgccactatcccacctcgttatgtatatggaaaacttcatagagcacctcggaaggttccccgcacacatcctagactgcctgagtggcatctattatcggttaccgggattagagcaagtgctaaacactcaggatgtacaagacgttcagaatgtgcagaacattctcgaaatgctactgagactgctcgatacctacagggacaaaatccccgaagaagcactcagcccgagttatcttaccgtgtgtctgaagctccatgaagcaatatgctcatctaccaagctgttgaagttctatgagctgccggctctgagcgctgagatagtgtgccggatgattcgccttctgagccttgtggacagcgccggacagcgggacgaaactgggaacaactccgtgcagacagttttccaaggtacacttgcggctacaaaaagatggctgagggaagtgttcaccaagaatatgctcacctcctccggggcttccttcacatatgtgaaagagatcgaggtctggaggcgcctggtcgagatccaattcccagccgagcatggatggaaagaaagcctgctgggggacatggaatggcggcttacaaaagaggaaccactgtcccagattacggcctattgcaattcctgctgggatactaagggcctcgaagactccgtcgcgaaaaccttcgaaaaatgcattatcgaggccgtttcttctgcttgtcagtcacaaacaagcatcttgcagggcttcagctattcggacctgagaaaatttggcattgtcctctccgccgtgattacgaaaagttggccacgcacagccgacaactttaacgacatcctcaagcacctcttgactctggccgacgtcaaacatgtgtttaggctgtgtgggacagatgagaagattctggcaaatgtgactgaggatgctaagcgtcttatcgctgttgctgattcagtgctgacaaaggtggtgggagatttgctcagtgggaccatactagtggggcagctggagctgatcattaaacacaagaatcagtttttggatatatggcagttgagggagaagtcactgtcccctcaggacgagcagtgtgccgttgaagaggccttggattggcgcagggaagaactgctgttgctaaaaaaagagaaacgatgcgtagacagtctgctgaaaatgtgcgggaatgttaagcacctgattcaggtagattttggggtcctggctgtgcgccatagccaggacctctcatctaaaaggcttaacgatacggtaaccgtccgtcttagtacgagctctaattctcaacgagccacccattaccatctgtcctctcaggtacaggaaatggcaggtaagattgaccttctccgagactctcacattttccaactgttttggagggaggcagctgagcccctctctgagccaaaagaggatcaggaagctgcagaactgttgtcggagccagaagaagaatctgagaggcacatcttggaacttgaggaggtgtacgattatctgtaccagcccagctaccgcaagtttatcaagcttcaccaggacctgaagagcggtgaggtgacactggcagagatcgatgtgatctttaaagactttgtcaacaagtataccgatctagacagtgagttgaagatcatgtgtacagtagaccatcaggatcagagggattggattaaagacagagttgaacagataaaggagtatcaccacctgcaccaggctgtgcatgctgccaaagtgattttgcaagttaaggaatcgttaggcctgaacggggattttagcgtactcaacactctccttaattttactgacaattttgacgactttaggcgcgaaacactggaccaaattaatcaggagttaattcaggccaagaaactcctgcaggatatctccgaggctcggtgcaagggcctgcaggccctgagtcttcggaaggaattcatttgctgggtgcgagaagccctggggggtatcaatgagctgaaggtctttgttgacctggcttcaatctctgccggtgaaaatgacatcgacgtagatcgagttgcttgttttcacgatgcagtgcagggatatgcatcccttcttttcaagttggatcccagcgtggattttagtgcgttcatgaagcacctgaagaaactgtggaaagcgctggacaaagatcagtatctgccacgcaaactagtttctctaattttgtcgctaatgcaaatattgctcaatagagccctcctctccaatgttcgggcagtaaccgtggaaatggtggcccacctatgcggcaggtttgttcacagtcggtttcagtag

SEQ ID NO: 89523 - DNA, 15624 bp, Artificial Sequence
  derived and/or modified sequence
atggagtgtcctagttgccagcatgtttccaaggaagaaactcccaagttctgctctcagtgtggggagaggttgccacctgctgccccaattgctgacagtgagaacaataattctacaatggcgtcagcatcagaaggtgaaatggagtgtggacaagagctcaaagaagagggcggtccctgtctctttccgggatcagattcttggcaggagaatcccgaggaaccttgctccaaggcttcgtggacagtgcaggaaagtaagaaaaaaaaacggaagaagaagaaaaaaggtaataaatcagcatcttccgaactagctagtctgcctctgtctcctgccagtccatgtcatcttacactgttgagtaacccttggcctcaggataccgccctaccacacagtcaagctcagcagtcggggcctacaggccagcctagccagcctccaggcactgccacaactcccctagagggtgacggtctgtcggcacccactgaggtgggggattcccccctacaggcgcaagcactgggtgaagcaggtgtggctactggcagtgaagcccagtcctccccacagttccaggaccataccgaaggagaggatcaggatgccagcattccctcagggggtcgaggactcagccaagagggcactgggccacccacttccgccggtgaaggacatagcaggaccgaggacgcagcgcaggagctcttgctgccagaaagcaaagggggaagttcggagcccggaaccgagctgcagacgactgagcagcaggcgggagctagcgccagcatggctgtggatgctgtcgctgaacctgccaatgctgtgaagggcgcaggcaaggaaatgaaggaaaaaacccagcgcatgaaacaacctcccgctacgaccccacctttcaagacccactgccaggaggctgagactaagaccaaagatgagatggcagctgcagaggagaaagtgggaaaaaatgaacagggtgagccagaggatttaaagaagccagagggcaaaaatcgctcagcggctgctgttaaaaacgaaaaggagcagaagaaccaagaggctgatgtgcaagaggttaaagctagtacactgtctcccggaggcggagttactgtgttcttccacgctatcatctcactgcatttcccttttaatccagacctccacaaagtcttcattagaggcggtgaagagtttggagagagtaagtgggatagcaatatctgcgagctccattacacacgagacctcggccacgatagagtgctggtcgaaggaatcgtctgcatctcaaaaaagcacctcgataaatatattccttacaaatacgtaatctacaacggagagtccttcgagtacgagttcatctataaacaccagcaaaagaagggcgaatacgtgaaccgatgcctgttcatcaagtccagtctcctgggaagcggggattggcatcagtactacgacatcgtgtacatgaagcctcatggcagactccagaaggtcatgaatcacatcacagatggaccacgtaaagatctcgtgaaaggcaagcaaattgcggctgctctgatgctggactccacttttagcattctccagacctgggacacaatcaacctcaactcttttttcacgcagtttgagcagttctgctttgtgttgcaacaacccatgatttatgagggacaggcccagttgtggactgatctgcaatatagggagaaggaggtgaaacgatacctgtggcagcacctgaaaaaacacgtagtgccgttacccgacggcaagagtactgatttcctgccagtggactgccctgttaggagtaagcttaagacaggattgatagtgttgttcgtggtggaaaagattgaactgttacttgagggatcactggactggctgtgccatctcttaacatcagatgcttctagccccgacgaattccacagggacctgagtcatatactcggtattccccagtcgtggagactttacctggtgaatctttgccagcgatgcatggacaccagaacctatacgtggctgggcgcactgcccgtcctccattgttgcatggaactggctcctcgccacaaggatgcctggcgacagccagaggacacatgggccgctctcgaggggctctccttcagccctttccgcgaacaaatgttagacaccagttctttactacagttcatgcgggagaaacagcaccttctgagtatagacgaaccgttgttccgttcatggttctctttgctgcccctgagccatttggtcatgtacatggagaattttatcgaacacctgggccgattcccggctcacattctggactgtctgtcgggtatatattacaggctgccaggactggaacaagtgttaaatacccaggacgtgcaggatgtccagaacgtgcagaatattctggaaatgctgttacgactgctcgatacctacagggataaaatccccgaagaggccctgtccccctcctaccttacggtctgtctaaaactccatgaggctatctgctcatctactaagctgcttaagttctatgagctaccggctctaagcgccgaaatagtctgtagaatgatccgccttctgtctcttgtcgacagcgctggccagagagatgagaccgggaataattcagtacagactgtgttccagggaacactggcagccaccaagcgttggctccgagaagtgttcaccaaaaacatgttgacctccagcggcgcaagctttacatatgttaaggagatagaggtctggagacggttagtagagatccaatttcctgccgaacatggctggaaggaatcacttttgggagatatggagtggcggctgaccaaggaggagccactgtcacagattaccgcttattgcaattcctgctgggataccaaagggctagaggactccgtagctaaaacgttcgagaaatgtataatagaggctgtaagcagcgcttgtcagagtcagacttcaattctgcagggcttttcatactcagacctgaggaagttcggcatcgtcttatcagctgtgattaccaagtcctggccacgtacagccgacaatttcaacgacattctgaagcacctactgactcttgccgatgtaaaacacgtttttagattatgtggcaccgacgagaaaattctggccaatgttactgaggatgcaaaacggttgatagccgttgccgactcagtgttaacgaaagttgtgggcgatctcctgtccgggacaattcttgtgggccaactggagctgattatcaaacacaagaaccagtttctggatatttggcagcttcgcgaaaaatctttgagtccgcaggacgagcaatgtgccgtggaagaagcgctcgattggagaagggaagaattactgctcctcaaaaaggaaaaaaggtgtgtggatagtctgcttaaaatgtgcggcaatgtgaagcatttgattcaagtggacttcggggttctggccgtgcgccacagccaggacctctccagtaagaggctgaatgacaccgtgactgtgagattaagtacaagtagcaatagtcagagggccacccattaccacctgtccagtcaggttcaagagatggccggaaagattgatctgttgagagacagtcatatctttcagctgttctggcgtgaggctgcagaacccttgtccgaaccgaaggaggatcaggaagcagctgagctgctgagcgagcccgaagaagagtccgaacggcacatcttagagcttgaggaggtatacgattatctgtaccagccgtcttaccggaagtttatcaaactgcatcaagatctgaagagcggcgaagtgacactggccgaaatcgacgttatctttaaagacttcgtgaacaagtataccgacctagatagcgaactcaaaataatgtgtacagtggatcatcaagatcaaagagactggattaaagacagagtagagcagataaaggaataccatcacctgcatcaggcggtgcacgccgctaaggtgatactgcaagttaaggagagcctcggtttaaacggggactttagtgtgctgaatactctgctcaattttaccgataatttcgacgatttcagaagagaaaccctcgaccagattaaccaggaactcatacaggctaagaaactgttgcaggacatctctgaggctagatgcaaggggctccaggccctatccctgcggaaagagttcatatgttgggtgcgggaagccctcgggggaatcaatgagctgaaggtgttcgtggacttggcaagcattagcgcaggggaaaacgatatcgacgtggatcgcgtggcttgctttcacgacgctgtccagggctatgcttcattgctgtttaaactcgatcccagcgtagactttagcgcttttatgaagcacttaaagaaactctggaaagctctggataaggatcagtacctacccaggaaactctgcgactccgccagaaacctggagtggctgaaaacagtcaatgagtctcacggctccgtggagagaagctctctaaccttggcaaccgccattaatcaaaggggcatatacgtcatacaagccccaaaggggggtcagaagatttcacctgacactgttctgcacctgatcttacctgaatcccccggaagccacgaagaaagtagggaatacagtttagaagaagtcaaggagcttctcaataagctgatgctgatgtccggaaaaaaggacaggaataacacagaggtggaacgcttcagcgaggttttctgctctgtgcaaaggttatcccaggcgttcattgacctacactctgccggaaacatgttgtttcggacatggatcgccatggcctactgcagcccaaagcagggagtctcactccagatggacttcggcctagatctcgtgaccgagctcaaagaaggcggtgacgtgactgaactgctcgccgctctttgcagacaaatggagcactttcttgatagctggaagcgctttgtcactcagaaacggatggagcacttctatctgaatttctatacggctgaacagctggtgtacctaagcactgaattgagaaaacagcctccatccgatgccgcactgactatgctgagctttattaagagcaactgcaccctgcgcgatgtgctccgggcttctgtcggctgcggcagcgaggcagccagatatcgtatgcgtcgcgtcatggaggaactgccacttatgctgctcagcgaatttagcctcgtcgacaaactccgcattatcatggagcaatccatgagatgccttccagcctttctcccagattgcctggacctggaaaccttgggccactgtctggcgcacttggccggtatgggcggatcaccagtggagaggtgccttccgagaggactgcaggttgggcagcctaatttggtggtttgtgggcatagtgaagtgctgccagctgctctggcagtatacatgcagaccccaagtcagccccttcccacttacgatgaggtcctgttatgtactcctgcaactacttttgaggaggtagcactactcctccggcgatgcttgaccttgggatccctcggccataaggtgtatagcttattgtttgccgatcagttgagctatgaagtggcacggcaagcggaagaattgtttcacaacctctgcacccaacagcatcgcgaggactatcaattagtgatggtgtgcgatggggactgggaacattgttatctgccaagtgcgttttcacaacacaaggtgttcgtcacgccacaggcgcctcttgaagccattcaggcctacctggccggacattaccgcgtgccgaaacagacattatccgcggctgctgttttcaatgaccggctgtgcgtaggcatcgttgcctccgagcgggcaggggtggggaagtccctgtacgtgaaaagactccacgacaaaatgaaaatgcagctcaacgtgaaaaatgtccccttaaaaacaattcgcctgatagacccccaagtggatgagtctagagtgctcggcgcattgctgccttttctagatgcccaatatcagaaggtccccgttctatttcacctggatgtcacgagttccgtgcaaacaggcatctgggtgttcctgttcaaactcctaattctgcaatatctgatggacatcaacgggaagatgtggctgcggaacccatgtcacctgtacattgtggaaatccttgagagaaggacttccgtgccaagccgcagttccagcgccctccggacgagggtgcctcagttttccttcctggatatattccccaaggtaacatgccggcctccaaaggaggtgattgacatggaactatctgcactgcgaagcgataccgagcccggaatggacttgtgggaattttgtagtgaaacatttcaacgtccatatcagtatctgcgccgatttaaccaaaatcaagatctcgacacattccaatatcaggaaggcagcgttgaaggcactccagaggaatgtctccagcacttcctgtttcactgcggcgtgataaatccatcttggagcgagctgcgcaatttcgcgaggtttctgaactatcagctgcgagactgtgaggccagtctgttctgtaaccccagtttcatcggagatactctacgcggtttcaagaaattcgtggtcacctttatgattttcatggccagggatttcgccaccccctccctgcataccagcgaccagagtcccggaaaacacatggtgacaatggatggcgtgagggaggaggacctcgctccgttcagccttagaaaacggtgggagtctgaaccccacccctacgtcttctttaatgatgatcacactactatgaccttcataggcttccatctccagcccaacatcaatggctctgtagatgccattagtcatctgaccggcaaggtaattaaaagagacgtaatgacccgggacttataccaggggctgctccttcagcgcgtaccattcaacgtggacttcgacaagctgccacgacataagaagctggagaggctgtgtctgacattaggcatccctcaggctacagacccggataaaacatatgagcttactaccgacaacatgttaaaaatcctggcaattgagatgcgcttccggtgtggcattcccgtgattatcatgggggagactggctgtggaaagaccagactgatcaagtttctcagcgatcttcgccgaggagggacaaacgccgatacaatcaagctggtcaaagtgcacggagggacgactgctgatatgatatatagccgggttagggaggccgaaaatgtcgcatttgccaacaaggaccagcaccagctagacacaatcctgtttttcgacgaggccaataccacagaagcaattagctgtatcaaggaggtgctctgcgaccacatggtcgacgggcaacccctcgcagaggatagcggattgcacatcatagccgcatgtaatccatacaggaagcacagtgaggaaatgatctgccgcctggagagcgcagggctcgggtaccgggtgagtatggaggaaaccgccgacagactgggctccatccccctcagacaactggtgtaccgcgtccacgcactgcctccaagcctgattcccctggtgtgggatttcgggcagctgagtgacgtggctgaaaagttgtatatccagcagatcgttcaaagactcgtcgagagtatctccctcgatgaaaacggaaccagagtcatcacagaagtcctgtgcgctagccagggcttcatgcggaagacggaggatgaatgttcattcgtgagtcttcgggatgtagagcgctgcgttaaggtgttccgttggttccatgaacatagcgccatgctgttagcccaactgaacgccttcctgtctaaatcatctgtcagcaaaaatcataccgagagggatccagtcctgtggagtcttatgcttgcgattggcgtgtgctaccacgcatctcttgaaaaaaaagatagctacagaaaagccatagcacgctttttccctaaaccttacgacgactcaagactgctgctcgacgagatcactcgcgcacaggatctgttccttgatggtgtccctctgcggaagaccatcgccaagaatttggctcttaaggagaatgtgttcatgatggtagtgtgtatcgagctaaaaattcctctttttttggtgggaaagccgggaagctccaaatcattagctaaaaccattgttgccgatgccatgcagggtccagctgcttattcggatctgtttagatccctcaagcaggtgcatcttgtatcttttcagtgctcccctcactcaaccccacagggaatcatctccacgttccggcagtgcgcgcgatttcagcagggaaaggacctgcagcagtacgtgtctgtcgtggtgttggatgaagtcggactggctgaagattctcccaaaatgccgctgaagacacttcatcccctgctcgaggacggatgcattgaggatgatcctgctcctcacaaaaaagtggggtttgtggggattagtaattgggctctggacccagccaaaatgaatagaggaatttttgtgtctcggggatcacccaatgagacagagctaattgaaagcgcaaagggaatttgttcctcagatattttagtgcaggaccgcgtccaagggtactttgcgtcgttcgctaaggcctacgaaaccgtctgtaaacggcaggacaaagaattctttggactgcgcgattattactctctgattaagatggtcttcgcagcggcaaaggctagcaatcgtaaacctagcccccaggacatcgctcaggccgtcttgcgcaatttttccggcaaagacgacatccaagccctcgatatctttttggccaatttgccggaagctaaatgctccgaggaggtctcccctatgcagctgatcaagcagaacatattcggccctagccagaaggtgccagggggtgagcaggaggatgctgaatcaaggtacctgttggtcctaaccaagaactacgtcgccctgcagatacttcagcagaccttttttgaaggtgatcagcagccagagatcatctttggctccggattccctaaggaccaggagtatacacaactttgtaggaatatcaaccgagtgaagatatgcatggagacgggcaagatggtgctgctgctcaatctgcagaacctgtacgagtccctttacgacgcccttaatcaatattacgtgcacctaggcggacagaaatacgtggatctgggcctgggcacacatagagtgaaatgcagggtgcacccgaacttccgtttaattgtgattgaagagaaggatgttgtgtacaagcacttcccaattcctctcataaatcggctggaaaagcactacctcgacatcaacaccgtgctggaaaaatggcagaaatcaattgtcgaagagctgtgtgcgtgggtcgaaaagtttattaacgtgaaggcacaccacttccagaaacgccacaagtatagtccctcagacgtctttatcggatatcacagcgacgcctgcgcatctgtggtcttacaggtcatcgaaagacagggccctcgcgcattgactgaggaactccaccaaaaggtgagcgaggaagcaaagtccatccttctgaactgtgccacccccgatgcagtcgtccggctgtccgcatactccctgggaggtttcgccgcagagtggttatcccaggagtatttccatcgacaaaggcacaatagcttcgccgactttttacaggcacacctgcatacggctgatcttgagcgccatgcaatcttcaccgaaatcaccacattctcccgcctcctgacctctcacgactgcgaaattctggagtcagaagtgactggcagagcacctaaacctacgctgctatggctgcagcaatttgatactgagtactcctttcttaaagaggtgagaaactgtctcacgaataccgccaaatgcaagattctgattttccagacagacttcgaggacggtatccgctctgcccagctaattgccagcgcaaagtacagtgtgatcaacgaaatcaacaagatccgagagaatgaagaccggatctttgtatattttatcaccaagttatcaagggtgggcaggggcaccgcttacgtggggttccatgggggattgtggcagagcgtccatattgatgacctcagacggagtaccctgatggtcagtgatgtgacgcgtctccagcatgtgactatctcgcagctctttgcccctggcgacctgcccgaattgggcctggagcatcgtgcagaagatggacacgaagaggccatggaaactgaggccagcacctccggagaggtggccgaggtcgccgaggaggctatggagaccgaatctagtgagaaggttggcaaagaaacatcagagctaggaggcagcgatgtgtctatcctcgacactacccggctgttgcgatcctgcgtccagagcgcggtaggcatgctccgggatcagaacgagtcctgtacacgaaatatgcgtagagttgtgctcctgttgggactgttgaacgaagacgatgcttgccatgcaagctttctaagggtgagcaaaatgaggttgtccgtttttctcaagaagcaggaggaaagccagttccaccctctcgaatggctcgccagggaagcctgcaaccaggatgcattacaggaagccggaacattccgacacactctgtggaagcgcgtgcagggagccgtcacccccctcttggccagcatgattagctttatagatagagacgggaacctcgagctcctgacccgccctgacacccctccgtgggcgagagatctgtggatgttcattttctctgacacaatgttactgaatattccactcgtgatgaacaacgagcggcataagggagaaatggcctacattgttgttcagaatcacatgaatctgagtgaaaacgcttctaataatgtccctttcagttggaagattaaagattatctcgaggaactttgggttcaagcccagtacattactgatgccgaggggctgcctaaaaagttcgtggacatcttccagcagaccccgctgggtagattccttgctcagttgcacggggaaccgcagcaggagttactgcaatgctacctgaaggacttcattttgctcactatgcgggtctcaacagaggaggagctgaagttcttacagatggctctgtggtcctgtacgcgcaagctcaaggcagcttctgaggctccagaagaggaggtcagcttgccatgggttcacttagcatatcagcgatttagaagcaggctgcagaatttcagccggattctcacgatttatccacaggtgctgcattcactgatggaggccagatggaatcacgaactagccggttgcgagatgacattggatgcctttgccgcaatggcctgcacggagatgttgacaaggaacacgctgaagccaagcccgcaggcctggctacagttggtgaagaatctgtccatgcctctggagctgatctgctcagacgaacatatgcaggggtctggctctctcgctcaagccgtgatccgggaagttagagcgcagtggtcaaggattttctccaccgcattgttcgtggagcacgtgctgctaggaacagaaagtcgagttccggaactccagggtttggtcacagaacatgtgtttctgcttgataagtgccttcgcgagaactcagacgtcaagacccatgggcctttcgaggcagtgatgcgcactctatgcgagtgtaaagagaccgcttccaagaccctatcacgattcggaattcagccatgttctatatgtctcggtgatgcaaaggaccctgtgtgtcttccctgtgatcatgttcattgtctgcggtgtctgcgcgcatggttcgcttcagagcaaatgatctgcccttattgcctgaccgccttaccagacgaatttagccctgctgtctctcaggcccatagagaggccatcgaaaagcacgcgagattccgccagatgtgcaacagctttttcgttgatctcgtctcaaccatttgcttcaaagataacgcaccaccagagaaggaggttattgagtcactgctcagcctgctgtttgtgcaaaaagggcgtctgcgggatgccgcacagcgtcactgtgaacacacaaagagcctctctcctttcaatgacgttgtcgacaaaacgcccgtgattaggtccgtgattctcaagctgttactgaagtattccttccacgatgtgaaagattatatccaggaatacctcacattactcaagaagaaggcctttattacggaagacaaaacggaactatacatgttattcataaattgtctggaagattccatccttgaaaaaacaagcgcttattccaggaatgatgaactcaaccacctcgaggaagaggggaggttcctgaaagcttactcccctgcgtctcggggacgggaacccgcaaacgaagcttcagtggagtaccttcaggaagtagcacgaatccgtctctgcctggatagggccgcagatttcctgtccgagcccgaaggcggtccagagatggccaaggagaaacagtgttacttacagcaggttaaacagttctgcatcagggtggaaaacgattggcatagggtctacctggtcaggaaactgtcaagtcagcggggaatggagtttgtgcaaggcctgtcaaagccaggtcgaccacatcaatgggttttccccaaagacgtggtgaagcagcagggcctccggcaagatcacccaggtcagatggatagatatctggtgtacggtgatgagtacaaagccctgcgcgacgcagtggctaaagcagtcctggagtgtaaaccgttggggatcaaaaccgccttgaaggcttgcaagacaccacagagccagcaatctgcttacttcctcttgaccctgtttcgggaggttgcaatcctgtataggtcacataacgctagcttgcaccccacgccggaacagtgcgaggccgtttccaaattcatcggagagtgtaaaatcttgagcccacctgacatatctagatttgccacctccctggttgataattccgtgcctctcctgcgcgctggaccaagcgattcaaatctggacggcactgtgaccgagatggcaattcacgccgcagcagtcctcctgtgcggccagaacgagcttctggaacctttgaaaaacctggcattcagccccgctaccatggctcacgcatttctgcccaccatgcccgaagatcttcttgcccaggctcggcgttggaagggtctggaaagagtgcattggtacacctgtcctaacggacatccctgtagtgtgggggaatgtgggcgacccatggagcagagtatatgcatcgactgtcacgcgcctattggaggcatcgaccacaagccgagggatggtttccatctggtcaaggacaaagccgatagaacccagactggacacgtcctgggaaatccacagcgacgggacgtcgtcacatgcgatcgtggactgcctcccgtggtgttcctcttaataaggttgcttacgcacttggctctgcttttaggcgcatcccagtcctcccaagccctcatcaacattattaagccacccgtccgggacccaaaaggctttctccagcaacacatcctgaaagatcttgaacagctcgcgaagatgctgggacactccgctgatgaaacaattggcgtcgtacatttagtactgcgccgattgctgcaggagcagcaccagctcagctcgagaaggctgctaaatttcgatacagaactcagcaccaaagagatgaggaataactgggagaaagaaatcgccgcagtaatttcacctgagctggagcatctagacaaaacgctgccaacgatgaataaccttatcagccaagacaaaagaatctcctcaaatcctgtagctaagataatatatggcgaccccgttacgtttctgccacatcttccccgtaagagcgtcgtgcactgctccaaaatttggtcctgcagaaagagaatcacagtagagtacctacagcacatcgtggagcagaagaatggcaaggagcgcgtgccaattctttggcattttttacagaaagaggccgagttaaggcttgtgaaattccttccggagatcctggctcttcagagggatctggtgaaacagtttcaaaatgtacagcaggtggagtactccagcattaggggttttctcagcaagcattcaagcgacggtctgagacagctcctgcataatcggataacggtttttctcagcacctggaacaagttacgacggagcctggagacaaatggtgaaataaatttgcccaaggactattgtagtacggatctggatcttgacaccgaattcgaaatcctactcccaaggaggaggggtctgggcctctgcgccacggcacttgttagctacctgatccggctacataatgagatcgtgtacgccgttgagaaactgagcaaggagaataattcatactccgtcgatgcggcagaagttacagaattacatgtcatctcctacgaggtcgaacgagatctcacccccttgatcctctccaactgtcagtaccaggtcgaagagggaagagagacagtgcaggaattcgatctggagaagatccaacgacagatcgtgtctagattcttacaggggaaacccagactatctcttaagggaatcccgaccctggtttaccgccatgactggaactatgaacacctgtttatggatataaagaataagatggcccaggattctctcccctccagcgtcatcagtgccatatcgggccagctgcagtcttactctgatgcctgtgaggtgttaagcgtggtggaggtgactttaggcttcttatcaactgcgggaggcgacccaaacatgcagttaaatgtgtatacccaagatatcctgcaaatgggggaccagactatacacgtgctcaaggccctgaataggtgtcagcttaagcacactatcgccctgtggcagtttttaagcgctcacaaaagtgagcagctcctgaggctgcacaaggaaccttttggcgagatcagcagtcgttacaaagctgaccttagcccagagaatgctaagctccttagcacttttctaaaccagacaggattagatgctttccttctggaacttcatgagatgattatcctcaagttgaagaatcctcagacgcagacagaagagagattccggccacaatggtccctgagggatactctcgtctcatacatgcagacaaaggagtctgagatactaccagagatggcctcacagttccctgaggaaatcctgcttgcctcttgcgtttctgtgtggaagaccgctgcagtgctgaagtggaatagggaaatgcgataa

SEQ ID NO: 89524 - DNA, 4796 bp, Artificial Sequence
  derived and/or modified sequence
cagcgcgcggcaggcggcgagctcgggggccgcagaaaatgaaactgaagccgtggtcacgtgacaggacatgtagtatatagcaggctgccagcgactcctgctcttgcttctggatctgcagggcagtcccagcaggacccatggagtgtccttcgtgccagcatgtctccaaggaggaaacccccaagttctgcagccagtgcggagagaggctgcctcctgcagcccccatagcagattctgagaacaataactccacaatggcgtcggcctcggagggtgaaatggagtgtgggcaggagctgaaggaggaagggggcccgtgcttgttcccgggctcagacagttggcaagaaaaccccgaggagccctgttccaaagcctcctggaccgtccaagaaagcaaaaagaagaaaaggaagaagaaaaagaaggggaacaagtccgcttcctcagagctggcttccttgcccctttctcctgccagcccctgtcacctgactttgctttcaaacccgtggcctcaggacacagccctgccccacagccaagcccagcagagtggccccactggccagccgagccagcccccaggcacagccaccacgccactggagggtgacggcctctccgcgcccaccgaggttggcgacagccccctgcaggcccaggctttgggagaggcaggagtggccacaggaagtgaggctcagagcagcccgcaattccaggaccacacggaaggggaggaccaggacgcttccatcccctctgggggcagaggcctgtcccaggaggggaccggtccccccacctctgctggtgaaggccattctaggactgaagatgctgcccaggagctcctgttgcctgagtcaaaaggaggcagctctgagcccgggacagaactgcagaccaccgagcaacaggcaggggcctcagcctctatggcagttgatgctgtagctgagccagccaatgcagttaaaggggccgggaaggaaatgaaagagaagacccagagaatgaaacagccaccagcaaccactcctcctttcaaaacacactgccaggaagctgagaccaagaccaaggacgagatggctgctgctgaagaaaaagtcggtaagaatgaacaaggggagcctgaagacctcaagaagccagaggggaagaacagaagtgcagctgctgtgaaaaacgagaaggagcaaaaaaaccaggaagcagatgtccaggaagtgaaggcaagcacgctgagcccgggtggaggagtcaccgtgttcttccacgccatcatctctcttcatttcccattcaatcctgacctccataaagtcttcatcagaggaggagaagaatttggggagtcaaaatgggacagcaatatctgtgagctgcactacaccagagacttgggtcatgaccgcgttcttgttgaaggcattgtctgcatttccaagaagcacctagataaatacattccttacaagtacgtcatttataatggggaatcttttgagtatgagttcatttacaagcaccagcagaagaagggcgagtacgtcaaccgctgtctgttcataaaatcttcacttctgggctcaggagactggcatcagtactatgacatagtttatatgaagcctcatgggagactccagaaagtcatgaaccacatcacagacgggccgaggaaggacctggtgaaggggaagcagattgccgctgcgctcatgctggacagcaccttcagcatcctgcagacctgggacaccatcaacctgaacagcttcttcacccagttcgagcagttttgctttgtcctgcaacagcctatgatttatgaaggacaggcacagctgtggaccgatttgcagtacagggagaaagaggtgaagagatacctgtggcaacatctgaaaaaacacgtggtaccattgccggacggaaaaagcacggactttttgcctgtggactgcccagtgaggagtaaactgaaaacaggcctgattgtcctttttgtagtggaaaaaattgagcttttattagaaggcagcctggactggttgtgtcacctcctaacctcagatgccagctcaccagatgagtttcaccgtgacctaagccacatccttgggatacctcagagctggcggctgtacctggtgaacctgtgccaaagatgcatggacacaaggacgtacacctggctgggcgccctgcctgtcctgcactgctgtatggagctggccccgcggcacaaggatgcctggagacagcctgaggacacctgggccgctctggagggactctccttctcaccgttccgggaacaaatgctagatacgagttccctacttcagtttatgagagagaagcagcatttgctgagcatagacgagcctctcttccggtcctggtttagtctgctacctctgagtcacctggttatgtatatggaaaacttcattgagcacctgggtcgttttcctgctcatatcctggactgtctttcagggatttactaccggcttccgggacttgagcaagtcttgaatacgcaggatgttcaggatgttcagaacgttcagaacattttagaaatgctgttgcgactcctggacacttaccgggacaagattcccgaggaggccttgtcaccatcctacctgactgtgtgtctgaaactgcatgaagccatctgcagcagcacaaagctacttaagttttacgagctgccagccttatctgccgagattgtctgcagaatgattagacttctatctctggtggattctgcaggacagagagatgaaactggaaataattcagtccaaacagtcttccaagggacccttgctgctacgaaaaggtggctccgagaagtttttacaaagaacatgctcacatcttcaggtgcctcattcacatacgtcaaggaaattgaggtctggaggcggctggtggaaatccaattccccgcggagcatggctggaaggagtcgttgctgggagacatggaatggaggctcacaaaggaggaacccctctcccagatcactgcctactgcaatagttgctgggacaccaaaggcttagaggacagtgtggccaagaccttcgagaaatgcatcattgaagccgtgagctcagcctgccagtctcagaccagtatccttcaggggttctcttactctgatttgcggaaatttggcatcgtcttgtctgctgtgatcactaagtcctggcctaggaccgcggacaacttcaatgacattttaaagcatctgctcacgttggcagatgtcaagcacgtcttcagattgtgtggaaccgacgagaaaatactagcaaatgtcacagaggatgccaagaggctgatagctgttgccgactctgtgttgacgaaagttgttggtgacctcctaagtggcacgattttagttggacaactggagctgattataaagcacaagaatcagtttcttgacatctggcaactgagggaaaaaagtctttcaccccaggatgaacaatgtgctgtggaggaagcactggattggagaagggaggaactgttacttctaaagaaagagaaaagatgtgttgatagtctcctgaagatgtgtgggaacgtgaaacatctgatacaagtggactttggagtgcttgcagtaagacactcacaagacctcagcagtaaaagattaaatgacaccgtgacagtgagactgtccacctcctcgaactcgcagagggcaacgcattaccacctgagctcccaggtccaagaaatggctgggaagatagacttgctcagagacagccacatcttccagctcttctggcgggaagccgcagagccgctgagtgagcctaaggaggaccaggaagccgcagagttgctgagtgagcccgaagaagaatcagaaaggcacatccttgagcttgaagaggtgtatgactatttgtatcagccttcttacagaaagttcattaagttgcaccaggatctaaagtcaggagaggtcacccttgcagagattgatgtcatcttcaaggactttgtgaataaatacacggacctggattcagaacttaagatcatgtgcaccgtggaccaccaggaccaaagagattggatcaaggaccgagtcgaacagatcaaggaataccatcacctgcaccaggctgtccacgcagccaaggtcatcttgcaggtcaaagagagcctgggactgaacggtgacttcagtgttctcaacactttactaaattttactgataacttcgacgactttcgccgtgaaacactggaccagatcaaccaggagctcatccaggccaaaaagctgctccaggacatcagcgaggcccggtgcaaggggctgcaggctctgtccctgagaaaggagttcatctgctgggtccgggaggctcttggaggcatcaatgagctgaaggtgtttgtggacctggcctccatctcagcgggggagaatgacattgatgtggaccgggtggcctgcttccatgacgctgtgcagggctacgcatccctgctatttaagctggaccccagcgtggacttcagtgcattcatgaagcatctgaaaaagctgtggaaggctctggataaggaccagtacctgcccaggaaactggtgagtcttattctgtctctaatgcagattttgttgaatagagcattgcttagcaacgttagggcagtgactgtggaaatggtggcacacctgtgtggtaggtttgtacacagccgttttcaatga

SEQ ID NO: 89525 - DNA, 21055 bp, Artificial Sequence
  derived and/or modified sequence
cagcgcgcggcaggcggcgagctcgggggccgcagaaaatgaaactgaagccgtggtcacgtgacaggacatgtagtatatagcaggctgccagcgactcctgctcttgcttctggatctgcagggcagtcccagcaggacccatggagtgtccttcgtgccagcatgtctccaaggaggaaacccccaagttctgcagccagtgcggagagaggctgcctcctgcagcccccatagcagattctgagaacaataactccacaatggcgtcggcctcggagggtgaaatggagtgtgggcaggagctgaaggaggaagggggcccgtgcttgttcccgggctcagacagttggcaagaaaaccccgaggagccctgttccaaagcctcctggaccgtccaagaaagcaaaaagaagaaaaggaagaagaaaaagaaggggaacaagtccgcttcctcagagctggcttccttgcccctttctcctgccagcccctgtcacctgactttgctttcaaacccgtggcctcaggacacagccctgccccacagccaagcccagcagagtggccccactggccagccgagccagcccccaggcacagccaccacgccactggagggtgacggcctctccgcgcccaccgaggttggcgacagccccctgcaggcccaggctttgggagaggcaggagtggccacaggaagtgaggctcagagcagcccgcaattccaggaccacacggaaggggaggaccaggacgcttccatcccctctgggggcagaggcctgtcccaggaggggaccggtccccccacctctgctggtgaaggccattctaggactgaagatgctgcccaggagctcctgttgcctgagtcaaaaggaggcagctctgagcccgggacagaactgcagaccaccgagcaacaggcaggggcctcagcctctatggcagttgatgctgtagctgagccagccaatgcagttaaaggggccgggaaggaaatgaaagagaagacccagagaatgaaacagccaccagcaaccactcctcctttcaaaacacactgccaggaagctgagaccaagaccaaggacgagatggctgctgctgaagaaaaagtcggtaagaatgaacaaggggagcctgaagacctcaagaagccagaggggaagaacagaagtgcagctgctgtgaaaaacgagaaggagcaaaaaaaccaggaagcagatgtccaggaagtgaaggcaagcacgctgagcccgggtggaggagtcaccgtgttcttccacgccatcatctctcttcatttcccattcaatcctgacctccataaagtcttcatcagaggaggagaagaatttggggagtcaaaatgggacagcaatatctgtgagctgcactacaccagagacttgggtcatgaccgcgttcttgttgaaggcattgtctgcatttccaagaagcacctagataaatacattccttacaagtacgtcatttataatggggaatcttttgagtatgagttcatttacaagcaccagcagaagaagggcgagtacgtcaaccgctgtctgttcataaaatcttcacttctgggctcaggagactggcatcagtactatgacatagtttatatgaagcctcatgggagactccagaaagtcatgaaccacatcacagacgggccgaggaaggacctggtgaaggggaagcagattgccgctgcgctcatgctggacagcaccttcagcatcctgcagacctgggacaccatcaacctgaacagcttcttcacccagttcgagcagttttgctttgtcctgcaacagcctatgatttatgaaggacaggcacagctgtggaccgatttgcagtacagggagaaagaggtgaagagatacctgtggcaacatctgaaaaaacacgtggtaccattgccggacggaaaaagcacggactttttgcctgtggactgcccagtgaggagtaaactgaaaacaggcctgattgtcctttttgtagtggaaaaaattgagcttttattagaaggcagcctggactggttgtgtcacctcctaacctcagatgccagctcaccagatgagtttcaccgtgacctaagccacatccttgggatacctcagagctggcggctgtacctggtgaacctgtgccaaagatgcatggacacaaggacgtacacctggctgggcgccctgcctgtcctgcactgctgtatggagctggccccgcggcacaaggatgcctggagacagcctgaggacacctgggccgctctggagggactctccttctcaccgttccgggaacaaatgctagatacgagttccctacttcagtttatgagagagaagcagcatttgctgagcatagacgagcctctcttccggtcctggtttagtctgctacctctgagtcacctggttatgtatatggaaaacttcattgagcacctgggtcgttttcctgctcatatcctggactgtctttcagggatttactaccggcttccgggacttgagcaagtcttgaatacgcaggatgttcaggatgttcagaacgttcagaacattttagaaatgctgttgcgactcctggacacttaccgggacaagattcccgaggaggccttgtcaccatcctacctgactgtgtgtctgaaactgcatgaagccatctgcagcagcacaaagctacttaagttttacgagctgccagccttatctgccgagattgtctgcagaatgattagacttctatctctggtggattctgcaggacagagagatgaaactggaaataattcagtccaaacagtcttccaagggacccttgctgctacgaaaaggtggctccgagaagtttttacaaagaacatgctcacatcttcaggtgcctcattcacatacgtcaaggaaattgaggtctggaggcggctggtggaaatccaattccccgcggagcatggctggaaggagtcgttgctgggagacatggaatggaggctcacaaaggaggaacccctctcccagatcactgcctactgcaatagttgctgggacaccaaaggcttagaggacagtgtggccaagaccttcgagaaatgcatcattgaagccgtgagctcagcctgccagtctcagaccagtatccttcaggggttctcttactctgatttgcggaaatttggcatcgtcttgtctgctgtgatcactaagtcctggcctaggaccgcggacaacttcaatgacattttaaagcatctgctcacgttggcagatgtcaagcacgtcttcagattgtgtggaaccgacgagaaaatactagcaaatgtcacagaggatgccaagaggctgatagctgttgccgactctgtgttgacgaaagttgttggtgacctcctaagtggcacgattttagttggacaactggagctgattataaagcacaagaatcagtttcttgacatctggcaactgagggaaaaaagtctttcaccccaggatgaacaatgtgctgtggaggaagcactggattggagaagggaggaactgttacttctaaagaaagagaaaagatgtgttgatagtctcctgaagatgtgtgggaacgtgaaacatctgatacaagtggactttggagtgcttgcagtaagacactcacaagacctcagcagtaaaagattaaatgacaccgtgacagtgagactgtccacctcctcgaactcgcagagggcaacgcattaccacctgagctcccaggtccaagaaatggctgggaagatagacttgctcagagacagccacatcttccagctcttctggcgggaagccgcagagccgctgagtgagcctaaggaggaccaggaagccgcagagttgctgagtgagcccgaagaagaatcagaaaggcacatccttgagcttgaagaggtgtatgactatttgtatcagccttcttacagaaagttcattaagttgcaccaggatctaaagtcaggagaggtcacccttgcagagattgatgtcatcttcaaggactttgtgaataaatacacggacctggattcagaacttaagatcatgtgcaccgtggaccaccaggaccaaagagattggatcaaggaccgagtcgaacagatcaaggaataccatcacctgcaccaggctgtccacgcagccaaggtcatcttgcaggtcaaagagagcctgggactgaacggtgacttcagtgttctcaacactttactaaattttactgataacttcgacgactttcgccgtgaaacactggaccagatcaaccaggagctcatccaggccaaaaagctgctccaggacatcagcgaggcccggtgcaaggggctgcaggctctgtccctgagaaaggagttcatctgctgggtccgggaggctcttggaggcatcaatgagctgaaggtgtttgtggacctggcctccatctcagcgggggagaatgacattgatgtggaccgggtggcctgcttccatgacgctgtgcagggctacgcatccctgctatttaagctggaccccagcgtggacttcagtgcattcatgaagcatctgaaaaagctgtggaaggctctggataaggaccagtacctgcccaggaaactgtgtgactccgccaggaacttggaatggctgaagactgtgaatgagagtcatgggtctgtggaacgctcatccctgaccctggccacggccatcaaccaaagaggcatctatgtgatccaggcgcccaaaggtggccaaaagatttccccagacacggttctgcacttgatccttcctgagagccctggcagccacgaggagtcacgagagtactctttagaggaggtgaaggagcttttgaacaagttgatgctgatgtctggcaagaaggatcgtaacaacacggaagtggagaggttttcagaggtcttctgcagtgtgcagaggctcagccaggccttcatcgacctgcactctgctgggaatatgctgttcaggacgtggatcgccatggcctactgctcccccaagcagggtgtgtccctccaaatggactttggcttggacctggtgacggagcttaaagaaggtggagatgtcactgagctgctggcagccctctgcaggcagatggagcacttccttgacagctggaagagatttgtgacccagaagcgaatggagcacttttacctgaacttctacacggcagagcagctggtttacctgagcactgagctcaggaagcagcccccgagtgatgccgccctaacgatgctatccttcatcaaaagcaactgcaccctgagggatgtcttaagggcctctgtggggtgtgggagtgaggccgccaggtaccgcatgaggagagtcatggaagagctcccgctgatgctcttatcagagttcagcctggtggacaagctgaggatcatcatggagcagtccatgaggtgccttcctgccttcctgcccgactgcctcgacctagagacccttggccactgtctggctcacctggcagggatgggtgggtctcccgtggagcgttgtctcccgagaggtctgcaggtcggccagcccaacctcgtcgtctgtggccactccgaggtgttgccagccgccctggctgtctacatgcaaaccccaagccagcccctgcccacttacgatgaggtgctgctctgcaccccggcaaccacctttgaggaggtggcactgttgctgcgccgctgcctgaccctgggctccctggggcacaaggtctacagcctgctgttcgcagatcagctgagctacgaggtggcacgccaagcggaggagcttttccacaatctgtgcacgcagcagcaccgagaagactaccagctcgtcatggtctgtgatggggactgggagcactgctacctcccctctgccttcagccagcacaaggtcttcgtcaccccccaggcacccctcgaggccatccaagcctacctggcaggtcactaccgggtcccgaagcagaccctgtcggcggcagccgtgttcaatgaccggctgtgtgttgggatcgtggcctcggagcgagcaggtgttggaaagtctctgtacgtgaagaggttgcacgacaaaatgaagatgcagttaaacgtgaaaaatgtgcctctgaaaacaattcgactgatcgaccctcaggtggatgagagccgagtcctgggcgccctgctgcccttcctggatgcgcagtatcagaaggtccccgtgctctttcacctggacgtgacctcctcagtgcagactggaatttgggtgtttcttttcaagctcctcattttacaatacttaatggatataaatgggaaaatgtggcttcggaacccctgccatttgtatatcgttgaaatcctggaaaggaggacgtcagtgccgtcgaggagctcttcagcgctgcgtacacgtgtaccccagttcagttttcttgacatcttcccaaaagtcacctgcaggcctcccaaagaggtgatagacatggagctgagtgccctgaggagtgacacagagcctgggatggatctgtgggagttctgcagcgaaactttccaaagaccttaccagtatttaagacgattcaatcaaaaccaagacctagacacgtttcagtatcaagaaggctctgtcgaaggcaccccggaggaatgcctccagcatttcctgtttcactgcggggtaataaacccatcctggtcagagcttcggaactttgctcggttcctgaattatcagctcagagattgtgaggcctctctcttctgcaatccgagttttattggcgacacactgaggggcttcaagaagttcgtggtgaccttcatgatctttatggcaagagattttgccacaccatcactccacacctctgaccaaagcccggggaagcacatggtcaccatggatggggttagggaagaagatctagcgcccttctccctccggaagaggtgggagtcggagcctcacccatacgttttcttcaatgacgaccacacaaccatgacattcatcggcttccatctgcagcccaacatcaacggcagtgtcgatgccatcagtcacttgactgggaaggtcatcaagagagacgtcatgaccagggacctgtaccagggcctgctgctccagagggtgcccttcaatgtcgactttgataaactgcccagacacaagaaacttgagaggctctgcctgaccttagggatcccccaggccaccgaccccgacaaaacgtatgagctcacaaccgacaatatgcttaaaatccttgccatcgagatgcggttccggtgtgggatcccggttatcatcatgggagaaactggctgtgggaaaaccaggcttattaaattccttagcgacctgcggcgtggtggtaccaatgctgacaccataaagctggtcaaggtgcacggaggaacaactgcagacatgatctactccagagtcagggaggctgaaaatgtggccttcgccaataaggaccaacatcagttggacaccatcttgttttttgatgaagccaacacaacggaagctataagctgtatcaaagaagtcctgtgtgatcatatggtggatggccagcctctggctgaggactctggcctgcatattatagctgcctgcaatccataccggaagcactctgaggagatgatctgccgtttggagtcagctggtttgggctacagggttagtatggaggagacggccgacaggctgggctccattcctctgaggcagctggtataccgggtccatgctctgcccccgagcctgattcctctggtgtgggactttggacaactgagtgacgttgctgaaaagctctacatccagcagattgtccagagactggttgagtccatcagcctagatgaaaacgggactcgcgtgatcacagaagtcctctgcgcctctcagggtttcatgaggaaaacagaagatgagtgcagctttgtcagcctcagggacgtggagcgctgtgtgaaagttttcaggtggttccacgagcacagcgcgatgctcttagcgcagctgaatgcctttctctccaagtccagcgtcagcaaaaatcacaccgagagagatcccgtcctctggtcgttgatgctggccatcggggtgtgttaccatgcctctttagaaaagaaagactcatatcggaaagccatcgccaggttctttccgaaaccgtatgacgacagcaggctgcttctggatgaaataacacgggcacaggatctttttctggacggcgtacctctgaggaaaaccatcgccaagaacttggccttgaaggagaacgtcttcatgatggtcgtctgcatcgagctgaagattcccctcttcctggtggggaagcccggcagctccaagtctctcgccaagaccatcgtggcagacgccatgcagggcccggctgcctactcagatctcttccgcagcctgaagcaggtccacctggtgtccttccagtgcagcccgcactccaccccacagggcatcatcagcaccttccggcagtgcgcccgctttcagcaggggaaggacctgcagcagtacgtctctgtggtggtgttagatgaggtggggctggcggaagactcacccaaaatgcccctgaagactctgcacccgctgctggaagacggatgcattgaagacgatcccgccccccacaaaaaggtcggcttcgtgggcatctccaactgggcccttgaccctgccaagatgaaccggggcatttttgtgtcacgtggcagccccaacgagacagagctcatagagagcgccaagggcatctgctcctcagacatcctcgtccaggaccgagtccaagggtactttgcgtcctttgccaaagcctacgaaacggtgtgtaagcgccaggacaaggaattcttcgggcttcgtgactactacagcctcatcaaaatggtctttgctgcagcaaaggcttcaaatagaaagccttccccgcaagacattgcacaggctgtccttaggaacttcagtggcaaggatgacatccaagctttggacatctttctggccaatttgcccgaggccaagtgctcagaggaagtcagccccatgcagctgatcaaacagaacatctttgggccttctcagaaggtgccgggtggagagcaggaagatgctgagtcccgctacttactcgtgctgaccaaaaactacgtggcactgcagatcctgcagcagacattcttcgagggggaccagcagccggagattatttttggttctggtttccccaaggaccaagagtacacccagctctgcagaaacatcaatcgtgtgaagatctgcatggaaacaggcaagatggtgttgcttctcaacctgcagaacctctacgagagcctctacgacgcactcaaccagtactacgtccacctcggcggccagaagtacgtggacctcggtctggggacccaccgcgtcaaatgtcgggttcaccccaacttccgcctgattgtcattgaagagaaagacgtcgtgtacaaacactttcccatccccctcattaaccggctggagaagcactatctggatatcaacacggtgctggagaaatggcagaagagcatcgtggaggagctctgtgcgtgggtggagaagttcatcaatgtcaaagcacatcatttccagaagaggcacaaatacagcccctctgacgtcttcatcggctaccactcggacgcctgcgcgtctgtggtgctgcaggtcatagagaggcagggtccccgggccttgacggaggaacttcaccagaaggtgtctgaggaggccaaatcgatcctgctgaactgcgctacgcccgatgccgtggtccggctgagcgcctactcgctgggcgggttcgcagcggagtggctgtcgcaggagtactttcacagacagaggcacaactcctttgcagatttccttcaggcacacctgcacacggcagacctggagcgccacgccatcttcacagagatcaccactttctccaggctgctaacaagtcacgactgtgaaattttagaatcagaggtcacaggcagggctccgaaacccacactcctgtggctgcagcagtttgacaccgagtactcattcctcaaagaagtccgaaactgtttaacgaatacagccaaatgtaaaatcctcatttttcagacagattttgaagatggaatccgtagcgcccagctcattgcctcagctaagtattctgttataaatgaaatcaacaaaatacgagaaaatgaggaccgtatcttcgtctatttcatcacaaaactgtcccgggtgggaagaggaacagcctatgtgggcttccacggagggctgtggcagtctgtccacatcgatgacctccggagatccaccctcatggtttctgatgtgaccaggctgcagcatgtcaccatcagccagctgttcgcgcccggagacttgcctgagctgggcttggaacaccgggcggaagacggccatgaggaggcgatggagacggaggccagcacatcaggggaggtggcagaggtggcagaggaggccatggaaacagaaagttctgagaaggtgggaaaggaaacctctgaactcggaggcagtgatgtgtcgatcctggacaccaccaggctgctgagaagctgtgtgcagagcgccgtgggcatgctcagagaccagaacgagagctgcacgcgcaatatgcggagggtggtgctcctcctgggcctcttgaatgaggatgacgcgtgccacgcctctttcttgcgggtatccaagatgcgcctcagtgtctttttaaagaagcaagaagagagccagtttcaccctctggagtggttggcaagggaagcctgcaaccaggacgctctccaggaggcgggcacattcaggcacaccctctggaagcgggtccaaggtgctgtcacccctctgctggcgagcatgatatcattcatcgacagagacggcaacctagagttactgaccaggccagatactccgccctgggcaagagatctttggatgtttattttcagtgacacgatgcttctgaacattcctcttgtgatgaataatgaaagacataaaggtgagatggcctacatcgtggtgcagaaccacatgaacctttccgagaacgcttccaacaacgtccctttcagctggaaaatcaaggactatctggaggagctgtgggtccaggctcagtacatcacagacgcagaaggactgcccaagaagttcgtggacatctttcagcagactcctctgggcaggtttcttgcccagctccatggagagccgcagcaggaacttcttcagtgttacttgaaggatttcattctcttgaccatgcgtgtgtcaacggaggaggaattaaagtttctgcagatggctctgtggtcctgcactaggaaactgaaagcggcgtcagaagcgcccgaggaagaggtttccttaccgtgggtgcaccttgcctaccagcgtttcagaagccgtctgcagaacttttccagaatcctgaccatctaccctcaggttctccacagcctgatggaagcccgttggaaccatgagctggctggatgtgagatgaccctggacgcatttgccgcaatggcctgcacggagatgctgacaagaaacaccctgaagcccagtccccaggcgtggctacagttggtgaagaatctttccatgccgctggagctcatctgctccgatgagcacatgcaaggcagcgggagcctggcccaggctgtcatcagggaagtcagagcccagtggagtcggattttctccaccgcactcttcgtggagcacgtgctcctaggaaccgagagccgcgtccccgagttacaggggctggtgaccgagcacgtcttcttactagacaagtgtcttcgagagaactctgacgtgaagacgcacgggccttttgaggccgtgatgcgcactctctgtgaatgcaaggagacagccagcaagaccctcagcaggtttgggattcagccgtgctccatctgcctgggagatgcaaaggaccccgtctgtctgccctgcgaccacgtgcactgcctgcgctgcctcagggcctggtttgcctcagagcagatgatatgcccctactgtttaactgccttgccagacgaattctctccagctgtttcccaagcgcacagggaagccattgaaaagcatgcccgcttccggcagatgtgcaacagtttcttcgtagacctggtgtccaccatttgcttcaaggacaacgctccgcctgagaaggaagtgattgagagcctgctctctctcctcttcgtccaaaaggggcgcttaagagatgctgcccagagacactgtgaacacacaaaatctctctctccattcaatgatgttgtggataagactcctgtcatccgctcagtgatactgaaactgcttttgaagtacagctttcatgatgtaaaagattatattcaggaatatttgaccctgttaaaaaagaaagcattcataactgaagataaaactgaactgtacatgctcttcatcaactgcctggaggattcaatacttgagaagaccagtgcttactccagaaatgatgaactgaaccacctagaagaggaaggtcgtttccttaaggcatattctccagcaagccggggccgagagcctgccaacgaggcctcggttgaatacctgcaagaggtggcccggatccgcctctgcctcgacagagctgcagatttcctctcggagcctgagggaggcccagagatggccaaggagaagcagtgctacctgcagcaagtcaagcagttctgtatccgggtggagaacgactggcaccgggtgtacctggtgcggaagctcagcagccagcgggggatggagttcgtgcagggcctctccaagcccggccgcccgcaccagtgggtgtttcccaaggacgttgtcaagcagcaggggctgcggcaggaccacccaggccagatggataggtacctggtgtacggcgatgaatacaaggctctccgtgatgctgtggccaaagctgtcctcgagtgcaagccactgggcattaagactgctctgaaggcctgcaagaccccccaaagccagcagtcagcctacttcctgttaacactgtttagagaggtggctattttgtacagatcccacaatgcaagcctccaccccacgccagagcaatgtgaagctgtgagcaaattcattggcgaatgcaagatcctttcacctcctgatatcagccgttttgcaacatcgctcgtggacaattctgtgccattgttgagggcggggcctagtgacagcaaccttgatggaacggtgacagaaatggccattcatgctgcagccgtccttctgtgtggacagaatgaactcttggagcccctaaagaatctggccttctccccagccaccatggcgcatgcttttcttccaaccatgcctgaagacttgctggctcaagctcggaggtggaagggtctggagcgagtccactggtacacttgtcccaacggccatccttgctccgtgggagagtgtggcaggccgatggaacagagcatctgcattgactgccatgcgccgattggaggcattgaccacaaacctcgggacggctttcatctggtcaaagacaaggcagacagaacgcagaccggccacgtgctgggcaacccgcagcggagagacgtggtgacatgtgaccgagggctgcccccagtggtcttcctccttatccggctactcactcacttggctctgcttctgggagcgtcccagagttcccaggctctgataaacatcattaagcctccagtgagggatccaaaaggctttctgcagcagcacatcctgaaggacctggagcagttggccaagatgctgggacacagtgccgacgagaccatcggcgtggtccacctcgtcctgcgcaggcttctccaagagcagcaccagctctctagcagaaggcttttaaattttgacacagaattgtcaactaaagaaatgaggaacaactgggaaaaggaaatcgcagctgtgatttctcctgaactggagcatctagataaaacccttcccaccatgaataatctcatcagccaagataagcgtatcagctctaaccctgtggccaaaataatatatggtgacccagtgaccttcctgccccacctgccccggaaaagtgtggtccattgctctaagatttggagctgcaggaaaagaattacagttgagtacctccagcacattgtggaacagaaaaatggcaaagaaagagtgcccatcctctggcatttcctgcagaaggaagcagagctgaggctggtaaagttcctgcctgagattttggccttgcaaagggatctagtgaagcagttccagaacgtccagcaagttgaatacagctccatcagaggcttcctcagcaagcacagctcagatgggttgaggcagctgcttcacaacaggatcacagtctttctgtccacatggaacaaactgaggagatcgcttgagacgaacggtgagatcaacctacccaaagactactgcagcactgacttggatctggacactgagtttgagatcctcttgccacgccgacggggcctgggcctctgtgctaccgctctcgtcagctacttgattcgcctacacaatgaaattgtctacgccgtggaaaaactctccaaggaaaacaacagctattccgtggatgccgccgaggtcactgaactgcatgtcatcagttatgaagtggagcgggacctgactccactgattctctccaactgccagtaccaggtggaggagggcagagagaccgtgcaggagttcgatctggagaagattcagcggcagatcgtcagccgcttcctccagggcaagccccggctgagcctcaagggaatacccactctggtgtacagacacgactggaactatgaacatctctttatggacatcaagaacaaaatggcacaggactccctccccagctcggtcattagtgccatcagtggacagctgcagtcctacagcgatgcctgtgaagtgctgtctgtcgtagaagtcactctggggtttctgagcacagctggtggggatccaaacatgcagctgaatgtgtatactcaagacatcctgcaaatgggtgatcagacgattcacgtgttaaaggccttaaacagatgccagttaaaacacaccattgccctctggcagttcctgtctgctcataagtctgaacagctgctgcggctgcacaaagagccatttggggaaatcagttcaaggtacaaagcggatctgagcccggaaaatgctaagctcctcagcacattcctaaatcagactggcctagacgccttcctgctagagctgcacgaaatgataatcttgaaactaaagaacccccaaacccaaaccgaggagcgcttccgccctcagtggagcctgagagacactctcgtaagttacatgcaaactaaagaaagtgaaattcttcctgaaatggcatctcagttcccagaagagatactgctcgccagctgtgtctcagtgtggaaaacagctgctgtgctgaaatggaatcgagaaatgagatagaattatttcctcagctatctttggatgactttggagagaagactcctctctcctcgtctgcggcgtggacttgatcatggactggtgcctttgcattcagaaggagagctgtcagcgtagcaccgaattcaagaccaaggcgtgctacctgagctgacagctttttgaaagccgagctgtttctgaaccatgtacatacatgttctgaaactttctcatcattttatgagtactgttcattgagagatgacaatgaagattagatgaaattggaaataaaccaacattgtttacattccaggagacttgtagctcagccacacacgcagtaatgacctgtgcccgttcgcctctggcactgcccacccctctttttttttttcttctaattctgtactcacaaaagagaatctcattttcttctttcttccattcccttaaattctgagtactgtacatatatttctgggttcccacgatgatgtgaaaaactaccagactgttttttgtcttctcacaaagacaagaaaaatcagggcattttgtgagtgccttaagatcaaactaacaagatctgaccctctcccctcacagtgagccactgccccacttcagagggtaagagccaaaagcctcattgtgaaaggcactggacttggaccagggacaccatcagggccttggttttctcacgcataaaatggagagtggattaatcgccaaagattcttctgatctgacattttgaaattgtgagagaaactagatgactgtaaacttggtcacaggcctggttctggcagttctttgcggacttttttctagcattatgccaaataaacatgcagtctcagtgtgctctcgcatgtatgaatatctagtcctttctgtggttctcagccaagacataaaaactaggactcagagcacatacaaaaccagttatgtttcggaaagagggaaaagagtccccgagcccggatcttgtgctgcttttctcactgacgtgttgccttttttctttacaaaatctgctttgatacttaggacctctctggactaatttctcttcctagacagctcagcacagctattgatatgttagaggcagtatccttaatattcattctaaatgagttaacgacttaacttgaaattgggcctaaggagtgagaactacaaaaatacaaaatgcttgtccaggactcagccatgcacaccttgagcagcgccggcaggaggcacggaaggaactgtgctccgttctcctcactgtcatggtgccaccagtgtctgatgaagggcagagtgacccagactgcaggcagtaactgacttcacacagtccctggcatttagtcatctgtgattgttttatcactctggactgtgcagagccacctgccaccgagatctgcattccgactgcctatgaacgggtgtgggggccgggggctggcttgctgaagtcttcaacttgcactcggagctcctttgatacctcagagctggctgtcaggtggcagctcacacccagactcactggccacacctcagcagggggggagtcgagtgtcagtctctttctgtgaaggctttttttttcctttggcctgggaatttttcccatttttatgaaggggttttaaattgtttcattttgtgtgctgtgcttcaaagccttaactgtcaaatcttgcattatcttgtttgtacagaaatatactggcctagcagaggcaaaaaaaaaaaaaatgaattttattttacttgtcacacctgtcttaataaactggagttttgctgctaaagaactcttctctctgggggcagagcttctatttatggcacatagacatcagctaggcttttgggaatcgtttgtgttctttgtggaaatgtcctttagaagcacccatgaagtagtgtgttcagactgtgcacacagaaaacaggctctgccttcacatgtgagacggtggacttttcctctggacaaaatgacagcatcctggcgactccacagtggagctgagcgccactccctgtagccgatctgggactgaaacgcttacacctctgcctcagaaggagtcccccatgccctgcctgaaatgacttcactggacacagcggggctgcagctaacggggtacaggtaggagctaactaacttcacccctgagtccacttgcggggtaagagataaacagtaacccttccaggagcccactgacgttggagtgctaaaaatgccccttcagggggaaaactgcattttctcttccaaaaaggaaaggttcttccaggcgagaaacctgtggtctagaaccacagcaagaagaggaggcatgctggcctgcaccggaagactcactttgtctgccctgcgccagcctcacctcaccctgcagttcccgtttccgccatggatgcctcatcaccaaccctgaccttccccctcccaaccctttattcatcctcactcccactcatacccgcctccctggacagttccctgctgcagagttctttctgctttcagccctaccttggtggtgatttacctgaaaatcttcacaactgatcattatctccttctctttgagacctgactgaaaaaattaggtgtgcacacctgtaatcccagctacctgggaggctgaggtatgaggattgcttgagcctgggagtttgaggctgcagtgagctatgattgcaccactgcactccaacctgggtgacagagtgagaccctgtctcaaaaaaaaataaaataaggaccttattgtgtgtgcaaattatttgcctttcatgaatagttatgagactttgtgcatgtgttaaccgagacggccctgagctatttcagttactcctgtatgttcaggcaattccaatttagaaacaaacttccagtgataaatattgggaagaaaatgtcagctcagggccaagtaggtaaagccacccaagtctagccatgcacacaggcactagtgtgctgaaggaaaacacctctgatttgatacataaagtgtgaaggttgcataactggggaggtggctggagaaaacctgagcctcgagctgagtaacaatccaagccatgattagcatttatattgcattctgcattattctcatcctatcacgttcattaagttcaaccattaccattacgaatcccgtttccagctggaaaaacaagcgccaggaaagtgcatttcccccccaccccccccccccaaccagagcaactttggtcagaagtcacacctaatcaccctctctgcaggatatgctggggatagcccttttgaggaggtgggggtgtatgcgaaagcaacctggggccaaagcagggggaagcaggagagactggaggggccctgggtccagcaagtgctccaccaggctgcccctgctcaggtgctccacagcccataaaaaacgccttcagccctgctgtgcttcccctcacacctaaacttactataagggtcctaccttccccagtattccttcatgatcactgctacctgtgccctgaagcgcaacagaacctcaacccagaggacagccacttcctcagaacccacgatctttgccccatcgccacaggtccatgagtgactcctaattaccaaatccaagggctccttcaccctgaccactctggaacccaacaaagctgacacacagcccagcccagacaggcctgaatgtgggtcctggctctcccatttgccagttctacagccatgggcaagtggctcgacctctctaagcttcagtttcctcgtctgtgaaatatctgtcagtgctcttaagggaggagaccaccccacatattgtcttacgcccaatttctgcctccaaagagagaagtaaaaactaaaaggcagaaatgaaatccacaagcagacagcctgcaccacaccctgggcctggtagttaaagatcgacgcctgacctaatcagtgatgctatctatagattacagacattatatagaaaagcaccgtgaaaatccctgtcctgttctgttccgttctaattacgggtgcatgcagcccccagtcacgtaccccctgcttgctcaatcaatcacgaccctctcacgcagaccccttaagagttgtgagcccttaaaagggacaggaattgctcactcggggagctcagttgttggagacatgagtcttgccgaagcgcccggctgaataaagcccttctttaactcgtgtctgaggggttttctctgcagcttgtcctgctacatttcttggttccctgaccaggaatctaggtgattaatggatggttgaggcagcccctcagacggcttaggcctgccctgtggagcatccctgtggaggactccagccagcttgagcgacatggatcctgagagcgctctcaggcaggcaattgccccagtggaatgcctggccagagcagtgtgtagcaggcccccgaggaggatcaacgcagtggctgaacaccgggaaggaactgccacttggagtccagacatctgaaacttggtaagactggtctttggaacttgcccactccatttgaggggaagcgtggcctgatcacccacggcgtgcctgtactggcactctggtttttgtttttgacttgacttggattgcttgatactttggttttggttttgacctgacttggatatcctgatactctgattttggttttgattttggtttggtgtaaactgtaaaagtgtgtgtgtgccctttttacctgttctttgttttgtggtatgcgtgtagggtgagcgtaatgttttgtcttgaagaagcatgggtcaagcacaaagtaagaccaccccactaggaactatgctgaaaaatttcaggaaaggatttaagggagactatggagtactatgacaccaggaaaacttaaaactttgtgtaagatagactggccagcattagaggtaggttggccatcagagtgaagcctggacaggtcccttgtttcaaaggtatggcacaaggtaacctgtaagccagggtacccacaccagttcccgtacacagacacttggttacagctggttttagactccccacccgcccgccccaacagtggttgagagaacagcagcataagtggctggcagaggcaaggaaagaccagcagagagagaaagaggaagagacagacaaagagggagtcagagagagagagagaaagagacagaggcaaaaggaaagtcaaagagaaagagacagaaaatcaagaggaaaaaaa

SEQ ID NO: 89526 - DNA, 4653 bp, Artificial Sequence
  derived and/or modified sequence
atggagtgccccagctgccagcacgtgagcaaggaggagacccccaagttctgcagccagtgcggcgagagactgccccccgccgcccccatcgccgacagcgagaacaacaacagcaccatggccagcgccagcgagggcgagatggagtgcggccaggagctgaaggaggagggcggcccctgcctgttccccggcagcgacagctggcaggagaaccccgaggagccctgcagcaaggccagctggaccgtgcaggagagcaagaagaagaagagaaagaagaagaagaagggcaacaagagcgccagcagcgagctggccagcctgcccctgagccccgccagcccctgccacctgaccctgctgagcaacccctggccccaggacaccgccctgccccacagccaggcccagcagagcggccccaccggccagcccagccagccccccggcaccgccaccacccccctggagggcgacggcctgagcgcccccaccgaggtgggcgacagccccctgcaggcccaggccctgggcgaggccggcgtggccaccggcagcgaggcccagagcagcccccagttccaggaccacaccgagggcgaggaccaggacgccagcatccccagcggcggcagaggcctgagccaggagggcaccggcccccccaccagcgccggcgagggccacagcagaaccgaggacgccgcccaggagctgctgctgcccgagagcaagggcggcagcagcgagcccggcaccgagctgcagaccaccgagcagcaggccggcgccagcgccagcatggccgtggacgccgtggccgagcccgccaacgccgtgaagggcgccggcaaggagatgaaggagaagacccagagaatgaagcagccccccgccaccaccccccccttcaagacccactgccaggaggccgagaccaagaccaaggacgagatggccgccgccgaggagaaggtgggcaagaacgagcagggcgagcccgaggacctgaagaagcccgagggcaagaacagaagcgccgccgccgtgaagaacgagaaggagcagaagaaccaggaggccgacgtgcaggaggtgaaggccagcaccctgagccccggcggcggcgtgaccgtgttcttccacgccatcatcagcctgcacttccccttcaaccccgacctgcacaaggtgttcatcagaggcggcgaggagttcggcgagagcaagtgggacagcaacatctgcgagctgcactacaccagagacctgggccacgacagagtgctggtggagggcatcgtgtgcatcagcaagaagcacctggacaagtacatcccctacaagtacgtgatctacaacggcgagagcttcgagtacgagttcatctacaagcaccagcagaagaagggcgagtacgtgaacagatgcctgttcatcaagagcagcctgctgggcagcggcgactggcaccagtactacgacatcgtgtacatgaagccccacggcagactgcagaaggtgatgaaccacatcaccgacggccccagaaaggacctggtgaagggcaagcagatcgccgccgccctgatgctggacagcaccttcagcatcctgcagacctgggacaccatcaacctgaacagcttcttcacccagttcgagcagttctgcttcgtgctgcagcagcccatgatctacgagggccaggcccagctgtggaccgacctgcagtacagagagaaggaggtgaagagatacctgtggcagcacctgaagaagcacgtggtgcccctgcccgacggcaagagcaccgacttcctgcccgtggactgccccgtgagaagcaagctgaagaccggcctgatcgtgctgttcgtggtggagaagatcgagctgctgctggagggcagcctggactggctgtgccacctgctgaccagcgacgccagcagccccgacgagttccacagagacctgagccacatcctgggcatcccccagagctggagactgtacctggtgaacctgtgccagagatgcatggacaccagaacctacacctggctgggcgccctgcccgtgctgcactgctgcatggagctggcccccagacacaaggacgcctggagacagcccgaggacacctgggccgccctggagggcctgagcttcagccccttcagagagcagatgctggacaccagcagcctgctgcagttcatgagagagaagcagcacctgctgagcatcgacgagcccctgttcagaagctggttcagcctgctgcccctgagccacctggtgatgtacatggagaacttcatcgagcacctgggcagattccccgcccacatcctggactgcctgagcggcatctactacagactgcccggcctggagcaggtgctgaacacccaggacgtgcaggacgtgcagaacgtgcagaacatcctggagatgctgctgagactgctggacacctacagagacaagatccccgaggaggccctgagccccagctacctgaccgtgtgcctgaagctgcacgaggccatctgcagcagcaccaagctgctgaagttctacgagctgcccgccctgagcgccgagatcgtgtgcagaatgatcagactgctgagcctggtggacagcgccggccagagagacgagaccggcaacaacagcgtgcagaccgtgttccagggcaccctggccgccaccaagagatggctgagagaggtgttcaccaagaacatgctgaccagcagcggcgccagcttcacctacgtgaaggagatcgaggtgtggagaagactggtggagatccagttccccgccgagcacggctggaaggagagcctgctgggcgacatggagtggagactgaccaaggaggagcccctgagccagatcaccgcctactgcaacagctgctgggacaccaagggcctggaggacagcgtggccaagaccttcgagaagtgcatcatcgaggccgtgagcagcgcctgccagagccagaccagcatcctgcagggcttcagctacagcgacctgagaaagttcggcatcgtgctgagcgccgtgatcaccaagagctggcccagaaccgccgacaacttcaacgacatcctgaagcacctgctgaccctggccgacgtgaagcacgtgttcagactgtgcggcaccgacgagaagatcctggccaacgtgaccgaggacgccaagagactgatcgccgtggccgacagcgtgctgaccaaggtggtgggcgacctgctgagcggcaccatcctggtgggccagctggagctgatcatcaagcacaagaaccagttcctggacatctggcagctgagagagaagagcctgagcccccaggacgagcagtgcgccgtggaggaggccctggactggagaagagaggagctgctgctgctgaagaaggagaagagatgcgtggacagcctgctgaagatgtgcggcaacgtgaagcacctgatccaggtggacttcggcgtgctggccgtgagacacagccaggacctgagcagcaagagactgaacgacaccgtgaccgtgagactgagcaccagcagcaacagccagagagccacccactaccacctgagcagccaggtgcaggagatggccggcaagatcgacctgctgagagacagccacatcttccagctgttctggagagaggccgccgagcccctgagcgagcccaaggaggaccaggaggccgccgagctgctgagcgagcccgaggaggagagcgagagacacatcctggagctggaggaggtgtacgactacctgtaccagcccagctacagaaagttcatcaagctgcaccaggacctgaagagcggcgaggtgaccctggccgagatcgacgtgatcttcaaggacttcgtgaacaagtacaccgacctggacagcgagctgaagatcatgtgcaccgtggaccaccaggaccagagagactggatcaaggacagagtggagcagatcaaggagtaccaccacctgcaccaggccgtgcacgccgccaaggtgatcctgcaggtgaaggagagcctgggcctgaacggcgacttcagcgtgctgaacaccctgctgaacttcaccgacaacttcgacgacttcagaagagagaccctggaccagatcaaccaggagctgatccaggccaagaagctgctgcaggacatcagcgaggccagatgcaagggcctgcaggccctgagcctgagaaaggagttcatctgctgggtgagagaggccctgggcggcatcaacgagctgaaggtgttcgtggacctggccagcatcagcgccggcgagaacgacatcgacgtggacagagtggcctgcttccacgacgccgtgcagggctacgccagcctgctgttcaagctggaccccagcgtggacttcagcgccttcatgaagcacctgaagaagctgtggaaggccctggacaaggaccagtacctgcccagaaagctggtgagcctgatcctgagcctgatgcagatcctgctgaacagagccctgctgagcaacgtgagagccgtgaccgtggagatggtggcccacctgtgcggcagattcgtgcacagcagattccagtag

SEQ ID NO: 89527 - DNA, 15624 bp, Artificial Sequence
  derived and/or modified sequence
atggagtgccccagctgccagcacgtgagcaaggaggagacccccaagttctgcagccagtgcggcgagagactgccccccgccgcccccatcgccgacagcgagaacaacaacagcaccatggccagcgccagcgagggcgagatggagtgcggccaggagctgaaggaggagggcggcccctgcctgttccccggcagcgacagctggcaggagaaccccgaggagccctgcagcaaggccagctggaccgtgcaggagagcaagaagaagaagagaaagaagaagaagaagggcaacaagagcgccagcagcgagctggccagcctgcccctgagccccgccagcccctgccacctgaccctgctgagcaacccctggccccaggacaccgccctgccccacagccaggcccagcagagcggccccaccggccagcccagccagccccccggcaccgccaccacccccctggagggcgacggcctgagcgcccccaccgaggtgggcgacagccccctgcaggcccaggccctgggcgaggccggcgtggccaccggcagcgaggcccagagcagcccccagttccaggaccacaccgagggcgaggaccaggacgccagcatccccagcggcggcagaggcctgagccaggagggcaccggcccccccaccagcgccggcgagggccacagcagaaccgaggacgccgcccaggagctgctgctgcccgagagcaagggcggcagcagcgagcccggcaccgagctgcagaccaccgagcagcaggccggcgccagcgccagcatggccgtggacgccgtggccgagcccgccaacgccgtgaagggcgccggcaaggagatgaaggagaagacccagagaatgaagcagccccccgccaccaccccccccttcaagacccactgccaggaggccgagaccaagaccaaggacgagatggccgccgccgaggagaaggtgggcaagaacgagcagggcgagcccgaggacctgaagaagcccgagggcaagaacagaagcgccgccgccgtgaagaacgagaaggagcagaagaaccaggaggccgacgtgcaggaggtgaaggccagcaccctgagccccggcggcggcgtgaccgtgttcttccacgccatcatcagcctgcacttccccttcaaccccgacctgcacaaggtgttcatcagaggcggcgaggagttcggcgagagcaagtgggacagcaacatctgcgagctgcactacaccagagacctgggccacgacagagtgctggtggagggcatcgtgtgcatcagcaagaagcacctggacaagtacatcccctacaagtacgtgatctacaacggcgagagcttcgagtacgagttcatctacaagcaccagcagaagaagggcgagtacgtgaacagatgcctgttcatcaagagcagcctgctgggcagcggcgactggcaccagtactacgacatcgtgtacatgaagccccacggcagactgcagaaggtgatgaaccacatcaccgacggccccagaaaggacctggtgaagggcaagcagatcgccgccgccctgatgctggacagcaccttcagcatcctgcagacctgggacaccatcaacctgaacagcttcttcacccagttcgagcagttctgcttcgtgctgcagcagcccatgatctacgagggccaggcccagctgtggaccgacctgcagtacagagagaaggaggtgaagagatacctgtggcagcacctgaagaagcacgtggtgcccctgcccgacggcaagagcaccgacttcctgcccgtggactgccccgtgagaagcaagctgaagaccggcctgatcgtgctgttcgtggtggagaagatcgagctgctgctggagggcagcctggactggctgtgccacctgctgaccagcgacgccagcagccccgacgagttccacagagacctgagccacatcctgggcatcccccagagctggagactgtacctggtgaacctgtgccagagatgcatggacaccagaacctacacctggctgggcgccctgcccgtgctgcactgctgcatggagctggcccccagacacaaggacgcctggagacagcccgaggacacctgggccgccctggagggcctgagcttcagccccttcagagagcagatgctggacaccagcagcctgctgcagttcatgagagagaagcagcacctgctgagcatcgacgagcccctgttcagaagctggttcagcctgctgcccctgagccacctggtgatgtacatggagaacttcatcgagcacctgggcagattccccgcccacatcctggactgcctgagcggcatctactacagactgcccggcctggagcaggtgctgaacacccaggacgtgcaggacgtgcagaacgtgcagaacatcctggagatgctgctgagactgctggacacctacagagacaagatccccgaggaggccctgagccccagctacctgaccgtgtgcctgaagctgcacgaggccatctgcagcagcaccaagctgctgaagttctacgagctgcccgccctgagcgccgagatcgtgtgcagaatgatcagactgctgagcctggtggacagcgccggccagagagacgagaccggcaacaacagcgtgcagaccgtgttccagggcaccctggccgccaccaagagatggctgagagaggtgttcaccaagaacatgctgaccagcagcggcgccagcttcacctacgtgaaggagatcgaggtgtggagaagactggtggagatccagttccccgccgagcacggctggaaggagagcctgctgggcgacatggagtggagactgaccaaggaggagcccctgagccagatcaccgcctactgcaacagctgctgggacaccaagggcctggaggacagcgtggccaagaccttcgagaagtgcatcatcgaggccgtgagcagcgcctgccagagccagaccagcatcctgcagggcttcagctacagcgacctgagaaagttcggcatcgtgctgagcgccgtgatcaccaagagctggcccagaaccgccgacaacttcaacgacatcctgaagcacctgctgaccctggccgacgtgaagcacgtgttcagactgtgcggcaccgacgagaagatcctggccaacgtgaccgaggacgccaagagactgatcgccgtggccgacagcgtgctgaccaaggtggtgggcgacctgctgagcggcaccatcctggtgggccagctggagctgatcatcaagcacaagaaccagttcctggacatctggcagctgagagagaagagcctgagcccccaggacgagcagtgcgccgtggaggaggccctggactggagaagagaggagctgctgctgctgaagaaggagaagagatgcgtggacagcctgctgaagatgtgcggcaacgtgaagcacctgatccaggtggacttcggcgtgctggccgtgagacacagccaggacctgagcagcaagagactgaacgacaccgtgaccgtgagactgagcaccagcagcaacagccagagagccacccactaccacctgagcagccaggtgcaggagatggccggcaagatcgacctgctgagagacagccacatcttccagctgttctggagagaggccgccgagcccctgagcgagcccaaggaggaccaggaggccgccgagctgctgagcgagcccgaggaggagagcgagagacacatcctggagctggaggaggtgtacgactacctgtaccagcccagctacagaaagttcatcaagctgcaccaggacctgaagagcggcgaggtgaccctggccgagatcgacgtgatcttcaaggacttcgtgaacaagtacaccgacctggacagcgagctgaagatcatgtgcaccgtggaccaccaggaccagagagactggatcaaggacagagtggagcagatcaaggagtaccaccacctgcaccaggccgtgcacgccgccaaggtgatcctgcaggtgaaggagagcctgggcctgaacggcgacttcagcgtgctgaacaccctgctgaacttcaccgacaacttcgacgacttcagaagagagaccctggaccagatcaaccaggagctgatccaggccaagaagctgctgcaggacatcagcgaggccagatgcaagggcctgcaggccctgagcctgagaaaggagttcatctgctgggtgagagaggccctgggcggcatcaacgagctgaaggtgttcgtggacctggccagcatcagcgccggcgagaacgacatcgacgtggacagagtggcctgcttccacgacgccgtgcagggctacgccagcctgctgttcaagctggaccccagcgtggacttcagcgccttcatgaagcacctgaagaagctgtggaaggccctggacaaggaccagtacctgcccagaaagctgtgcgacagcgccagaaacctggagtggctgaagaccgtgaacgagagccacggcagcgtggagagaagcagcctgaccctggccaccgccatcaaccagagaggcatctacgtgatccaggcccccaagggcggccagaagatcagccccgacaccgtgctgcacctgatcctgcccgagagccccggcagccacgaggagagcagagagtacagcctggaggaggtgaaggagctgctgaacaagctgatgctgatgagcggcaagaaggacagaaacaacaccgaggtggagagattcagcgaggtgttctgcagcgtgcagagactgagccaggccttcatcgacctgcacagcgccggcaacatgctgttcagaacctggatcgccatggcctactgcagccccaagcagggcgtgagcctgcagatggacttcggcctggacctggtgaccgagctgaaggagggcggcgacgtgaccgagctgctggccgccctgtgcagacagatggagcacttcctggacagctggaagagattcgtgacccagaagagaatggagcacttctacctgaacttctacaccgccgagcagctggtgtacctgagcaccgagctgagaaagcagccccccagcgacgccgccctgaccatgctgagcttcatcaagagcaactgcaccctgagagacgtgctgagagccagcgtgggctgcggcagcgaggccgccagatacagaatgagaagagtgatggaggagctgcccctgatgctgctgagcgagttcagcctggtggacaagctgagaatcatcatggagcagagcatgagatgcctgcccgccttcctgcccgactgcctggacctggagaccctgggccactgcctggcccacctggccggcatgggcggcagccccgtggagagatgcctgcccagaggcctgcaggtgggccagcccaacctggtggtgtgcggccacagcgaggtgctgcccgccgccctggccgtgtacatgcagacccccagccagcccctgcccacctacgacgaggtgctgctgtgcacccccgccaccaccttcgaggaggtggccctgctgctgagaagatgcctgaccctgggcagcctgggccacaaggtgtacagcctgctgttcgccgaccagctgagctacgaggtggccagacaggccgaggagctgttccacaacctgtgcacccagcagcacagagaggactaccagctggtgatggtgtgcgacggcgactgggagcactgctacctgcccagcgccttcagccagcacaaggtgttcgtgaccccccaggcccccctggaggccatccaggcctacctggccggccactacagagtgcccaagcagaccctgagcgccgccgccgtgttcaacgacagactgtgcgtgggcatcgtggccagcgagagagccggcgtgggcaagagcctgtacgtgaagagactgcacgacaagatgaagatgcagctgaacgtgaagaacgtgcccctgaagaccatcagactgatcgacccccaggtggacgagagcagagtgctgggcgccctgctgcccttcctggacgcccagtaccagaaggtgcccgtgctgttccacctggacgtgaccagcagcgtgcagaccggcatctgggtgttcctgttcaagctgctgatcctgcagtacctgatggacatcaacggcaagatgtggctgagaaacccctgccacctgtacatcgtggagatcctggagagaagaaccagcgtgcccagcagaagcagcagcgccctgagaaccagagtgccccagttcagcttcctggacatcttccccaaggtgacctgcagaccccccaaggaggtgatcgacatggagctgagcgccctgagaagcgacaccgagcccggcatggacctgtgggagttctgcagcgagaccttccagagaccctaccagtacctgagaagattcaaccagaaccaggacctggacaccttccagtaccaggagggcagcgtggagggcacccccgaggagtgcctgcagcacttcctgttccactgcggcgtgatcaaccccagctggagcgagctgagaaacttcgccagattcctgaactaccagctgagagactgcgaggccagcctgttctgcaaccccagcttcatcggcgacaccctgagaggcttcaagaagttcgtggtgaccttcatgatcttcatggccagagacttcgccacccccagcctgcacaccagcgaccagagccccggcaagcacatggtgaccatggacggcgtgagagaggaggacctggcccccttcagcctgagaaagagatgggagagcgagccccacccctacgtgttcttcaacgacgaccacaccaccatgaccttcatcggcttccacctgcagcccaacatcaacggcagcgtggacgccatcagccacctgaccggcaaggtgatcaagagagacgtgatgaccagagacctgtaccagggcctgctgctgcagagagtgcccttcaacgtggacttcgacaagctgcccagacacaagaagctggagagactgtgcctgaccctgggcatcccccaggccaccgaccccgacaagacctacgagctgaccaccgacaacatgctgaagatcctggccatcgagatgagattcagatgcggcatccccgtgatcatcatgggcgagaccggctgcggcaagaccagactgatcaagttcctgagcgacctgagaagaggcggcaccaacgccgacaccatcaagctggtgaaggtgcacggcggcaccaccgccgacatgatctacagcagagtgagagaggccgagaacgtggccttcgccaacaaggaccagcaccagctggacaccatcctgttcttcgacgaggccaacaccaccgaggccatcagctgcatcaaggaggtgctgtgcgaccacatggtggacggccagcccctggccgaggacagcggcctgcacatcatcgccgcctgcaacccctacagaaagcacagcgaggagatgatctgcagactggagagcgccggcctgggctacagagtgagcatggaggagaccgccgacagactgggcagcatccccctgagacagctggtgtacagagtgcacgccctgccccccagcctgatccccctggtgtgggacttcggccagctgagcgacgtggccgagaagctgtacatccagcagatcgtgcagagactggtggagagcatcagcctggacgagaacggcaccagagtgatcaccgaggtgctgtgcgccagccagggcttcatgagaaagaccgaggacgagtgcagcttcgtgagcctgagagacgtggagagatgcgtgaaggtgttcagatggttccacgagcacagcgccatgctgctggcccagctgaacgccttcctgagcaagagcagcgtgagcaagaaccacaccgagagagaccccgtgctgtggagcctgatgctggccatcggcgtgtgctaccacgccagcctggagaagaaggacagctacagaaaggccatcgccagattcttccccaagccctacgacgacagcagactgctgctggacgagatcaccagagcccaggacctgttcctggacggcgtgcccctgagaaagaccatcgccaagaacctggccctgaaggagaacgtgttcatgatggtggtgtgcatcgagctgaagatccccctgttcctggtgggcaagcccggcagcagcaagagcctggccaagaccatcgtggccgacgccatgcagggccccgccgcctacagcgacctgttcagaagcctgaagcaggtgcacctggtgagcttccagtgcagcccccacagcaccccccagggcatcatcagcaccttcagacagtgcgccagattccagcagggcaaggacctgcagcagtacgtgagcgtggtggtgctggacgaggtgggcctggccgaggacagccccaagatgcccctgaagaccctgcaccccctgctggaggacggctgcatcgaggacgaccccgccccccacaagaaggtgggcttcgtgggcatcagcaactgggccctggaccccgccaagatgaacagaggcatcttcgtgagcagaggcagccccaacgagaccgagctgatcgagagcgccaagggcatctgcagcagcgacatcctggtgcaggacagagtgcagggctacttcgccagcttcgccaaggcctacgagaccgtgtgcaagagacaggacaaggagttcttcggcctgagagactactacagcctgatcaagatggtgttcgccgccgccaaggccagcaacagaaagcccagcccccaggacatcgcccaggccgtgctgagaaacttcagcggcaaggacgacatccaggccctggacatcttcctggccaacctgcccgaggccaagtgcagcgaggaggtgagccccatgcagctgatcaagcagaacatcttcggccccagccagaaggtgcccggcggcgagcaggaggacgccgagagcagatacctgctggtgctgaccaagaactacgtggccctgcagatcctgcagcagaccttcttcgagggcgaccagcagcccgagatcatcttcggcagcggcttccccaaggaccaggagtacacccagctgtgcagaaacatcaacagagtgaagatctgcatggagaccggcaagatggtgctgctgctgaacctgcagaacctgtacgagagcctgtacgacgccctgaaccagtactacgtgcacctgggcggccagaagtacgtggacctgggcctgggcacccacagagtgaagtgcagagtgcaccccaacttcagactgatcgtgatcgaggagaaggacgtggtgtacaagcacttccccatccccctgatcaacagactggagaagcactacctggacatcaacaccgtgctggagaagtggcagaagagcatcgtggaggagctgtgcgcctgggtggagaagttcatcaacgtgaaggcccaccacttccagaagagacacaagtacagccccagcgacgtgttcatcggctaccacagcgacgcctgcgccagcgtggtgctgcaggtgatcgagagacagggccccagagccctgaccgaggagctgcaccagaaggtgagcgaggaggccaagagcatcctgctgaactgcgccacccccgacgccgtggtgagactgagcgcctacagcctgggcggcttcgccgccgagtggctgagccaggagtacttccacagacagagacacaacagcttcgccgacttcctgcaggcccacctgcacaccgccgacctggagagacacgccatcttcaccgagatcaccaccttcagcagactgctgaccagccacgactgcgagatcctggagagcgaggtgaccggcagagcccccaagcccaccctgctgtggctgcagcagttcgacaccgagtacagcttcctgaaggaggtgagaaactgcctgaccaacaccgccaagtgcaagatcctgatcttccagaccgacttcgaggacggcatcagaagcgcccagctgatcgccagcgccaagtacagcgtgatcaacgagatcaacaagatcagagagaacgaggacagaatcttcgtgtacttcatcaccaagctgagcagagtgggcagaggcaccgcctacgtgggcttccacggcggcctgtggcagagcgtgcacatcgacgacctgagaagaagcaccctgatggtgagcgacgtgaccagactgcagcacgtgaccatcagccagctgttcgcccccggcgacctgcccgagctgggcctggagcacagagccgaggacggccacgaggaggccatggagaccgaggccagcaccagcggcgaggtggccgaggtggccgaggaggccatggagaccgagagcagcgagaaggtgggcaaggagaccagcgagctgggcggcagcgacgtgagcatcctggacaccaccagactgctgagaagctgcgtgcagagcgccgtgggcatgctgagagaccagaacgagagctgcaccagaaacatgagaagagtggtgctgctgctgggcctgctgaacgaggacgacgcctgccacgccagcttcctgagagtgagcaagatgagactgagcgtgttcctgaagaagcaggaggagagccagttccaccccctggagtggctggccagagaggcctgcaaccaggacgccctgcaggaggccggcaccttcagacacaccctgtggaagagagtgcagggcgccgtgacccccctgctggccagcatgatcagcttcatcgacagagacggcaacctggagctgctgaccagacccgacacccccccctgggccagagacctgtggatgttcatcttcagcgacaccatgctgctgaacatccccctggtgatgaacaacgagagacacaagggcgagatggcctacatcgtggtgcagaaccacatgaacctgagcgagaacgccagcaacaacgtgcccttcagctggaagatcaaggactacctggaggagctgtgggtgcaggcccagtacatcaccgacgccgagggcctgcccaagaagttcgtggacatcttccagcagacccccctgggcagattcctggcccagctgcacggcgagccccagcaggagctgctgcagtgctacctgaaggacttcatcctgctgaccatgagagtgagcaccgaggaggagctgaagttcctgcagatggccctgtggagctgcaccagaaagctgaaggccgccagcgaggcccccgaggaggaggtgagcctgccctgggtgcacctggcctaccagagattcagaagcagactgcagaacttcagcagaatcctgaccatctacccccaggtgctgcacagcctgatggaggccagatggaaccacgagctggccggctgcgagatgaccctggacgccttcgccgccatggcctgcaccgagatgctgaccagaaacaccctgaagcccagcccccaggcctggctgcagctggtgaagaacctgagcatgcccctggagctgatctgcagcgacgagcacatgcagggcagcggcagcctggcccaggccgtgatcagagaggtgagagcccagtggagcagaatcttcagcaccgccctgttcgtggagcacgtgctgctgggcaccgagagcagagtgcccgagctgcagggcctggtgaccgagcacgtgttcctgctggacaagtgcctgagagagaacagcgacgtgaagacccacggccccttcgaggccgtgatgagaaccctgtgcgagtgcaaggagaccgccagcaagaccctgagcagattcggcatccagccctgcagcatctgcctgggcgacgccaaggaccccgtgtgcctgccctgcgaccacgtgcactgcctgagatgcctgagagcctggttcgccagcgagcagatgatctgcccctactgcctgaccgccctgcccgacgagttcagccccgccgtgagccaggcccacagagaggccatcgagaagcacgccagattcagacagatgtgcaacagcttcttcgtggacctggtgagcaccatctgcttcaaggacaacgccccccccgagaaggaggtgatcgagagcctgctgagcctgctgttcgtgcagaagggcagactgagagacgccgcccagagacactgcgagcacaccaagagcctgagccccttcaacgacgtggtggacaagacccccgtgatcagaagcgtgatcctgaagctgctgctgaagtacagcttccacgacgtgaaggactacatccaggagtacctgaccctgctgaagaagaaggccttcatcaccgaggacaagaccgagctgtacatgctgttcatcaactgcctggaggacagcatcctggagaagaccagcgcctacagcagaaacgacgagctgaaccacctggaggaggagggcagattcctgaaggcctacagccccgccagcagaggcagagagcccgccaacgaggccagcgtggagtacctgcaggaggtggccagaatcagactgtgcctggacagagccgccgacttcctgagcgagcccgagggcggccccgagatggccaaggagaagcagtgctacctgcagcaggtgaagcagttctgcatcagagtggagaacgactggcacagagtgtacctggtgagaaagctgagcagccagagaggcatggagttcgtgcagggcctgagcaagcccggcagaccccaccagtgggtgttccccaaggacgtggtgaagcagcagggcctgagacaggaccaccccggccagatggacagatacctggtgtacggcgacgagtacaaggccctgagagacgccgtggccaaggccgtgctggagtgcaagcccctgggcatcaagaccgccctgaaggcctgcaagaccccccagagccagcagagcgcctacttcctgctgaccctgttcagagaggtggccatcctgtacagaagccacaacgccagcctgcaccccacccccgagcagtgcgaggccgtgagcaagttcatcggcgagtgcaagatcctgagcccccccgacatcagcagattcgccaccagcctggtggacaacagcgtgcccctgctgagagccggccccagcgacagcaacctggacggcaccgtgaccgagatggccatccacgccgccgccgtgctgctgtgcggccagaacgagctgctggagcccctgaagaacctggccttcagccccgccaccatggcccacgccttcctgcccaccatgcccgaggacctgctggcccaggccagaagatggaagggcctggagagagtgcactggtacacctgccccaacggccacccctgcagcgtgggcgagtgcggcagacccatggagcagagcatctgcatcgactgccacgcccccatcggcggcatcgaccacaagcccagagacggcttccacctggtgaaggacaaggccgacagaacccagaccggccacgtgctgggcaacccccagagaagagacgtggtgacctgcgacagaggcctgccccccgtggtgttcctgctgatcagactgctgacccacctggccctgctgctgggcgccagccagagcagccaggccctgatcaacatcatcaagccccccgtgagagaccccaagggcttcctgcagcagcacatcctgaaggacctggagcagctggccaagatgctgggccacagcgccgacgagaccatcggcgtggtgcacctggtgctgagaagactgctgcaggagcagcaccagctgagcagcagaagactgctgaacttcgacaccgagctgagcaccaaggagatgagaaacaactgggagaaggagatcgccgccgtgatcagccccgagctggagcacctggacaagaccctgcccaccatgaacaacctgatcagccaggacaagagaatcagcagcaaccccgtggccaagatcatctacggcgaccccgtgaccttcctgccccacctgcccagaaagagcgtggtgcactgcagcaagatctggagctgcagaaagagaatcaccgtggagtacctgcagcacatcgtggagcagaagaacggcaaggagagagtgcccatcctgtggcacttcctgcagaaggaggccgagctgagactggtgaagttcctgcccgagatcctggccctgcagagagacctggtgaagcagttccagaacgtgcagcaggtggagtacagcagcatcagaggcttcctgagcaagcacagcagcgacggcctgagacagctgctgcacaacagaatcaccgtgttcctgagcacctggaacaagctgagaagaagcctggagaccaacggcgagatcaacctgcccaaggactactgcagcaccgacctggacctggacaccgagttcgagatcctgctgcccagaagaagaggcctgggcctgtgcgccaccgccctggtgagctacctgatcagactgcacaacgagatcgtgtacgccgtggagaagctgagcaaggagaacaacagctacagcgtggacgccgccgaggtgaccgagctgcacgtgatcagctacgaggtggagagagacctgacccccctgatcctgagcaactgccagtaccaggtggaggagggcagagagaccgtgcaggagttcgacctggagaagatccagagacagatcgtgagcagattcctgcagggcaagcccagactgagcctgaagggcatccccaccctggtgtacagacacgactggaactacgagcacctgttcatggacatcaagaacaagatggcccaggacagcctgcccagcagcgtgatcagcgccatcagcggccagctgcagagctacagcgacgcctgcgaggtgctgagcgtggtggaggtgaccctgggcttcctgagcaccgccggcggcgaccccaacatgcagctgaacgtgtacacccaggacatcctgcagatgggcgaccagaccatccacgtgctgaaggccctgaacagatgccagctgaagcacaccatcgccctgtggcagttcctgagcgcccacaagagcgagcagctgctgagactgcacaaggagcccttcggcgagatcagcagcagatacaaggccgacctgagccccgagaacgccaagctgctgagcaccttcctgaaccagaccggcctggacgccttcctgctggagctgcacgagatgatcatcctgaagctgaagaacccccagacccagaccgaggagagattcagaccccagtggagcctgagagacaccctggtgagctacatgcagaccaaggagagcgagatcctgcccgagatggccagccagttccccgaggagatcctgctggccagctgcgtgagcgtgtggaagaccgccgccgtgctgaagtggaacagagagatgagatag

SEQ ID NO: 89528 - protein, 645 aa, Artificial Sequence
  derived and/or modified sequence
MLLKKHAGKGGGREPRSEDPTPAEQHCARTMPPCAVLAALLSVVAVVSCLYLGVKTNDLQARIAALESAKGAPSIHLLPDTLDHLKTMVQEKVERLLAQKSYEHMAKIRIAREAPSECNCPAGPPGKRGKRGRRGESGPPGQPGPQGPPGPKGDKGEQGDQGPRGLPGFPTVAALHSNQILTVKGDQGQAGPPGPPGPPGPRGPPGDTGKDGPRGMPGVPGEPGKPGEQGLMGPLGPPGQKGSIGAPGIPGMNGQKGEPGLPGAVGQNGIPGPKGEPGEQGEKGDAGENGPKGDTGEKGDPGSSAAGIKGEPGESGRPGQKGEPGLPGLPGLPGIKGEPGFIGPQGEPGLPGLPGTKGERGEAGPPGRGERGEPGAPGPKGDRGEKGDSGAQGPRGPPGQKGDQGATEIIDYNGNLHEALQGPPGPPGPQGLQGPKGEQGSPGIPGMDGEQGLKGSKGDMGDPGMTGEKGGIGLPGLPGANGMKGEKGDSGMPGPQGPSIIGPPGPPGPHGPPGPMGPHGLPGPKGEPGLNGVKGLKGEPGQKGDRGPLGLPGASGLDGKPGSRGTDGPMGPHGPAGPKGERGEKGAMGEPGPRGPYGLPGFPGPRGEKGDLGEKGEKVTSPSQHVPCLILLLLSALLFSLCDSI

SEQ ID NO: 89529 - DNA, 1938 bp, Artificial Sequence
  derived and/or modified sequence
atgctgctgaagaagcacgccggcaagggcggcggcagagagcccagaagcgaggaccccacccccgccgagcagcactgcgccagaaccatgcccccctgcgccgtgctggccgccctgctgagcgtggtggccgtggtgagctgcctgtacctgggcgtgaagaccaacgacctgcaggccagaatcgccgccctggagagcgccaagggcgcccccagcatccacctgctgcccgacaccctggaccacctgaagaccatggtgcaggagaaggtggagagactgctggcccagaagagctacgagcacatggccaagatcagaatcgccagagaggcccccagcgagtgcaactgccccgccggcccccccggcaagagaggcaagagaggcagaagaggcgagagcggcccccccggccagcccggcccccagggcccccccggccccaagggcgacaagggcgagcagggcgaccagggccccagaggcctgcccggcttccccaccgtggccgccctgcacagcaaccagatcctgaccgtgaagggcgaccagggccaggccggcccccccggcccccccggcccccccggccccagaggcccccccggcgacaccggcaaggacggccccagaggcatgcccggcgtgcccggcgagcccggcaagcccggcgagcagggcctgatgggccccctgggcccccccggccagaagggcagcatcggcgcccccggcatccccggcatgaacggccagaagggcgagcccggcctgcccggcgccgtgggccagaacggcatccccggccccaagggcgagcccggcgagcagggcgagaagggcgacgccggcgagaacggccccaagggcgacaccggcgagaagggcgaccccggcagcagcgccgccggcatcaagggcgagcccggcgagagcggcagacccggccagaagggcgagcccggcctgcccggcctgcccggcctgcccggcatcaagggcgagcccggcttcatcggcccccagggcgagcccggcctgcccggcctgcccggcaccaagggcgagagaggcgaggccggcccccccggcagaggcgagagaggcgagcccggcgcccccggccccaagggcgacagaggcgagaagggcgacagcggcgcccagggccccagaggcccccccggccagaagggcgaccagggcgccaccgagatcatcgactacaacggcaacctgcacgaggccctgcagggcccccccggcccccccggcccccagggcctgcagggccccaagggcgagcagggcagccccggcatccccggcatggacggcgagcagggcctgaagggcagcaagggcgacatgggcgaccccggcatgaccggcgagaagggcggcatcggcctgcccggcctgcccggcgccaacggcatgaagggcgagaagggcgacagcggcatgcccggcccccagggccccagcatcatcggcccccccggcccccccggcccccacggcccccccggccccatgggcccccacggcctgcccggccccaagggcgagcccggcctgaacggcgtgaagggcctgaagggcgagcccggccagaagggcgacagaggccccctgggcctgcccggcgccagcggcctggacggcaagcccggcagcagaggcaccgacggccccatgggcccccacggccccgccggccccaagggcgagagaggcgagaagggcgccatgggcgagcccggccccagaggcccctacggcctgcccggcttccccggccccagaggcgagaagggcgacctgggcgagaagggcgagaaggtgaccagccccagccagcacgtgccctgcctgatcctgctgctgctgagcgccctgctgttcagcctgtgcgacagcatctag

SEQ ID NO: 89530 - DNA, 1938 bp, Artificial Sequence
  derived and/or modified sequence
atgctgctgaaaaaacatgccgggaaggggggcggcagggaaccccgaagcgaggatccaactcctgccgagcagcattgcgccaggaccatgcccccctgtgccgtgttggcagcattgctgagcgtcgtggcggtggtgagttgcctgtacctgggggtgaaaaccaacgaccttcaggccaggatcgcagcactggagagcgctaaaggagcaccctctatacatctcctacccgataccctggaccacctgaagaccatggtgcaggagaaggtggaacgtctgttagcacagaaatcatacgagcatatggcaaaaatcaggatagcccgtgaggccccgtcagaatgcaactgccccgccggtcccccagggaagaggggaaagaggggtagacggggcgagagtggcccgcccggccagccagggccacaaggcccccccggacccaaaggtgataaaggggagcagggcgaccaggggcctcggggactacccgggtttcccacagtcgccgccttgcatagcaaccagatcttaacagttaaaggtgaccagggccaggctggacccccgggtccaccagggcctcctggcccccggggtcctcctggtgacaccggaaaggacggacctaggggaatgccaggtgtgccaggcgagcctggtaagccaggagagcagggactgatgggcccactgggaccgccaggtcaaaaaggcagcataggcgcccccggaatccccgggatgaacggtcagaaaggcgaacccgggctgccaggcgccgttgggcagaacggcattcccggccctaagggtgagcctggggaacagggcgagaagggagacgcgggcgaaaacggtcctaagggggataccggcgagaaaggagaccccggatcgtctgccgcaggaatcaagggcgagccaggggaaagtggaagacccggacagaagggagagccgggtttgcccggcctcccaggtttgccagggattaaaggtgaacctgggtttatcggtccgcagggcgagccggggctcccaggactgcccggaaccaagggtgaacgcggcgaagcaggtcctcctgggcgtggcgaacgaggcgagcccggggcccccggccccaaaggagatagaggggaaaagggcgactccggggcccaaggtccgaggggtccccctggtcagaaaggggaccagggggctactgaaatcatcgattataatggtaatctccatgaggccctgcagggtccccccggcccacccggtccccagggcctgcaagggccaaaaggggagcaagggtcccctggcatccccgggatggacggcgaacaggggttaaagggtagcaagggtgacatgggagatccaggaatgactggagaaaagggcggtattggattgcctggtctgcctggagccaacggcatgaagggcgagaagggcgactctggcatgcccggccctcaaggtccttctatcataggaccccctggacctccggggccacatggaccccctggacctatgggtccccacggcttgcctggacctaagggggagccggggctgaacggagtgaagggtctcaagggcgaaccaggccagaaaggcgatagaggccccctaggcctcccgggagcaagcggcctggacggaaaacccggtagcagaggcactgatggtccaatggggccccacggaccagctggccctaaaggggaaagaggtgaaaagggcgcaatgggagagccaggaccccgcgggccttacgggctacccgggtttcctgggcctagaggcgaaaagggcgatctcggagagaaaggggaaaaggtcaccagcccatctcagcacgtgccctgtctcattctcctgttgctgtccgcccttttgttttcactgtgtgatagcatttag

SEQ ID NO: 89531 - DNA, 2500 bp, Artificial Sequence
  derived and/or modified sequence
gagcggccactgttggggccctcgaaagaggtgtcggtcctctgggagtcggaagagctgtctgggtgggtttcgtcttgctttttaccccaccgccacccagtccccggacggagggtgcttttcacttccagctgggaggagagaagaaagcggggatggtgcacgcctgcgggtctggacgctgagcaaggcaggggtccgtatccgctcgtgggcttgactccaccaactagttgtgcagccacagggactgaactttggaggaatcgacctttttctttccttttaggattatttgaggtgtagagggtgggaagcgaagccgagacggccgaccccgccacgatgctgctgaagaagcacgcagggaaaggagggggccgggagcccagatccgaggacccgacccctgccgaacagcattgtgcccggaccatgcccccgtgtgccgtcctggcggccctcctgtcagtggtggccgtggtgtcttgcctgtacctgggtgtgaaaaccaacgacctccaggcgaggatcgccgctctcgaatccgccaaaggggccccttccattcatctgctgcctgataccctggatcacctcaagactatggtgcaagagaaagtggagcgacttctggctcagaaatcctatgaacatatggctaaaataagaatcgcaagagaagcaccttcagaatgtaactgcccagcaggccctccagggaaacgaggtaagagaggccgaagaggagaatctggtcctcctggacagcctggtcctcagggccctcctggtccaaaaggcgataagggagaacaaggtgatcagggacctaggggcctgccaggcttccccacagttgctgccctgcacagtaatcagatcctcaccgtcaagggtgaccaaggacaggcagggcctccaggaccccctggccctccaggcccaagagggccacctggggacacagggaaagatggcccccgtggaatgccaggagtacccggtgaaccaggaaagccaggagaacaaggcttgatgggtcctctagggcctccgggacaaaagggttctattggagcacctggaattccagggatgaatgggcaaaagggtgagcccgggttgcctggagcagtaggacagaatggaataccaggacctaagggagaacctggagaacaaggtgaaaagggagacgctggagagaacggccccaagggtgacacaggcgaaaagggtgaccctggatcatctgctgcaggaattaagggagaacctggggaatctggtcgtccagggcaaaagggtgaaccagggcttcctgggcttcctggacttccggggataaagggagaaccaggtttcattggtcctcaaggagaaccaggcttaccaggtttaccaggaacaaaaggtgaacggggggaagcagggcctcctggaagaggtgagcgaggggaacctggagcccccggaccaaagggggatcgtggagaaaaaggggactctggagctcagggaccaaggggtccacctggtcaaaaaggggatcaaggagccactgagatcatagactacaacggcaacctccacgaagccttacagggtccccctggacctcctggacctcaaggactacaagggccaaagggagagcagggatctccaggaatcccaggaatggatggagagcagggactcaaaggctcaaagggagacatgggggacccaggtatgacaggtgaaaaaggaggaattggacttcctggattaccgggagccaatggaatgaaaggagaaaaaggagattctggaatgccgggtccacagggtccttctatcataggcccaccaggcccaccaggtccccatggcccacctggccccatgggacctcatggacttcctggaccaaagggtgaaccagggttaaatggtgttaaaggattgaagggtgaaccaggtcaaaagggtgacagaggaccccttggtcttccaggagcatctggcttagacggaaagccaggatcccggggtacagatggtcctatgggaccccatggccctgcaggtcccaaaggagaaagaggtgaaaaaggagctatgggagagcctggaccaagagggccctatgggctgcctggcttccctggtccacggggtgagaagggtgatctaggagaaaagggagaaaaggtgacctctccatcccagcatgtaccttgtttgattcttctcctgctgtctgctttgctgttcagcttgtgtgattccatttgacacttaatctttctccatcctgtgctccaaaaacatactgatgcctgatttaaggaatcaggtcttcagagaggaatgaagaaggctgtactgccagatataagggcactgcctggcatagaagaaaaaattattatcaccagatattctagctacagtttttcaaccacctgacaccaatttatggaaaaataaaggatttttgaaaaaaaaa

SEQ ID NO: 89532 - DNA, 1938 bp, Artificial Sequence
  derived and/or modified sequence
atgctgctgaagaagcatgctggaaaaggaggcggccgggagcccaggtctgaggaccccaccccagctgagcagcactgtgcccggaccatgccaccctgtgctgtgctggccgccctgctgtctgtggtggccgtggtgtcctgcctgtacctgggcgtgaagaccaatgacctgcaggccagaattgctgccctggagagcgccaagggggcccccagcatccacctgctgcctgacaccctggaccacctgaagaccatggtgcaggagaaggtggagcggctgctggcccagaagagctatgagcacatggccaagatccgcatcgcccgggaggcccccagcgagtgcaactgcccagctggccccccaggcaagaggggcaagagaggaagaagaggagagagcggccccccaggccagcccggcccccagggccccccaggccccaagggggacaagggggagcagggcgaccagggcccccggggcctgcccggcttccccaccgtggccgccctgcacagcaaccagatcctgactgtgaagggggaccagggccaggccggccccccaggccccccaggccccccaggcccccggggccccccaggggacaccgggaaggatggcccccggggcatgcctggggtgcctggagagcccgggaagccaggagagcagggcctgatgggccccctgggccccccaggccagaagggcagcatcggggcccctggcatccctggcatgaatggccagaagggggagcccggcctgcccggggctgtgggccagaatggcatccctggccccaagggggagcctggagagcagggcgagaagggagatgctggggagaatggccccaagggggacacaggagagaagggggaccccggcagcagcgctgctggcatcaagggggagcccggggagagcggccggcccggccagaagggggagcccggcctgcccggcctgcccggcctgcccggcatcaagggggagcccggcttcatcggcccccagggcgagcccggcctgcccggcctgcccggcaccaagggggagcggggggaggccggccccccaggccgcggggagcggggggagcccggggcccctggccccaagggggacagaggagagaagggggacagcggggcccagggcccccggggccccccaggccagaagggggaccagggcgccacagagatcatcgactacaatggaaacctgcacgaggccctgcagggccccccaggccccccaggcccccagggcctgcagggccccaagggggagcagggcagccctggcatccctggcatggatggagagcagggcctgaagggcagcaaaggagacatgggagaccccggcatgaccggggagaagggcggcatcggcctgcccggcctgcccggggccaacggcatgaagggggagaagggggacagcggcatgcctggcccccagggccccagcatcatcggccccccaggccccccaggcccccacggccccccaggccccatgggcccccacggcctgcccggccccaagggggagcccggcctgaatggagtgaagggcctgaagggggagcccggccagaagggggaccggggccccctgggcctgcccggggccagcggcctggatggcaagccaggcagccggggcacagatggccccatgggcccccacggccctgctggccccaagggggagcggggggagaagggggccatgggagagcccggcccccggggcccctacggcctgcccggcttccctggccccagaggagagaagggggacctgggggagaagggggagaaggtgaccagccccagccagcacgtgccctgcctgatcctgctgctgctgagcgccctgctcttcagcctgtgtgacagcatctag

SEQ ID NO: 89533 - DNA, 1938 bp, Artificial Sequence
  derived and/or modified sequence
atgctgctgaagaagcacgccggcaagggcggcggccgggagcccaggagcgaggatcccacccccgctgagcagcattgtgctcgtactatgcctccctgtgccgttcttgccgctctcctttccgttgtagctgtggtctcctgcctctacttaggggtcaagaccaatgatctgcaggctcggatagccgccctggaatcagcaaaaggcgctcccagcatccaccttcttccagataccctagaccacttaaagacaatggtgcaggaaaaagtggaaaggctgctggcccaaaagagctatgagcacatggctaaaatcagaatcgcaagggaggcaccctctgagtgcaactgtccagcaggaccccccggaaaacggggaaagcgcgggagacgaggcgaatcgggacccccaggccagcccggtcctcaggggccgcccggccccaaaggcgataaaggcgagcaaggagaccagggaccacgcggactccccggctttcccactgtcgccgctcttcacagtaatcagattttaactgtcaagggagatcagggacaggctggtccccctggacctcctggaccacccggccctagaggtccccctggcgacaccggtaaagacggaccacgcggcatgcctggggtgcccggggagcccgggaagccaggtgagcagggactcatgggcccactcggtccgcctgggcaaaaagggtccatcggcgcacccggaattcccggcatgaatggacagaaaggagaacctggattgcctggcgctgtgggccagaacggcattcccggaccaaaaggggagcctggagagcagggagaaaagggcgatgcaggggagaacggaccgaagggggatacgggagaaaagggggatcccggttccagtgcggctgggattaaaggggaaccaggggagtcagggagacccggccaaaaaggggagccgggcttgccagggcttcccggtctcccaggtatcaaaggcgaaccaggcttcattggtcctcaaggcgagcctgggctacctgggcttccgggcaccaaaggcgagcggggtgaagcgggcccccctgggcgaggcgagaggggggaacctggagcccccggaccaaaaggggataggggggaaaagggggattccggagctcaaggaccacgtggccctccgggacagaaaggagatcagggagctacggaaataattgattacaatggcaacttgcacgaggccctgcaaggaccccccggccctcccggacctcagggactccagggaccgaaaggcgaacaaggcagtcccgggatcccagggatggatggcgaacaggggctgaaggggtctaagggtgatatgggcgatccaggaatgacgggtgaaaaaggcggaatcggtttgccaggtctacctggagcaaacggcatgaagggcgaaaagggggactccggtatgcccgggccacagggaccttcgattatcggccctccaggcccgccagggccccacggccctccgggaccaatggggccacatggtctgccaggccctaaaggggagccaggattgaacggagtgaagggactgaagggtgaaccgggccagaagggcgataggggcccactggggctccccggagcatccggcctcgatggcaagcctggctcacgcggcactgatggaccaatggggccccacggaccagccggtcccaagggagaaagaggtgagaaaggggcgatgggcgaaccaggtcccagagggccctacgggctacccggatttcctgggccccgaggggaaaagggggatttgggcgagaagggcgagaaagtgacaagcccatcccagcatgtcccgtgtctcattctgctcctgctcagtgcactccttttctccttatgcgactctatttag

SEQ ID NO: 89534 - DNA, 1938 bp, Artificial Sequence
  derived and/or modified sequence
atgctccttaaaaaacacgctgggaaggggggtgggcgtgagccgcgaagcgaggacccaaccccagcggaacagcattgtgcaaggaccatgccgccatgcgctgttcttgcggctctcctgtcggtggtcgctgtggttagctgtctttacctgggcgtgaagactaatgacctccaggccagaattgccgctctggagtcagccaagggagctcctagcatccacttactgcctgataccctggaccacctcaaaacgatggttcaggaaaaggtggagcggctactcgcacaaaagagttacgaacacatggccaagatacggatcgccagagaggcgccttccgaatgtaattgtcccgctggccctccgggaaagagaggcaaacgcggtagacgaggtgaaagcgggcctccaggacagcccggtcctcagggaccgccagggcctaaaggcgacaagggtgagcagggcgaccagggacctcggggactgcctgggtttccaaccgttgcagcccttcactccaaccaaattctgactgtgaagggcgatcagggacaagccggacccccaggtccccctggccctccgggtcctcggggtccaccaggcgatacaggcaaggatggcccacgcggtatgccgggagtccccggagagcccggtaaaccaggcgaacagggattaatgggcccactgggtcctccaggccagaaaggttccataggagctcctggcatcccagggatgaatgggcaaaagggagaacctggactgccgggtgccgttggtcaaaatggtatccccggtcctaagggcgagccaggggagcagggtgagaagggggacgcaggcgaaaacggacctaaaggcgataccggcgagaagggggatcctggctcaagcgcagccggaattaaaggtgaacccggagagtcaggacgcccaggtcagaaaggcgagcccggactgcccggtctgccaggcctccctggcattaagggcgaaccaggctttatagggccacagggagagccgggattaccagggctgcccggaactaaaggcgaacgcggagaggccggaccccctggcaggggcgagcgcggagaaccaggagcacctggcccaaagggcgaccgtggcgagaagggagatagtggcgctcaaggacccagaggcccaccaggccagaagggagaccagggcgcaaccgagatcattgattataatggtaacttgcacgaagcacttcagggacctcctgggcctcccggaccccaagggctgcagggcccaaaaggtgagcagggatctccaggcattccaggaatggacggcgagcagggtctgaaagggagcaagggggatatgggagatcccggaatgacaggggaaaaggggggtataggtctccccggacttcccggagcaaacggcatgaagggggaaaagggagacagtggtatgcctggaccccagggaccctccatcattggcccacctggcccaccgggaccccatgggcctcccggtccgatgggccctcacggccttcctggccctaagggggagcctggcctaaacggagtcaaaggcctgaaaggtgaaccagggcaaaagggggatagaggaccgctgggcttgcctggggcttcaggactcgacggtaagcccggaagccgcggtaccgacggccctatggggccacacggacctgctggccctaagggggagcgaggcgagaaaggtgccatgggtgaacctgggccacgaggaccctatgggctccccggattccccggtcctaggggtgaaaaaggggaccttggcgagaagggcgagaaagtaacctcaccatctcagcatgtcccctgtttaatcctgctgcttctcagtgcattgctgttctccttgtgtgactctatctag

SEQ ID NO: 89535 - protein, 159 aa, Artificial Sequence
  derived and/or modified sequence
MSLLKHQSLRPDEDSSHDLMLLRLSEPAKITDVVKVLGLPTQEPALGTTCYASGWGSIEPEEFLRPRSLQCVSLHLLSNDMCARAYSEKVTEFMLCAGLWTGGKDTCGGDSGGPLVCNGVLQGITSWGPEPCALPEKPAVYTKVVHYRKWIKDTIAANP

SEQ ID NO: 89536 - DNA, 480 bp, Artificial Sequence
  derived and/or modified sequence
atgagcctgttaaaacatcagagccttcgaccggacgaagatagctctcacgatctgatgctattacgtctgtccgagcctgctaagatcactgatgtagtcaaagtccttggactgcctacacaagaaccagccctcgggactacctgttacgcttccggctgggggagcattgagcctgaggaatttctgaggcccaggagcctgcagtgcgtctctctgcatctgctcagcaacgacatgtgcgctcgtgcctactctgaaaaagtgactgaattcatgctttgcgccgggctatggacaggtgggaaagacacctgcggcggggattccggaggaccactggtgtgcaatggcgttctgcaagggattacaagttgggggcctgagccctgcgccctgccagagaagccagcagtttacaccaaagtcgtgcattatagaaagtggattaaggatacaatcgcagcaaacccctag

SEQ ID NO: 89537 - DNA, 480 bp, Artificial Sequence
  derived and/or modified sequence
atgagcctgctgaagcaccagagcctgcggccagatgaggacagcagccatgacctgatgctgctgcggctgtctgagcccgccaagatcacagatgtggtgaaggtgctgggcctgcccacccaggagcccgccctgggcaccacctgctacgccagcggctggggcagcattgagcctgaggagttcctgcggcccaggagcctgcagtgtgtgtccctgcacctgctgagcaatgacatgtgtgcccgggcctacagcgagaaggtgacagagttcatgctgtgtgccggcctgtggacaggaggcaaggacacctgtggcggggacagcggcggccccctggtgtgcaatggagtgctgcagggcatcacctcctggggccctgagccctgtgccctgcctgagaagccagctgtgtacaccaaggtggtgcactacaggaagtggatcaaggacaccatcgccgccaacccctag

SEQ ID NO: 89538 - DNA, 480 bp, Artificial Sequence
  derived and/or modified sequence
atgagcctgctgaagcaccagagcctgcggcccgacgaggacagctctcatgacttgatgttgctgcgcctgtctgaacccgctaagatcactgatgtcgtgaaggtgttgggcctgcctacacaggagcctgcccttggaaccacttgctatgcgtctgggtggggatctattgagccagaggaatttctaagaccaagaagcctccagtgcgtttcgctgcatctgctgtctaacgatatgtgcgcgagggcctattccgagaaggttaccgagtttatgctctgtgcagggttgtggaccggaggaaaggacacttgtggcggcgactccggaggccctctggtgtgcaatggtgttttgcaaggaataacttcatgggggcctgaaccttgcgctttgcccgagaaaccagctgtgtacaccaaagtagtgcactaccggaagtggataaaggatactattgccgctaacccatag

SEQ ID NO: 89539 - DNA, 480 bp, Artificial Sequence
  derived and/or modified sequence
atgtctctgttgaagcatcagtctctccgccctgacgaagactcttctcacgatttgatgctccttagacttagtgagcctgctaaaatcacagacgtggtgaaggtgctgggcctgcctacgcaggagccggctctcggtaccacatgctacgcctctggctggggcagtatcgagcccgaagagtttctccggccaagatccttgcagtgtgtgtccttgcatctcctttccaatgacatgtgcgccagagcctattctgagaaagtaacagagttcatgttatgtgctggactttggaccggcggtaaggatacctgtggcggagattccggtggcccacttgtgtgtaacggagtgctccagggcataaccagttgggggccagagccttgtgcgctgccggagaaaccagctgtgtatactaaagtcgtgcattatcgcaagtggattaaagacaccatagcagccaacccatag

SEQ ID NO: 89540 - DNA, 480 bp, Artificial Sequence
  derived and/or modified sequence
atgagcctgctgaagcaccagagcctgagacccgacgaggacagcagccacgacctgatgctgctgagactgagcgagcccgccaagatcaccgacgtggtgaaggtgctgggcctgcccacccaggagcccgccctgggcaccacctgctacgccagcggctggggcagcatcgagcccgaggagttcctgagacccagaagcctgcagtgcgtgagcctgcacctgctgagcaacgacatgtgcgccagagcctacagcgagaaggtgaccgagttcatgctgtgcgccggcctgtggaccggcggcaaggacacctgcggcggcgacagcggcggccccctggtgtgcaacggcgtgctgcagggcatcaccagctggggccccgagccctgcgccctgcccgagaagcccgccgtgtacaccaaggtggtgcactacagaaagtggatcaaggacaccatcgccgccaacccctag

SEQ ID NO: 89541 - protein, 505 aa, Artificial Sequence
  derived and/or modified sequence
MKFKLHVNSARQYKDLWNMSDDKPFLCTAPGCGQRFTNEDHLAVHKHKHEMTLKFGPARNDSVIVADQTPTPTRFLKNCEEVGLFNELASPFENEFKKASEDDIKKMPLDLSPLATPIIRSKIEEPSVVETTHQDSPLPHPESTTSDEKEVPLAQTAQPTSAIVRPASLQVPNVLLTSSDSSVIIQQAVPSPTSSTVITQAPSSNRPIVPVPGPFPLLLHLPNGQTMPVAIPASITSSNVHVPAAVPLVRPVTMVPSVPGIPGPSSPQPVQSEAKMRLKAALTQQHPPVTNGDTVKGHGSGLVRTQSEESRPQSLQQPATSTTETPASPAHTTPQTQSTSGRRRRAANEDPDEKRRKFLERNRAAASRCRQKRKVWVQSLEKKAEDLSSLNGQLQSEVTLLRNEVAQLKQLLLAHKDCPVTAMQKKSGYHTADKDDSSEDISVPSSPHTEAIQHSSVSTSNGVSSTSKAEAVATSVLTQMADQSTEPALSQIVMAPSSQSQPSGS

SEQ ID NO: 89542 - protein, 209 aa, Artificial Sequence
  derived and/or modified sequence
MKFKLHVNSARQYKDLWNMSDDKPFLCTAPGCGQRFTNEDHLAVHKHKHEMTLKFGPARNDSVIVADQTPTPTRFLKNCEEVGLFNELASPFENEFKKASEDDIKKMPLDLSPLATPIIRSKIEEPSVVETTHQDSPLPHPESTTSDEKEVPLAQTAQPTSAIVRPASLQVPNVLLTSSDSSVIIQQAVPSPTSSTVITQAPSSNRPIV

SEQ ID NO: 89543 - protein, 395 aa, Artificial Sequence
  derived and/or modified sequence
MKFKLHVNSARQYKDLWNMSDDKPFLCTAPGCGQRFTNEDHLAVHKHKHEMTLKFGPARNDSVIVADQTPTPTRFLKNCEEVGLFNELASPFENEFKKASEDDIKKMPLDLSPLATPIIRSKIEEPSVVETTHQDSPLPHPESTTSDEKEVPLAQTAQPTSAIVRPASLQVPNVLLTSSDSSVIIQQAVPSPTSSTVITQAPSSNRPIVPVPGPFPLLLHLPNGQTMPVAIPASITSSNVHVPAAVPLVRPVTMVPSVPGIPGPSSPQPVQSEAKMRLKAALTQQHPPVTNGDTVKGHGSGLVRTQSEESRPQSLQQPATSTTETPASPAHTTPQTQSTSGRRRRAANEDPDEKRRKFLERNRAAASRCRQKRKVWVQSLEKKAEDLSSLNGQLQ

SEQ ID NO: 89544 - protein, 237 aa, Artificial Sequence
  derived and/or modified sequence
MKFKLHVNSARQYKDLWNMSDDKPFLCTAPGCGQRFTNEDHLAVHKHKHEMTLKFGPARNDSVIVADQTPTPTRFLKNCEEVGLFNELASPFENEFKKASEDDIKKMPLDLSPLATPIIRSKIEEPSVVETTHQDSPLPHPESTTSDEKEVPLAQTAQPTSAIVRPASLQVPNVLLTSSDSSVIIQQAVPSPTSSTVITQAPSSNRPIVSFDQSPWCLVFQESQVLPLPNQYSQKQK

SEQ ID NO: 89545 - protein, 377 aa, Artificial Sequence [sequence omitted]

SEQ ID NO: 89546 - protein, 482 aa, Artificial Sequence
  derived and/or modified sequence
MKFKLHVNSARQYKDLWNMSDDKPFLCTAPGCGQRFTNEDHLADQTPTPTRFLKNCEEVGLFNELASPFENEFKKASEDDIKKMPLDLSPLATPIIRSKIEEPSVVETTHQDSPLPHPESTTSDEKEVPLAQTAQPTSAIVRPASLQVPNVLLTSSDSSVIIQQAVPSPTSSTVITQAPSSNRPIVPVPGPFPLLLHLPNGQTMPVAIPASITSSNVHVPAAVPLVRPVTMVPSVPGIPGPSSPQPVQSEAKMRLKAALTQQHPPVTNGDTVKGHGSGLVRTQSEESRPQSLQQPATSTTETPASPAHTTPQTQSTSGRRRRAANEDPDEKRRKFLERNRAAASRCRQKRKVWVQSLEKKAEDLSSLNGQLQSEVTLLRNEVAQLKQLLLAHKDCPVTAMQKKSGYHTADKDDSSEDISVPSSPHTEAIQHSSVSTSNGVSSTSKAEAVATSVLTQMADQSTEPALSQIVMAPSSQSQPSGS

SEQ ID NO: 89547 - DNA, 2117 bp, Artificial Sequence
  derived and/or modified sequence
gtgggagcccgtggcctttaaagtgccgttcagccttttcctccaggggtgctttgtaaacacggctgtgctcagggctcgcgggtgaccgaaaggatcatgaactagtgacctggaaagggtactagatggaaacttgagaaaggactgcttattgataacagctaaggtattcctggaagcagagtaaataaagctcatggcccaccagctagaaagtattcttgccatgagaaaaagaatgtgataagttattcaacttatgaaattcaagttacatgtgaattctgccaggcaatacaaggacctgtggaatatgagtgatgacaaaccctttctatgtactgcgcctggatgtggccagcgttttaccaacgaggatcatttggctgtccataaacataaacatgagatgacactgaaatttggtccagcacgtaatgacagtgtcattgtggctgatcagaccccaacaccaacaagattcttgaaaaactgtgaagaagtgggtttgtttaatgagttggcgagtccatttgagaatgaattcaagaaagcttcagaagatgacattaaaaaaatgcctctagatttatcccctcttgcaacacctatcataagaagcaaaattgaggagccttctgttgtagaaacaactcaccaggatagtcctttacctcacccagagtctactaccagtgatgagaaggaagtaccattggcacaaactgcacagcccacatcagctattgttcgtccagcatcattacaggttcccaatgtgctgcttacaagttctgactcaagtgtaattattcagcaggcagtaccttcaccaacctcaagtactgtaatcacccaggcaccatcctctaacaggccaattgtccctgtaccaggcccatttcctcttctgttacatcttcctaatggacaaaccatgcctgttgctattcctgcatcaattacaagttctaatgtgcatgttccagctgcagtcccactcgttcgaccagtcaccatggtgcctagtgttccaggaatcccaggtccttcctctccccaaccagtacagtcagaagcaaaaatgagattaaaagctgctttgacccagcaacatcctccagttaccaatggtgatactgtcaaaggtcatggtagcggattggttaggactcagtcagaggaatctcgaccgcagtcattacaacagccagccacatccactacagaaactccggcttctccagctcacacaactccacagacccaaagtacaagtggtcgtcggagaagagcagctaacgaagatcctgatgaaaaaaggagaaagtttttagagcgaaatagagcagcagcttcaagatgccgacaaaaaaggaaagtctgggttcagtctttagagaagaaagctgaagacttgagttcattaaatggtcagctgcagagtgaagtcaccctgctgagaaatgaagtggcacagctgaaacagcttcttctggctcataaagattgccctgtaaccgccatgcagaagaaatctggctatcatactgctgataaagatgatagttcagaagacatttcagtgccgagtagtccacatacagaagctatacagcatagttcggtcagcacatccaatggagtcagttcaacctccaaggcagaagctgtagccacttcagtcctcacccagatggcggaccagagtacagagcctgctctttcacagatcgttatggctccttcctcccagtcacagccctcaggaagttgattaaaaacctgcagtacaacagttttagatactcattagtgacttcaaagggaaatcaaggaaagaccagtttccatttatgcgaaatctgtggttgtaaattttttttttttacttgaaattaaatttggctctaaagttggtgtagcagcagttgatcagactgaaaaacggtttttagtctctggaaaaagactgattttgctttttttataaatattattagatttattaatttttctgtgctcaatgtgtaaattgtattataattcattgtgatttatttcacttttaatttgctggtgttttaataaatgggggtgttactgaaaaaaaa

SEQ ID NO: 89548 - DNA, 1518 bp, Artificial Sequence
  derived and/or modified sequence
atgaagtttaagctgcatgttaattccgccagacagtataaggatctctggaacatgtcagatgataagccattcctctgcaccgcgcccgggtgtggtcaaaggttcacaaatgaagatcatcttgcggtgcacaaacataagcacgaaatgactctgaaattcggacctgcgcgaaacgattcagtgatcgttgcggaccaaacacccacacctactcgattcctaaagaactgtgaggaagtgggactttttaacgagttggcctctccttttgagaatgagtttaagaaagcatcagaagacgatatcaagaaaatgcccctggacttgagcccacttgcaactcccataattcgcagcaagatcgaggagccgtctgtagtagaaacaacacatcaagattctcccctccctcacccagaatctacaacatctgatgaaaaggaagtgcccctggcccaaacagcccagcccacgtctgccatagtgcgaccggcatccttgcaggtgcctaacgtgctgctgaccagctctgactcctcagtgatcattcagcaggcagttccaagcccgacaagcagcacagttattacacaggcaccctcctccaaccgtcccatcgtacccgtccccggcccgttccctctgctcctgcatctgccgaacggtcaaactatgcccgttgctattccagcctctattaccagctctaatgtgcacgttcctgctgctgtgccgctggtgcgccccgtgacgatggtgccttcagtccccggaattcctgggccaagctcaccacagcccgtgcaaagcgaggccaagatgcgcctgaaagcagctttgacgcagcagcatccccccgtcaccaatggcgacacagtgaagggtcacggaagcggtcttgtcagaacccagtccgaggaaagcaggccgcagagcctgcagcagccagccacctctactactgaaacacccgcctcgcctgctcataccaccccacagacgcagagtacgtccggccgcagacgcagggccgctaacgaagatcctgatgaaaagcggcgcaagttccttgagagaaacagagctgctgcctctcgttgcagacagaaaaggaaggtctgggtgcagtccctggaaaagaaagccgaagacctctctagtctgaatggtcagctgcaatccgaagtgacgcttctgcgcaatgaagtggcccagctcaaacagttgcttttggcacataaggattgtccggttaccgctatgcagaagaaatcggggtaccacacagccgataaggacgattcttcagaggatatttccgtcccttccagtcctcataccgaagccattcaacacagctcggtcagcaccagtaacggagtgtccagcacaagcaaggcggaagctgtggctacctctgtcttaactcagatggctgaccagagcaccgagcctgccttgtctcaaattgttatggcacccagctcccagagccagccttccggctcttag

SEQ ID NO: 89549 - DNA, 1518 bp, Artificial Sequence
  derived and/or modified sequence
atgaagttcaagctgcatgttaactctgcaaggcaatacaaagacctctggaatatgagcgatgacaagccttttctttgtacggcgccaggctgcggacagcggtttacaaacgaggaccatcttgccgttcacaaacacaagcacgagatgacccttaagttcggaccagctcgcaatgacagcgtgatcgtcgcagaccagacacctacccctacaaggttcctgaaaaactgcgaagaggttgggctctttaacgagctcgccagtccattcgagaatgagtttaaaaaagcttcagaggacgatatcaagaagatgccgcttgatctgtcccctctcgccaccccaattatacgaagcaagattgaggagccatctgttgtggaaacgactcaccaggactccccattaccccaccccgagagcaccacctctgatgaaaaggaagttcccctagcccagaccgcgcagcccacctctgccattgtgagaccagcaagtcttcaggtgcccaatgtcctgttgacaagtagtgacagttccgtgattatccaacaggcagtgccttcccccacaagttccacagtgatcacccaggccccctcctccaaccgcccgattgtgcccgtgcctggacccttcccactactcctgcatctgcctaatggccaaactatgccagtcgccatccccgcctctatcacatcctcaaatgtccacgtccctgctgccgtgcctttggtaagaccggtgaccatggtgccatcggttcctggcattccgggaccaagcagtccccagccggttcagtccgaggctaaaatgcgcctgaaagcagcattgacacagcagcaccctcctgttaccaacggagatacggtcaaaggccacggttccggacttgtgcggacacagtctgaggaaagtcggccccagtcacttcagcaacccgccacttcaactactgagactccagcatcacctgcccatactaccccccaaacccagtctactagcgggaggaggcggcgcgccgccaatgaggacccggatgagaaaagaaggaagtttctggagcgcaaccgtgcagcagcgtcccgatgtcggcagaagcggaaagtctgggttcaatccctggaaaagaaagcagaggacctgtcttcattaaacggacagctgcagagcgaggtgacgttactgaggaatgaggttgctcagctcaagcagctgctgttagcgcacaaggactgtcccgtgacagcaatgcagaaaaagtccggataccacacggccgataaggatgatagttctgaagatatctcggtcccaagcagccctcacactgaagccatccaacacagtagcgtgtccacgtcaaacggagtgagcagcacttccaaagccgaggctgttgcaactagcgtcctgacgcagatggctgaccagtccaccgaaccagcgctgagtcagattgttatggccccatcctcccagtcgcagccttcagggagttag

SEQ ID NO: 89550 - DNA, 1188 bp, Artificial Sequence
  derived and/or modified sequence
atgaagttcaagttacacgtgaattcagcacggcagtacaaggacctgtggaacatgtctgacgacaagccatttctctgtactgccccaggctgcggccagaggttcaccaacgaggaccatttagctgtccataagcacaagcacgaaatgactctgaaatttggcccggctagaaacgattctgtgatcgtggccgaccagactcccacacccaccaggtttctgaaaaattgcgaagaagtcgggctgttcaacgaattggcatcaccttttgagaacgagttcaagaaggccagtgaggatgacatcaagaagatgccactcgacttgagtccactcgccactcctatcattcgcagtaaaatcgaagaacctagtgtggtcgaaaccacccatcaggacagccccctgccccaccccgaaagcactacctccgatgaaaaagaggtgcctcttgcacaaacggcccagcctacctctgcaatagtgcggcctgccagtctgcaggtgcctaacgttctacttacatccagcgactctagtgtcattattcagcaggcagtgccgagccctacgagttccaccgtgattacacaggcaccctcctctaacagaccaattgtcccagtaccagggccatttccgctcctgctccatcttcccaacggacaaactatgcctgtggccattccagcgagcatcacctccagtaacgtccacgtcccggcggccgtacctctcgtccgacccgttacaatggtcccctccgtccccggcattccaggcccttcgagccctcagccagtccagagcgaagccaagatgcggcttaaggcagcattgactcaacagcatccccctgtcactaatggggacaccgttaaagggcatgggagcggcctggtaagaacccaatccgaggaaagtcggccccagtcactgcagcaacccgccacatcaacaaccgagacgccagcgagtcctgcccatacaaccccgcagacacagagcacgagtggccgtcgccgcagagctgcaaatgaagatccagacgagaagcgaaggaaattcttagaaagaaatagggctgccgccagccgatgtaggcagaagcggaaagtgtgggttcaatccctcgaaaaaaaagctgaggatttgagctctttaaacggacaattgcagtag

SEQ ID NO: 89551 - DNA, 1188 bp, Artificial Sequence
  derived and/or modified sequence
atgaagtttaagctgcatgtgaacagcgcaaggcagtataaggacctctggaatatgtcagatgacaaacccttcttgtgcaccgcccccggctgcggacagagatttacaaacgaagatcatctcgccgttcacaaacataagcatgaaatgaccctgaagtttgggcctgcaagaaacgatagtgttatcgttgcagaccagactccaacaccaactagatttcttaagaactgtgaggaagttggcctgtttaatgagctggcctcgcctttcgagaatgaattcaagaaggccagcgaagacgatatcaagaagatgcctctggatctttcaccgcttgcaacccctattatccggagcaaaatcgaggagccaagcgttgtagaaactactcatcaagatagcccgctgccgcacccagagtccactaccagtgatgagaaagaggtgcccctcgctcagacggctcaacccacctctgccatagtacgaccagcaagcctgcaggtgcccaacgttttactcaccagctctgattcctccgttattatccaacaggccgtgccatcacccacctcaagtaccgtgatcacccaggcgcccagcagcaaccgccctatcgtgccggtgccgggaccattccccctcctgctccacttgcccaacgggcagacaatgcccgttgccatcccagcctctattacaagcagcaacgtgcacgtcccagccgcagtaccgctcgtcaggccggtgacaatggtgccctcagtcccaggcatccccggcccatcatctccacaaccggtccaaagcgaagccaaaatgcgactgaaggccgcactcacacagcagcatccgccagtgaccaatggtgacactgtgaaagggcatggcagcggcctagttaggactcagagtgaggagtcgcgcccacagtccctccagcagcccgccactagcacgaccgaaactcccgcctcccccgcgcatactactccccagacacagagtaccagcggcagacggcgtcgggcagccaacgaagaccctgatgaaaaaagaagaaagttcctcgagcgtaatcgggctgcagcctctcgctgcaggcaaaagaggaaggtttgggtgcaatcgctggagaaaaaagctgaagacctgtctagcctgaacgggcagctgcagtag

SEQ ID NO: 89552 - DNA, 1188 bp, Artificial Sequence
  derived and/or modified sequence
atgaaattcaagctgcacgtaaatagtgcacggcagtacaaagacctatggaatatgtcggacgataagcccttcctgtgtacagcccctgggtgtggacagagatttactaacgaggatcacctggcagtccacaaacataagcacgagatgacactcaagtttggaccagctagaaacgattccgtgatagtggccgatcagacccccactcccacccggttcctgaaaaattgcgaggaagttggcctgttcaacgagctcgcttctcccttcgagaatgaattcaagaaggcaagcgaagacgatatcaagaaaatgccccttgacctgtcaccactagcaacaccaataatccgctcgaagattgaagaaccatcagtggtggagaccacccatcaggactccccgcttcctcaccctgagagtaccacgtctgacgagaaagaggtcccgctagcccaaaccgcgcagccaacgtcagctatcgtgaggcctgcttcacttcaggtgccaaatgtgttactgacctcaagtgactctagcgtcataatccagcaggcagtgccatcacctacttcttcaacagttataacacaggccccctcctcgaacagaccaatagtgccagttccgggtccttttcctctgctactgcatttgccaaatgggcagaccatgcctgtggccattcccgcctccattacttcttcgaatgtgcatgtgccggctgccgtgccattggtcaggcccgtgacaatggtcccatcagtaccaggaatcccagggccgagctcaccccagcccgtacagtcagaggcgaaaatgcgactcaaggcagctctgactcaacaacatcccccagtgacaaatggtgacacagttaaagggcacggttctgggctcgtgagaactcagtctgaagagagtcgccctcagagtttgcagcaacctgccacatctaccaccgaaacaccagcatcgcccgcccataccacgcctcagacacagagcaccagcggcagaagacgcagagctgccaacgaggacccagacgagaagagacgaaagttcctcgaacgcaacagggcagccgccagcaggtgtcgacagaaaaggaaggtctgggtccaatccctcgagaagaaggctgaggacctctcttccctgaacggacagctgcagtag

SEQ ID NO: 89553 - DNA, 1449 bp, Artificial Sequence
  derived and/or modified sequence
atgaaattcaaattacacgtgaactccgctcgccagtacaaggacctgtggaatatgagtgatgacaaaccatttttatgtaccgcccccggctgcggccagaggttcacaaacgaggaccatctggccgatcagactccaaccccgactaggtttttgaagaattgcgaggaggtcgggctctttaatgagctcgcctctccgttcgagaatgaattcaagaaagcctctgaggatgacatcaaaaagatgccactggatctgtctcctctggcaacccctatcatacgttcaaagattgaggaacctagcgtcgtggaaacaacgcatcaggactcgcccctgccacaccccgagtcaactacttctgatgagaaagaagtaccactagcccagacggcgcaacctacttcagccatagtgcgtccagctagcctgcaggttccaaatgtcctcctcacaagttctgacagctctgtgatcatccagcaggccgtgccttcgcctaccagttcaacagttatcacacaggcccccagcagtaaccggcctatagtgcctgtgccaggacccttcccactccttctgcatctaccgaatggccagaccatgcctgtagccattcctgcatcaattacgagttcaaacgtccatgtgccagcagccgtccccctcgtaagacctgtgaccatggtgccttcggtgcccggaatcccgggtccttcaagcccacaaccagtgcagtccgaagccaagatgagactgaaggcagcccttacccagcaacacccacccgtaacaaacggcgatacagtgaaaggccacggcagcggcttagtgcgtacccagtcagaggagagccggccacagtccctccagcagcccgcgacatccacgacagagactcccgcaagcccagctcacacaacaccccagacacagtccacctctgggaggcggcgacgggccgcaaacgaagacccagatgaaaaacgaagaaaattcctggaaagaaaccgggcagccgcctcacgctgccggcagaaacggaaggtatgggtacaatcactcgagaagaaggcggaggacttgtcctccttaaatggacagctgcaatccgaggtcaccctgcttcgaaacgaggttgcccagttaaaacagcttctgttggcacataaggattgccctgttactgccatgcagaagaagagtggataccataccgctgataaagacgacagcagcgaagacatctccgtcccatcgagtcctcacacagaggcaattcagcatagctccgtaagtaccagcaatggggtgagcagcacctctaaggccgaagcagtggcaacaagtgtattgactcaaatggccgaccagtctaccgaacccgcactgtcacagattgttatggcccctagctctcagtcccagccgtcaggttcgtag

SEQ ID NO: 89554 - DNA, 1518 bp, Artificial Sequence
  derived and/or modified sequence
atgaagttcaagctgcacgtgaacagcgcccggcagtacaaggacctgtggaacatgtctgatgacaagcccttcctgtgcacagcccctggctgcggccagcgcttcaccaatgaagaccacctggccgtgcacaagcacaagcatgagatgaccctgaagtttggacctgccagaaatgacagcgtcatcgtggccgaccagacccccacccccacccgcttcctgaagaactgtgaggaggtgggcctcttcaatgagctggccagcccctttgaaaatgagttcaagaaggcctctgaagatgacatcaagaagatgcccctggacctgagccccctggccacccccatcatccgcagcaagattgaggagcccagcgtggtggagaccacccaccaggacagccccctgccccaccctgagagcaccaccagtgatgagaaggaggtgcccctggcccagacagcccagcccaccagcgccatcgtgcggcctgccagcctgcaggtgcccaacgtgctgctgaccagcagtgacagcagcgtcatcatccagcaggccgtgcccagccccaccagcagcaccgtcatcacccaggcccccagcagcaaccggcccatcgtgcctgtgcccggccccttccccctgctgctgcacctgcccaacggccagaccatgcctgtggccatcccagccagcatcaccagcagcaatgtgcacgtgcctgctgctgtgcccctggtgcggcctgtgaccatggtgcccagcgtgcccggcatccctggccccagcagcccccagcctgtgcagagcgaggccaagatgaggctgaaggccgccctgacccagcagcacccccctgtgaccaatggagacacagtgaagggccacggcagcggcctggtgaggacccagagcgaggagagccggccccagagcctgcagcagcctgccaccagcaccacagagaccccagccagccctgcccacaccaccccccagacccagagcaccagcggcagaagaagaagagctgccaatgaagatcctgatgagaagaggaggaagttcctggagaggaacagagctgctgccagccgctgccggcagaagaggaaggtgtgggtgcagagcctggagaagaaggccgaggacctgagcagcctgaatggccagctgcagagcgaggtgaccctgctgagaaatgaggtggcccagctgaagcagctgctgctggcccacaaggactgccctgtgacagccatgcagaagaagagcggctaccacacagctgacaaggatgacagcagcgaggacatctctgtgcccagcagcccccacacagaggccatccagcacagctctgtgtccaccagcaatggagtgagcagcaccagcaaggccgaggccgtggccacctctgtgctgacccagatggctgaccagagcacagagcccgccctgagccagatcgtgatggcccccagcagccagagccagcccagcggcagctag

SEQ ID NO: 89555 - DNA, 1188 bp, Artificial Sequence
  derived and/or modified sequence
atgaagttcaagctgcacgtgaacagcgcccggcagtacaaggacctgtggaacatgtctgatgacaagcccttcctgtgcacagcccctggctgcggccagcgcttcaccaatgaagaccacctggccgtgcacaagcacaagcatgagatgaccctgaagtttggacctgccagaaatgacagcgtcatcgtggccgaccagacccccacccccacccgcttcctgaagaactgtgaggaggtgggcctcttcaatgagctggccagcccctttgaaaatgagttcaagaaggcctctgaagatgacatcaagaagatgcccctggacctgagccccctggccacccccatcatccgcagcaagattgaggagcccagcgtggtggagaccacccaccaggacagccccctgccccaccctgagagcaccaccagtgatgagaaggaggtgcccctggcccagacagcccagcccaccagcgccatcgtgcggcctgccagcctgcaggtgcccaacgtgctgctgaccagcagtgacagcagcgtcatcatccagcaggccgtgcccagccccaccagcagcaccgtcatcacccaggcccccagcagcaaccggcccatcgtgcctgtgcccggccccttccccctgctgctgcacctgcccaacggccagaccatgcctgtggccatcccagccagcatcaccagcagcaatgtgcacgtgcctgctgctgtgcccctggtgcggcctgtgaccatggtgcccagcgtgcccggcatccctggccccagcagcccccagcctgtgcagagcgaggccaagatgaggctgaaggccgccctgacccagcagcacccccctgtgaccaatggagacacagtgaagggccacggcagcggcctggtgaggacccagagcgaggagagccggccccagagcctgcagcagcctgccaccagcaccacagagaccccagccagccctgcccacaccaccccccagacccagagcaccagcggcagaagaagaagagctgccaatgaagatcctgatgagaagaggaggaagttcctggagaggaacagagctgctgccagccgctgccggcagaagaggaaggtgtgggtgcagagcctggagaagaaggccgaggacctgagcagcctgaatggccagctgcagtag

SEQ ID NO: 89556 - DNA, 1449 bp, Artificial Sequence
  derived and/or modified sequence
atgaagttcaagctgcacgtgaacagcgcccggcagtacaaggacctgtggaacatgtctgatgacaagcccttcctgtgcacagcccctggctgcggccagcgcttcaccaatgaagaccacctggccgaccagacccccacccccacccgcttcctgaagaactgtgaggaggtgggcctcttcaatgagctggccagcccctttgaaaatgagttcaagaaggcctctgaagatgacatcaagaagatgcccctggacctgagccccctggccacccccatcatccgcagcaagattgaggagcccagcgtggtggagaccacccaccaggacagccccctgccccaccctgagagcaccaccagtgatgagaaggaggtgcccctggcccagacagcccagcccaccagcgccatcgtgcggcctgccagcctgcaggtgcccaacgtgctgctgaccagcagtgacagcagcgtcatcatccagcaggccgtgcccagccccaccagcagcaccgtcatcacccaggcccccagcagcaaccggcccatcgtgcctgtgcccggccccttccccctgctgctgcacctgcccaacggccagaccatgcctgtggccatcccagccagcatcaccagcagcaatgtgcacgtgcctgctgctgtgcccctggtgcggcctgtgaccatggtgcccagcgtgcccggcatccctggccccagcagcccccagcctgtgcagagcgaggccaagatgaggctgaaggccgccctgacccagcagcacccccctgtgaccaacggggacacagtgaagggccacggcagcggcctggtgaggacccagagcgaggagagccggccccagagcctgcagcagcctgccaccagcaccacagagaccccagccagccctgcccacaccaccccccagacccagagcaccagcggcagaagaagaagagctgccaatgaagatcctgatgagaagaggaggaagttcctggagaggaacagagctgctgccagccgctgccggcagaagaggaaggtgtgggtgcagagcctggagaagaaggccgaggacctgagcagcctgaatggccagctgcagagcgaggtgaccctgctgagaaatgaggtggcccagctgaagcagctgctgctggcccacaaggactgccctgtgacagccatgcagaagaagagcggctaccacacagctgacaaggatgacagcagcgaggacatctctgtgcccagcagcccccacacagaggccatccagcacagctctgtgtccaccagcaatggagtgagcagcaccagcaaggccgaggccgtggccacctctgtgctgacccagatggctgaccagagcacagagcccgccctgagccagatcgtgatggcccccagcagccagagccagcccagcggcagctag

SEQ ID NO: 89557 - DNA, 4176 bp, Artificial Sequence
  derived and/or modified sequence
gttgtcagtccgatctcgcgagagaggacggaagcctgtgggagcccgtggcctttaaagtgccgttcagccttttcctccaggggtgctttgtaaacacggctgtgctcagggctcgcgggtgaccgaaaggatcatgaactagtgacctggaaagggtactagatggaaacttgagaaaggactgcttattgataacagctaaggtattcctggaagcagagtaaataaagctcatggcccaccagctagaaagtattcttgccatgagaaaaagaatgtgataagttattcaacttatgaaattcaagttacatgtgaattctgccaggcaatacaaggacctgtggaatatgagtgatgacaaaccctttctatgtactgcgcctggatgtggccagcgttttaccaacgaggatcatttggctgtccataaacataaacatgagatgacactgaaatttggtccagcacgtaatgacagtgtcattgtggctgatcagaccccaacaccaacaagattcttgaaaaactgtgaagaagtgggtttgtttaatgagttggcgagtccatttgagaatgaattcaagaaagcttcagaagatgacattaaaaaaatgcctctagatttatcccctcttgcaacacctatcataagaagcaaaattgaggagccttctgttgtagaaacaactcaccaggatagtcctttacctcacccagagtctactaccagtgatgagaaggaagtaccattggcacaaactgcacagcccacatcagctattgttcgtccagcatcattacaggttcccaatgtgctgcttacaagttctgactcaagtgtaattattcagcaggcagtaccttcaccaacctcaagtactgtaatcacccaggcaccatcctctaacaggccaattgtccctgtaccaggcccatttcctcttctgttacatcttcctaatggacaaaccatgcctgttgctattcctgcatcaattacaagttctaatgtgcatgttccagctgcagtcccactcgttcgaccagtcaccatggtgcctagtgttccaggaatcccaggtccttcctctccccaaccagtacagtcagaagcaaaaatgagattaaaagctgctttgacccagcaacatcctccagttaccaatggtgatactgtcaaaggtcatggtagcggattggttaggactcagtcagaggaatctcgaccgcagtcattacaacagccagccacatccactacagaaactccggcttctccagctcacacaactccacagacccaaagtacaagtggtcgtcggagaagagcagctaacgaagatcctgatgaaaaaaggagaaagtttttagagcgaaatagagcagcagcttcaagatgccgacaaaaaaggaaagtctgggttcagtctttagagaagaaagctgaagacttgagttcattaaatggtcagctgcagagtgaagtcaccctgctgagaaatgaagtggcacagctgaaacagcttcttctggctcataaagattgccctgtaaccgccatgcagaagaaatctggctatcatactgctgataaagatgatagttcagaagacatttcagtgccgagtagtccacatacagaagctatacagcatagttcggtcagcacatccaatggagtcagttcaacctccaaggcagaagctgtagccacttcagtcctcacccagatggcggaccagagtacagagcctgctctttcacagatcgttatggctccttcctcccagtcacagccctcaggaagttgattaaaaacctgcagtacaacagttttagatactcattagtgacttcaaagggaaatcaaggaaagaccagtttccatttatgcgaaatctgtggttgtaaattttttttttttacttgaaattaaatttggctctaaagttggtgtagcagcagttgatcagactgaaaaacggtttttagtctctggaaaaagactgattttgctttttttataaatattattagatttattaatttttctgtgctcaatgtgtaaattgtattataattcattgtgatttatttcacttttaatttgctggtgttttaataaatgggggtgttactgaatctttcttcccacttccatttcttttgaccaccccttaaccctcaactgtgacggtagtagtattatcatttataccaaagttttgcatagtccctgttgactttgtaatgttaacggagtcataaaagcactaggcaagagaaagatagaaatttgcttttaatctttttgccttttattttgcacattatgcaaaaggaaaaacattaaagaacacttttttttaagtgagtgaaaacatggtaaagacatacagtgcttttatgcacattgttaagctaaatcaaggtcatttataatcattttccttttttatttaagattttaagtaaacaaattttagaattttcagcatttcaaaaatgattttatttttcaagtcttaaattcaatattttacacctatgttttgaggctaaaaatatgaaattatataatgtatgatacagggttatcaaatatctaataatttttgaaattagctcttgtttttggtttttttgttgttgtttttacagatttcaggttacaaactgcaaagtttatgcataattaagtatggtatggttgccagaaaagcctaaaattactacttagaaaatttaagactgtttacccccattgtcttgtacttgcgagctaacttgtactattcttgtgaaagcactgtcatcttttagtagcaaattttgataatgtttctcgtggaaaaaaaaatcagtatctatctttagaacaatgtaattataatgtgggaagtgtgcatgaatgagagagagtgtgtgtgtatctgtgtgtgtgtgcgcgtgtgtgtgtgtcttttaatagtttatgccagcaatctttgcttgaatgtttaacgatgccttcagtgtgatgctggccaatagatgattgcagtttaaaatgtcattattgtgcaggcttggataactaacattccatgatgtagcttgtttctgatgagatgattgtaggtacatttttctcattatccaatcatctgtgggatacttagttttctaatgtgccattatctatttttattctgcagttatgttcaaaatacagtacatattttaaaatagaataaattgttaaacataaaattttaaaagtagtagatgtgcgtaagaaaactttgtaaaatagttatgagtcctacccagtagcaacttctggcattcaagcaggattccactatgtaaatatctgtaatgcatttataataagttgtgtagtttgtcctgcatccatactacactatttgctaaagtctcagtgccatctcctaatgagactgacattttaaaagtctgtatggaatatccttgataattcaaggaaatatccctcctgcctaagttccaaactgggaaacattcaaattatataaatgacatttcaggactttaagtatgaagataatgggaattttattgttttgctttttaaaatgagagcatttttatttgataattttttttaaatttttaatttttaactaatttcattattttaaagtaatcagtttttcaaatcatgattttgatatcattattctaaggagttatctcaaaggcacaaaatatgaattctgcaagaaggctattttttattgtagtttgaatgggttaggaaaagcctcaatttttcactcttaagtccttcagtacatttttctttcatcttattacttatgcaagttaaggttctttggtaacagaattcttgcaactgtaaaataaaactacatagatgtaagaagtcatgtaaacggttaacaagcttaccaaggttagcaaaactttcattgtaaatcagtctgtactgagcaaataaaaatcattattagttgtataaacacaaattccattttgactttcaggatgtcatactacttctgtacctagcattttcagtccttatatttgcaatgttacacaaactgtactattttcttttatgtgcagtttgcatgagtaaaccatcagagaataaattctatctttaaattatgttcataa

SEQ ID NO: 89558 - DNA, 1919 bp, Artificial Sequence
  derived and/or modified sequence
gtgggagcccgtggcctttaaagtgccgttcagccttttcctccaggggtgctttgtaaacacggctgtgctcagggctcgcgggtgaccgaaaggatcatgaactagtgacctggaaagggtactagatggaaacttgagaaaggactgcttattgataacagctaaggtattcctggaagcagagtaaataaagctcatggcccaccagctagaaagatttcctgaagaggtagtctgattggcttaactcgtattcttgccatgagaaaaagaatgtgataagttattcaacttatgaaattcaagttacatgtgaattctgccaggcaatacaaggacctgtggaatatgagtgatgacaaaccctttctatgtactgcgcctggatgtggccagcgttttaccaacgaggatcatttggctgtccataaacataaacatgagatgacactgaaatttggtccagcacgtaatgacagtgtcattgtggctgatcagaccccaacaccaacaagattcttgaaaaactgtgaagaagtgggtttgtttaatgagttggcgagtccatttgagaatgaattcaagaaagcttcagaagatgacattaaaaaaatgcctctagatttatcccctcttgcaacacctatcataagaagcaaaattgaggagccttctgttgtagaaacaactcaccaggatagtcctttacctcacccagagtctactaccagtgatgagaaggaagtaccattggcacaaactgcacagcccacatcagctattgttcgtccagcatcattacaggttcccaatgtgctgcttacaagttctgactcaagtgtaattattcagcaggcagtaccttcaccaacctcaagtactgtaatcacccaggcaccatcctctaacaggccaattgtccctgtaccaggcccatttcctcttctgttacatcttcctaatggacaaaccatgcctgttgctattcctgcatcaattacaagttctaatgtgcatgttccagctgcagtcccactcgttcgaccagtcaccatggtgcctagtgttccaggaatcccaggtccttcctctccccaaccagtacagtcagaagcaaaaatgagattaaaagctgctttgacccagcaacatcctccagttaccaatggtgatactgtcaaaggtcatggtagcggattggttaggactcagtcagaggaatctcgaccgcagtcattacaacagccagccacatccactacagaaactccggcttctccagctcacacaactccacagacccaaagtacaagtggtcgtcggagaagagcagctaacgaagatcctgatgaaaaaaggagaaagtttttagagcgaaatagagcagcagcttcaagatgccgacaaaaaaggaaagtctgggttcagtctttagagaagaaagctgaagacttgagttcattaaatggtcagctgcagagtgaagtcaccctgctgagaaatgaagtggcacagctgaaacagcttcttctggctcataaagattgccctgtaaccgccatgcagaagaaatctggctatcatactgctgataaagatgatagttcagaagacatttcagtgccgagtagtccacatacagaagctatacagcatagttcggtcagcacatccaatggagtcagttcaacctccaaggcagaagctgtagccacttcagtcctcacccagatggcggaccagagtacagagcctgctctttcacagatcgttatggctccttcctcccagtcacagccctcaggaagttgattaaaaacctgcagtacaacagttttagatactcattagtgacttcaaagggaaatcaaggaaagaccagtttccatttatgcgaaatctgtggttgtaaattt

SEQ ID NO: 89559 - DNA, 2113 bp, Artificial Sequence
  derived and/or modified sequence
gtgggagcccgtggcctttaaagtgccgttcagccttttcctccaggggtgctttgtaaacacggctgtgctcagggctcgcgggtgaccgaaaggatcatgaactagtgacctggaaagggtactagatggaaacttgagaaaggactgcttattgataacagctaaggtattcctggaagcagagtaaataaagctcatggcccaccagctagaaagatttcctgaagaggtagtctgattggcttaactcgtattcttgccatgagaaaaagaatgtgataagttattcaacttatgaaattcaagttacatgtgaattctgccaggcaatacaaggacctgtggaatatgagtgatgacaaaccctttctatgtactgcgcctggatgtggccagcgttttaccaacgaggatcatttggctgtccataaacataaacatgagatgacactgaaatttggtccagcacgtaatgacagtgtcattgtggctgatcagaccccaacaccaacaagattcttgaaaaactgtgaagaagtgggtttgtttaatgagttggcgagtccatttgagaatgaattcaagaaagcttcagaagatgacattaaaaaaatgcctctagatttatcccctcttgcaacacctatcataagaagcaaaattgaggagccttctgttgtagaaacaactcaccaggatagtcctttacctcacccagagtctactaccagtgatgagaaggaagtaccattggcacaaactgcacagcccacatcagctattgttcgtccagcatcattacaggttcccaatgtgctgcttacaagttctgactcaagtgtaattattcagcaggcagtaccttcaccaacctcaagtactgtaatcacccaggcaccatcctctaacaggccaattgtccctgtaccaggcccatttcctcttctgttacatcttcctaatggacaaaccatgcctgttgctattcctgcatcaattacaagttctaatgtgcatgttccagctgcagtcccactcgttcgaccagtcaccatggtgcctagtgttccaggaatcccaggtccttcctctccccaaccagtacagtcagaagcaaaaatgagattaaaagctgctttgacccagcaacatcctccagttaccaatggtgatactgtcaaaggtcatggtagcggattggttaggactcagtcagaggaatctcgaccgcagtcattacaacagccagccacatccactacagaaactccggcttctccagctcacacaactccacagacccaaagtacaagtggtcgtcggagaagagcagctaacgaagatcctgatgaaaaaaggagaaagtttttagagcgaaatagagcagcagcttcaagatgccgacaaaaaaggaaagtctgggttcagtctttagagaagaaagctgaagacttgagttcattaaatggtcagctgcagtgaatatattgctcgtgaaaggtgccagattgacagctttggaaactgaaggactctaattatccacagaccagagtgaagtcaccctgctgagaaatgaagtggcacagctgaaacagcttcttctggctcataaagattgccctgtaaccgccatgcagaagaaatctggctatcatacaaatatttcttcagctctattccataaggcagtgggcacccagatgtttccatatgcatggttgtgccttcttttgacctattgcaggaaaatgaataatttttcttttttccacccagctgctgataaagatgatagttcagaagacatttcagtgccgagtagtccacatacagaagctatacagcatagttcggtcagcacatccaatggagtcagttcaacctccaaggcagaagctgtagccacttcagtcctcacccagatggcggaccagagtacagagcctgctctttcacagatcgttatggctccttcctcccagtcacagccctcaggaagttgattaaaaacctgcagtacaacagttttagatactcattagtgacttcaaagggaaatcaaggaaagaccagtttccatttatgcgaaatctgtggttgtaaattt

SEQ ID NO: 89560 - DNA, 1989 bp, Artificial Sequence
  derived and/or modified sequence
gtgggagcccgtggcctttaaagtgccgttcagccttttcctccaggggtgctttgtaaacacggctgtgctcagggctcgcgggtgaccgaaaggatcatgaactagtgacctggaaagggtactagatggaaacttgagaaaggactgcttattgataacagctaaggtattcctggaagcagagtaaataaagctcatggcccaccagctagaaagtattcttgccatgagaaaaagaatgtgataagttattcaacttatgaaattcaagttacatgtgaattctgccaggcaatacaaggacctgtggaatatgagtgatgacaaaccctttctatgtactgcgcctggatgtggccagcgttttaccaacgaggatcatttggctgtccataaacataaacatgagatgacactgaaatttggtccagcacgtaatgacagtgtcattgtggctgatcagaccccaacaccaacaagattcttgaaaaactgtgaagaagtgggtttgtttaatgagttggcgagtccatttgagaatgaattcaagaaagcttcagaagatgacattaaaaaaatgcctctagatttatcccctcttgcaacacctatcataagaagcaaaattgaggagccttctgttgtagaaacaactcaccaggatagtcctttacctcacccagagtctactaccagtgatgagaaggaagtaccattggcacaaactgcacagcccacatcagctattgttcgtccagcatcattacaggttcccaatgtgctgcttacaagttctgactcaagtgtaattattcagcaggcagtaccttcaccaacctcaagtactgtaatcacccaggcaccatcctctaacaggccaattgtccctgtaccaggcccatttcctcttctgttacatcttcctaatggacaaaccatgcctgttgctattcctgcatcaattacaagttctaatgtgcatgttccagctgcagtcccactcgttcgaccagtcaccatggtgcctagtgttccaggaatcccaggtccttcctctccccaaccagtacagtcagaagcaaaaatgagattaaaagctgctttgacccagcaacatcctccagttaccaatggtgatactgtcaaaggtcatggtagcggattggttaggactcagtcagaggaatctcgaccgcagtcattacaacagccagccacatccactacagaaactccggcttctccagctcacacaactccacagacccaaagtacaagtggtcgtcggagaagagcagctaacgaagatcctgatgaaaaaaggagaaagtttttagagcgaaatagagcagcagcttcaagatgccgacaaaaaaggaaagtctgggttcagtctttagagaagaaagctgaagacttgagttcattaaatggtcagctgcagtgaatatattgctcgtgaaaggtgccagattgacagctttggaaactgaaggactctaattatccacagaccagagtgaagtcaccctgctgagaaatgaagtggcacagctgaaacagcttcttctggctcataaagattgccctgtaaccgccatgcagaagaaatctggctatcatactgctgataaagatgatagttcagaagacatttcagtgccgagtagtccacatacagaagctatacagcatagttcggtcagcacatccaatggagtcagttcaacctccaaggcagaagctgtagccacttcagtcctcacccagatggcggaccagagtacagagcctgctctttcacagatcgttatggctccttcctcccagtcacagccctcaggaagttgattaaaaacctgcagtacaacagttttagatactcattagtgacttcaaagggaaatcaaggaaagaccagtttccatttatgcgaaatctgtggttgtaaattttttttttttacttgaaattaaatttggctct

SEQ ID NO: 89561 - DNA, 2081 bp, Artificial Sequence
  derived and/or modified sequence
gtgggagcccgtggcctttaaagtgccgttcagccttttcctccaggggtgctttgtaaacacggctgtgctcagggctcgcgggtgaccgaaaggatcatgaactagtgacctggaaagggtactagatggaaacttgagaaaggactgcttattgataacagctaaggtattcctggaagcagagtaaataaagctcatggcccaccagctagaaagatttcctgaagaggtagtctgattggcttaactcgtattcttgccatgagaaaaagaatgtgataagttattcaacttatgaaattcaagttacatgtgaattctgccaggcaatacaaggacctgtggaatatgagtgatgacaaaccctttctatgtactgcgcctggatgtggccagcgttttaccaacgaggatcatttggctgtccataaacataaacatgagatgacactgaaatttggtccagcacgtaatgacagtgtcattgtggctgatcagaccccaacaccaacaagattcttgaaaaactgtgaagaagtgggtttgtttaatgagttggcgagtccatttgagaatgaattcaagaaagcttcagaagatgacattaaaaaaatgcctctagatttatcccctcttgcaacacctatcataagaagcaaaattgaggagccttctgttgtagaaacaactcaccaggatagtcctttacctcacccagagtctactaccagtgatgagaaggaagtaccattggcacaaactgcacagcccacatcagctattgttcgtccagcatcattacaggttcccaatgtgctgcttacaagttctgactcaagtgtaattattcagcaggcagtaccttcaccaacctcaagtactgtaatcacccaggcaccatcctctaacaggccaattgtccctgtaccaggcccatttcctcttctgttacatcttcctaatggacaaaccatgcctgttgctattcctgcatcaattacaagttctaatgtgcatgttccagctgcagtcccactcgttcgaccagtcaccatggtgcctagtgttccaggaatcccaggtccttcctctccccaaccagtacagtcagaagcaaaaatgagattaaaagctgctttgacccagcaacatcctccagttaccaatggtgatactgtcaaaggtcatggtagcggattggttaggactcagtcagaggaatctcgaccgcagtcattacaacagccagccacatccactacagaaactccggcttctccagctcacacaactccacagacccaaagtacaagtggtcgtcggagaagagcagctaacgaagatcctgatgaaaaaaggagaaagtttttagagcgaaatagagcagcagcttcaagatgccgacaaaaaaggaaagtctgggttcagtctttagagaagaaagctgaagacttgagttcattaaatggtcagctgcagtgaatatattgctcgtgaaaggtgccagattgacagctttggaaactgaaggactctaattatccacagaccagagtgaagtcaccctgctgagaaatgaagtggcacagctgaaacagcttcttctggctcataaagattgccctgtaaccgccatgcagaagaaatctggctatcatacaaatatttcttcagctctattccataaggcagtgggcacccagatgtttccatatgcatggttgtgccttcttttgacctattgcagctgctgataaagatgatagttcagaagacatttcagtgccgagtagtccacatacagaagctatacagcatagttcggtcagcacatccaatggagtcagttcaacctccaaggcagaagctgtagccacttcagtcctcacccagatggcggaccagagtacagagcctgctctttcacagatcgttatggctccttcctcccagtcacagccctcaggaagttgattaaaaacctgcagtacaacagttttagatactcattagtgacttcaaagggaaatcaaggaaagaccagtttccatttatgcgaaatctgtggttgtaaattt

SEQ ID NO: 89562 - DNA, 3505 bp, Artificial Sequence
  derived and/or modified sequence
aagcctgtgggagcccgtggcctttaaagtgccgttcagccttttcctccaggggtgctttgtaaacacggctgtgctcagggctcgcgggtgaccgaaaggatcatgaactagtgacctggaaagggtactagatggaaacttgagaaaggactgcttattgataacagctaaggtattcctggaagcagagtaaataaagctcatggcccaccagctagaaagtattcttgccatgagaaaaagaatgtgataagttattcaacttatgaaattcaagttacatgtgaattctgccaggcaatacaaggacctgtggaatatgagtgatgacaaaccctttctatgtactgcgcctggatgtggccagcgttttaccaacgaggatcatttggctgatcagaccccaacaccaacaagattcttgaaaaactgtgaagaagtgggtttgtttaatgagttggcgagtccatttgagaatgaattcaagaaagcttcagaagatgacattaaaaaaatgcctctagatttatcccctcttgcaacacctatcataagaagcaaaattgaggagccttctgttgtagaaacaactcaccaggatagtcctttacctcacccagagtctactaccagtgatgagaaggaagtaccattggcacaaactgcacagcccacatcagctattgttcgtccagcatcattacaggttcccaatgtgctgcttacaagttctgactcaagtgtaattattcagcaggcagtaccttcaccaacctcaagtactgtaatcacccaggcaccatcctctaacaggccaattgtccctgtaccaggcccatttcctcttctgttacatcttcctaatggacaaaccatgcctgttgctattcctgcatcaattacaagttctaatgtgcatgttccagctgcagtcccactcgttcgaccagtcaccatggtgcctagtgttccaggaatcccaggtccttcctctccccaaccagtacagtcagaagcaaaaatgagattaaaagctgctttgacccagcaacatcctccagttaccaatggtgatactgtcaaaggtcatggtagcggattggttaggactcagtcagaggaatctcgaccgcagtcattacaacagccagccacatccactacagaaactccggcttctccagctcacacaactccacagacccaaagtacaagtggtcgtcggagaagagcagctaacgaagatcctgatgaaaaaaggagaaagtttttagagcgaaatagagcagcagcttcaagatgccgacaaaaaaggaaagtctgggttcagtctttagagaagaaagctgaagacttgagttcattaaatggtcagctgcagagtgaagtcaccctgctgagaaatgaagtggcacagctgaaacagcttcttctggctcataaagattgccctgtaaccgccatgcagaagaaatctggctatcatactgctgataaagatgatagttcagaagacatttcagtgccgagtagtccacatacagaagctatacagcatagttcggtcagcacatccaatggagtcagttcaacctccaaggcagaagctgtagccacttcagtcctcacccagatggcggaccagagtacagagcctgctctttcacagatcgttatggctccttcctcccagtcacagccctcaggaagttgattaaaaacctgcagtacaacagttttagatactcattagtgacttcaaagggaaatcaaggaaagaccagtttccatttatgcgaaatctgtggttgtaaattttttttttttacttgaaattaaatttggctctaaagttggtgtagcagcagttgatcagactgaaaaacggtttttagtctctggaaaaagactgattttgctttttttataaatattattagatttattaatttttctgtgctcaatgtgtaaattgtattataattcattgtgatttatttcacttttaatttgctggtgttttaataaatgggggtgttactgaatctttcttcccacttccatttcttttgaccaccccttaaccctcaactgtgacggtagtagtattatcatttataccaaagttttgcatagtccctgttgactttgtaatgttaacggagtcataaaagcactaggcaagagaaagatagaaatttgcttttaatctttttgccttttattttgcacattatgcaaaaggaaaaacattaaagaacacttttttttaagtgagtgaaaacatggtaaagacatacagtgcttttatgcacattgttaagctaaatcaaggtcatttataatcattttccttttttatttaagattttaagtaaacaaattttagaattttcagcatttcaaaaatgattttatttttcaagtcttaaattcaatattttacacctatgttttgaggctaaaaatatgaaattatataatgtatgatacagggttatcaaatatctaataatttttgaaattagctcttgtttttggtttttttgttgttgtttttacagatttcaggttacaaactgcaaagtttatgcataattaagtatggtatggttgccagaaaactttgtaaaatagttatgagtcctacccagtagcaacttctggcattcaagcaggattccactatgtaaatatctgtaatgcatttataataagttgtgtagtttgtcctgcatccatactacactatttgctaaagtctcagtgccatctcctaatgagactgacattttaaaagtctgtatggaatatccttgataattcaaggaaatatccctcctgcctaagttccaaactgggaaacattcaaattatataaatgacatttcaggactttaagtatgaagataatgggaattttattgttttgctttttaaaatgagagcatttttatttgataattttttttaaatttttaatttttaactaatttcattattttaaagtaatcagtttttcaaatcatgattttgatatcattattctaaggagttatctcaaaggcacaaaatatgaattctgcaagaaggctattttttattgtagtttgaatgggttaggaaaagcctcaatttttcactcttaagtccttcagtacatttttctttcatcttattacttatgcaagttaaggttctttggtaacagaattcttgcaactgtaaaataaaactacatagatgtaagaagtcatgtaaacggttaacaagcttaccaaggttagcaaaactttcattgtaaatcagtctgtactgagcaaataaaaatcattattagttgtataaacacaaattccattttgactttcaggatgtcatactacttctgtacctagcattttcagtccttatatttgcaatgttacacaaactgtactattttcttttatgtgcagtttgcatgagtaaaccatcagagaataaattctatctttaaatt

SEQ ID NO: 89563 - DNA, 1518 bp, Artificial Sequence
  derived and/or modified sequence
atgaagttcaagctgcacgtgaacagcgcccggcagtacaaggacctctggaacatgtctgacgataagcccttcttatgcacggccccaggatgtggtcaacgatttacaaacgaggatcacctagcagtccacaagcataagcatgagatgacactgaagtttggtcctgctcgtaatgacagcgtgattgtggccgatcagacacccaccccaactcgatttctgaaaaactgcgaagaggttgggcttttcaacgaactggcatctccattcgaaaacgaattcaagaaagctagcgaagacgatatcaagaagatgcctttggacttaagccctctcgccaccccaattattcgtagtaagatcgaggaaccctcagtcgtcgaaacaacgcaccaagactcacccttgcctcacccggaatcaacgactagcgacgagaaagaggtgccactggcccagactgcccagcccacctcagcgattgttcgccccgccagcctgcaagttccaaacgtattattgacttcctccgatagcagcgtaattatccaacaggctgtgccctcccccacttcatcaacagtgataactcaggccccctctagcaaccgccctattgtgcccgtgccgggcccatttcctttgttgctgcacttacccaacggccagaccatgccagtggctatacctgcctctatcacgtcatctaatgtgcacgtgcccgctgctgtcccgcttgtccgcccagtgacaatggtgcccagcgtccccgggatacctggccctagttccccacagccagtccaatccgaagcaaaaatgagacttaaagctgccctgacccagcagcacccccctgttactaacggagatactgtgaaaggacatggaagcggcttagttcgcacacagagcgaggagagccggcctcagagcctgcagcaacctgcaaccagcactaccgagacgcccgctagccccgcccatacaaccccccagacacagtctacatcaggacgacggaggcgagcggctaatgaagacccagacgagaaacgccggaaattcctggagagaaaccgcgccgccgcatcgcgctgccgccaaaagaggaaggtttgggtccagagcctagaaaagaaagctgaggacctctcaagtctgaacggccagctccagagcgaggtgaccctgttgagaaacgaggtggctcagctgaaacagctgctgctcgctcataaggactgccccgttaccgccatgcagaaaaagagcggctaccatactgccgacaaagatgacagctccgaagacatcagtgtccccagctcaccccatactgaggccatccagcacagcagcgtgtctaccagtaatggcgtaagctcaacatccaaggcagaggcagtagccacttctgtcctcacacagatggctgaccagagcaccgagcccgccttgagtcaaattgttatggctccatcctctcagtctcaacctagtggtagctag

SEQ ID NO: 89564 - DNA, 1518 bp, Artificial Sequence
  derived and/or modified sequence
atgaagttcaagctgcacgtgaacagcgcccggcagtacaaggacctctggaatatgagtgacgataaaccctttctttgcacagctcctggctgtggacagcggtttaccaatgaagatcaccttgccgtgcataagcacaaacacgaaatgaccctcaaattcgggcccgccaggaatgactctgttattgtcgccgaccagaccccaacaccaacacggttccttaaaaactgtgaagaggtgggtctattcaacgaactggcaagccccttcgaaaacgaattcaaaaaggcttctgaagacgatatcaagaaaatgcccctcgatttatcaccactggccacccctatcatccgcagcaagatcgaggagccttccgtggtggagacaacacaccaagacagtccattgccccaccctgagtctacaactagcgacgagaaagaggtgccattagcacagactgcgcagcctactagcgctatcgtgagacccgccagcctgcaggtacccaacgtattgttaaccagttcggacagctctgtgattatccaacaggccgtgccaagcccaacctcgtccactgtaatcactcaggcacccagctctaacaggccaatcgtccccgtgcccggtccctttccactactgctgcatctgcccaacggtcagaccatgcccgttgcgattcctgccagtattacctccagtaatgtgcatgtgcccgccgcggttccactcgtgcgacctgtcaccatggtaccgagcgtgcctggaatacccggcccatctagcccccagcccgtacagtcagaggctaagatgcgacttaaggctgcgcttacgcaacagcacccacccgttacgaatggtgatactgtcaaaggacacggttctggtctggtgagaacacaatcagaagaatcgcgtccacagtccctgcagcagcccgctacctctacaaccgaaacccctgcttccccagcacataccacaccacaaacacagagtaccagcggtcgtcgcagaagggccgcaaacgaagaccccgacgagaaacgccggaagttccttgaacgtaacagggccgccgcgagtcgctgtagacaaaaaaggaaagtgtgggtccagtctctagagaagaaagccgaagacctgagtagcctcaacgggcagttgcagagcgaggttacgcttctccggaatgaagttgcacagctcaagcagttgcttctggcccataaagactgtcctgtgacggctatgcagaagaagagcggctaccacaccgcagacaaggatgacagtagcgaagacattagtgtccccagctctccgcacaccgaggcaatacaacattccagcgtatcgactagcaacggagtgagtagcacatccaaggccgaggcagtagcaacaagcgtgctgacacaaatggcagatcagtcgacagagcccgccctgtcacagatcgttatggcacccagctcccagtctcagcccagcgggagctag

SEQ ID NO: 89565 - DNA, 1188 bp, Artificial Sequence
  derived and/or modified sequence
atgaagttcaagctgcacgtgaacagcgcccggcagtacaaggacctgtggaacatgtccgacgacaagcctttcctgtgtaccgcccctgggtgcggccaacggttcacgaatgaagaccacctcgctgttcacaagcacaagcatgagatgacccttaagtttggccccgccaggaacgattccgtcattgtggcggaccagacccctactccgactaggttccttaagaactgtgaggaagttgggctattcaatgaactagcttctccgtttgagaatgaatttaagaaagcttctgaggatgacatcaagaagatgcccctggatctttccccactggccacccccatcatcaggagcaagattgaggagccttctgtcgtggagacaactcaccaggacagcccccttccccatccagagagcactaccagtgatgagaaagaagtgccactggctcagacagcgcagccaacctccgccatcgtgcgccccgccagcctccaggtgccgaatgtccttctcacctcatcagattccagcgtcattatacagcaggctgtcccaagtccaactagttccacagttataacccaagccccaagcagtaaccggcccatagtgcccgtgccaggtccctttccattgctcctgcatctgcccaatggccagaccatgccagtggccattccagcctcaatcacctcgtccaatgtacatgtgcccgctgcagtccccctggttcggcctgtgacaatggtccccagcgtaccaggtatacctggaccctccagcccacagcccgtccagtccgaggcaaagatgcgattaaaggccgccctgacccagcaacaccctcctgtaaccaacggtgacaccgttaaggggcatggctcaggcttggttcgtacacagtccgaggaatcccgtccccaatccctacagcaacccgcaacatcaacaacagagactcctgcctctccagctcacacaacaccgcaaacacaaagtacatccggacgccgacgcagggcagccaacgaggaccctgatgagaagcgaagaaaatttctcgagcggaatagagctgccgctagtaggtgtcggcagaaacgcaaggtctgggtacagagcctcgagaagaaggcggaggatttgtcttctctgaacgggcaattgcagtag

SEQ ID NO: 89566 - DNA, 1188 bp, Artificial Sequence
  derived and/or modified sequence
atgaagttcaagctgcacgtgaacagcgcccggcagtacaaggacctctggaacatgagcgatgacaaaccttttttatgcacagccccagggtgtgggcaacggtttacaaacgaggaccacctcgcagtacacaaacacaaacacgagatgaccctcaagtttggccctgctcgaaatgattctgtcattgtggcagaccagacccccactcccacccggtttctgaagaattgcgaggaggtgggcctctttaatgagctggcgagcccttttgagaacgagttcaaaaaggcctcggaggatgatattaaaaaaatgcctctggatttgagcccactggctaccccaattatcagaagtaagatcgaggagccatccgttgtcgagacaacacatcaggactcccccttacctcacccggagtcaacaacatctgacgagaaagaggtgcctctagcccagacagcgcagcccacttcagccattgttcggcccgcaagtctccaagtgccaaacgtcctgcttaccagcagcgactcctcagtgatcatccagcaggctgtgccttcaccaacaagtagcaccgttattacacaggctccaagctcaaatagacctatcgtgccagtcccaggacccttccccctgttgctccacttgccaaacggacagaccatgccagtggccatccccgcttccattacatcctccaatgttcacgttccggcagccgtgcccctcgttcgcccggtgacgatggtaccttccgtacccggaattcctgggccctcatctccgcagcctgtgcagtcggaagccaagatgaggttgaaggcagcgctgactcagcagcacccacccgtgacgaacggcgatacagtcaaaggccatgggtcggggcttgtaaggacacaaagtgaagagagccgaccccagtccttacaacaaccagcaacctccaccaccgaaacaccggccagcccagcacacacgacaccacagacccagagcacatccggtcgtcggcgccgcgctgctaatgaagatccagacgaaaaaaggcgaaaattcctggagcgcaaccgtgcggctgcaagccggtgcaggcaaaagcggaaggtgtgggtacaaagcctggaaaagaaggctgaagacctgagttctctgaatggccagctgcagtag

SEQ ID NO: 89567 - DNA, 1188 bp, Artificial Sequence
  derived and/or modified sequence
atgaagttcaagctgcacgtgaacagcgcccggcagtacaaggacctctggaacatgtctgacgacaagcctttcctctgcactgcccctgggtgcgggcagaggtttactaatgaggaccacctcgcggttcacaagcataagcatgagatgacgctgaagtttgggcctgctcggaatgattctgtgattgttgctgaccagactcccacccctacccggttcttgaaaaattgcgaggaggtcgggttgttcaatgagttggctagcccgttcgaaaatgagtttaagaaggccagcgaggacgacattaagaaaatgccccttgacctgagtccccttgctacacccattatccgatctaagatcgaggaaccaagcgtggttgagactactcaccaggatagtcccctgcctcatccagaatctacgacttccgacgagaaagaagtgcccttagcccaaacggcgcagcctacaagcgccattgtgaggccggcctcactccaggtccccaacgtcctgttgacgtcctcagactcgagtgtgatcatccagcaggccgtccctagccctacatcctctaccgtgattacccaggcaccctcttctaaccgccctattgttccagtccccgggccctttccactcttgctgcatctgcccaatggtcaaaccatgcccgtcgcaattcctgctagcattacgtcctctaatgtccatgtacccgcggccgtcccactggtgcgaccagtgaccatggtgcctagtgtacctggcatcccaggtccatcctctccgcagcccgttcagtcggaggctaaaatgcgcctgaaagcggctctaacgcaacagcacccgcctgtcactaatggagatacggtcaagggacacggaagcggccttgtgagaacacaaagtgaggagtcgagaccgcagagtctgcagcaacccgctacaagtactactgaaacgccagccagccccgctcatactacgccccagacacagtcaaccagcggtcgtaggagacgagctgccaacgaggaccctgacgagaaacgcagaaaatttctggaaagaaaccgagctgctgccagtagatgcaggcagaagcgtaaggtttgggttcaatccctggagaaaaaagcagaagacctgtcctccctgaatggccaactgcaatag

SEQ ID NO: 89568 - DNA, 1449 bp, Artificial Sequence
  derived and/or modified sequence
atgaagttcaagctgcacgtgaacagcgcccggcagtacaaggacttgtggaacatgtccgatgacaaacctttcctctgcacggcccctgggtgcggccaacggtttactaatgaggaccatctggctgatcagacccccacccccactaggttcctcaaaaattgcgaagaggtcggtctgtttaacgagttggcctctccattcgaaaatgagttcaagaaggccagtgaagacgatattaaaaagatgccgttagacttgtctccactggccactccaatcatccgcagcaaaatcgaggagccatctgtggtggagacaacccaccaggacagtccgctcccacaccctgagtcaacaacgagcgatgagaaagaagtgccactcgcacagactgcccaaccaacatcagcaatagtgcgcccagcgtcgctacaggtgccaaacgtcctgctcacctctagcgatagcagtgtgattatccagcaggccgtgcccagtcccacatctagcaccgtgatcacccaggcgccctcctctaatcgtcccatcgttcctgttcccggtccttttcctttgctccttcacctgcccaacgggcagactatgccggtagctatcccggcaagtattacatcttctaacgtgcacgttccggctgccgtaccattagtgcgtccggtaacaatggtgccatctgtgccgggcatccccggcccaagcagcccccaaccagtgcagtcagaagccaagatgcggctgaaagcagcactcactcaacagcaccctcccgtgaccaacggagacaccgtcaaaggccacgggagtgggctggtccgcacccagtccgaagagagtcggcctcagtccctgcagcaacccgcgacatcaacaaccgagaccccagcttcccccgctcacaccaccccccaaacacagtcaacttccgggcgccgacggagggctgccaacgaggacccagacgaaaagcgcaggaagttcttggagcgaaaccgggcagcagccagtaggtgccgccaaaaacgtaaggtgtgggtgcagtccctcgagaagaaagcggaggatttgagcagcttgaacggccagctgcagtctgaggttaccttgctgaggaatgaggtcgcgcagctgaagcagctgttgttggcgcataaagactgtcctgtgaccgccatgcaaaaaaagtccgggtaccataccgcggacaaggatgattctagcgaagatatctccgtgccatcatcccctcacaccgaggccattcaacacagcagtgtgagtacttccaacggagtttcaagcacgagcaaggcggaggccgttgccactagcgttctgacacaaatggcagatcagtccaccgaacctgctctctctcagattgttatggcaccttcatcccagagccagcctagcggcagctag

SEQ ID NO: 89569 - DNA, 1518 bp, Artificial Sequence
  derived and/or modified sequence
atgaaatttaagttgcacgtcaactccgcccgacaatataaagatttgtggaacatgtctgatgacaaacctttcctctgtaccgcccctggatgcggacagaggtttacaaatgaagatcacctggcagtgcataagcacaagcatgagatgacgctcaagtttggccctgcgaggaacgatagtgtaatagtcgcagaccaaacacctacccccacaagatttctaaagaactgtgaagaagtcggcctcttcaacgaattggcttcccctttcgaaaacgagtttaaaaaggccagtgaagatgacattaagaaaatgcccctggacttgtccccacttgctactccaattattagatctaagatcgaggagccctctgtcgtggaaaccacccaccaggattcacctttgccccaccccgaatctaccacgtctgatgaaaaggaggtgccactcgctcagactgcccaacccacctctgctattgtgcggccagccagtttgcaagtaccgaatgttttactgacgtcgagcgattcttccgtcatcattcaacaggccgttccttctcctactagcagtaccgtcattacacaggcgccaagctccaacagaccaatagtcccagtgcccggtccatttccgcttctgttgcatctgcctaatggtcaaacaatgccagtggcaatcccagcttcaattacctcgtcgaacgttcatgtgccagcggctgtgcctttggtacggcctgtcaccatggtccctagcgtgccgggaattcccggaccctcctcaccccagcccgttcagtcagaggccaaaatgagacttaaggccgcactgacccagcaacaccctcctgtcaccaatggtgacacagttaagggtcatgggagtggcctggtccggacgcagagcgaggagtctaggcctcagagcctgcaacagcccgcaacctctactactgagactcccgctagtcctgcacacactactcctcagacccagtccacatcggggcgtagaaggcgcgctgcaaatgaggacccagatgagaaacggaggaaatttttggagcgcaatagagcagccgcatctcggtgtaggcagaagcgtaaggtatgggtgcagtccctcgaaaagaaagcagaggatctttccagtctgaatggtcaactgcaatcagaggttaccctcctgaggaacgaggtggctcagctcaagcaacttttgttggctcataaggattgccctgtcacagccatgcagaaaaagtctggctaccacaccgccgacaaggatgatagttccgaggacatcagcgtcccctcatcaccacacaccgaagccatccagcatagttcagtgtccactagtaacggagtcagcagtacgagcaaagccgaggcagtcgcgacgtccgtccttacgcagatggccgaccagtctacagaaccagctttaagtcaaatcgttatggccccttcttcacagtcccagccttcaggatcgtag

SEQ ID NO: 89570 - DNA, 1518 bp, Artificial Sequence
  derived and/or modified sequence
atgaagttcaaattacatgtgaattccgcacgccagtacaaagatctgtggaacatgtcagacgataagcccttcctgtgtacagcgccagggtgtggccaaaggttcacaaacgaagatcatctggccgtgcataagcacaaacacgaaatgacattaaagttcggtcccgctaggaacgactctgtaatcgtggccgaccaaactccaaccccaaccagattcctcaagaactgtgaggaggtaggattatttaacgaactcgcatccccctttgagaacgagttcaagaaagcatcagaggatgatataaaaaaaatgcccctcgacctcagcccactggccaccccaatcatcagaagcaagatagaggaaccgtccgtcgtggaaacgactcaccaggattccccactgccccatcctgaatctaccactagcgatgagaaggaggttcccttagcccagacagctcagccaacatcagctatcgttcgcccagcgtcattacaggttcccaatgtgctcctgacatcttctgattcatctgtcatcattcaacaggcagtgccatccccaacctcaagcactgtgattacacaagccccatcatctaataggcctatcgtccctgtccccggacccttccctcttcttctgcacctccctaacggacagaccatgcctgtcgctatacccgcaagtattacatcgagcaacgtccatgtcccagcagcggtccctctagtgcgacccgttaccatggtgcccagtgtcccaggtattcccggtccctcttcaccccagcctgtgcagagtgaagctaaaatgcgactgaaagccgcactgactcaacagcatccacctgtaacgaatggggataccgtgaaaggccatgggagtggcctggtacggacacagtcagaggagtctcgacctcagtcattgcagcaaccagccaccagtaccaccgaaaccccggcatccccggcacacacgaccccccagacacagtccacctcagggaggagacgacgggctgctaacgaagaccctgatgaaaaacggaggaagttcttggagcgaaaccgcgcagcggcatctcggtgtcgacagaagagaaaggtgtgggtacagagtcttgaaaagaaggccgaagatctgtcttctctgaatggccagctccagagtgaagtgacgttactgaggaacgaggttgcacaattaaagcagcttctcttagcccacaaggattgtcccgtgacagccatgcaaaagaaatccggctatcacaccgccgacaaggacgattcatctgaggacatttctgtgccttcatcgccgcacacagaggctatccagcactcatcagtgtcaacatctaacggcgtgtcctccactagtaaagccgaagccgtcgcaacatcagtgctaacccagatggcagaccagagtactgaacccgctctgtcgcagatcgtaatggctccttcctcgcagtcccaacccagtggttcttag

SEQ ID NO: 89571 - DNA, 1188 bp, Artificial Sequence
  derived and/or modified sequence
atgaagtttaaattacatgtaaattccgctcggcaatataaggacctctggaatatgagcgacgataagccttttttgtgtaccgcacccggttgtggccaacgttttactaacgaggatcatctggctgtccacaaacacaagcacgagatgacactgaagttcgggcctgcgcgtaatgactccgtaatagtggccgaccagactcctacccctacccgattcctgaaaaactgtgaagaagtggggctctttaacgagctcgcctcaccctttgagaatgaatttaagaaggcctcagaggacgacatcaaaaagatgccgctggatctgtctccactggccacccccataattcggtccaaaatcgaggagccttcagtggtagaaacaacccaccaagacagccccctgccccatcccgaatctaccactagcgacgaaaaagaggtgccactagcgcagactgcacaacctacttctgccatcgtgaggccggctagcctacaggtccctaacgtgctgttaacttcttcagacagctccgtgattattcaacaggccgtcccttctcctacaagctctaccgtgatcacccaagccccttcttccaaccggccaatcgtccctgtacccggaccctttccactccttctacacctccctaacggacagacaatgcctgttgcaataccggctagcattacatcctccaacgtccatgtgcccgcagccgtgccgctggtgagaccagtcacgatggttccaagtgtccctgggataccagggccttcgtcaccgcagcccgtgcagtccgaagccaagatgagactgaaggcggcacttacccagcagcaccctccagtcacaaatggcgatacagtcaaaggtcatgggtcaggcctggtgagaactcaatcggaggagtctagaccgcagtcgctgcagcaacccgcaacttccaccaccgagacccccgcatcccctgctcacactacccctcagacacagagcaccagcggtagaagacgcagagccgcaaacgaagatccggacgaaaaaaggcgaaaatttttggaacgaaacagggccgctgcttctcgctgtcgtcagaaacgcaaagtttgggttcagtcgctggagaagaaggctgaggacttgtcctctttgaatggacaactccagtag

SEQ ID NO: 89572 - DNA, 1188 bp, Artificial Sequence
  derived and/or modified sequence
atgaagttcaagctccacgtgaactcagccagacagtacaaggacctctggaacatgagtgatgataaaccgttcctgtgcacagctccagggtgtggtcaacgctttacaaatgaagaccatcttgcggtgcacaaacacaaacacgagatgaccttaaagttcggaccagccagaaacgattccgtcatagtggctgatcaaacgcctacaccaacgcgctttcttaagaattgtgaggaggttgggctattcaacgaactcgcgtctccttttgagaacgagttcaaaaaagcctccgaggatgacataaagaagatgcccctcgatcttagtccgctggctacccctatcattcggagtaaaattgaggaaccgtccgttgttgagaccacccaccaggacagtcccctaccacatcctgaaagcacaaccagtgacgagaaggaggtacccctggctcagactgctcagccaacatctgctatagtccgcccagcgagtctgcaggttcctaacgttctcctcacatccagtgatagtagtgtgatcattcagcaggccgtcccaagccctacaagcagtactgtgatcacccaagccccatcctccaataggcctattgtgccggtccctgggccttttccacttcttctgcacttgccgaatggccaaactatgccagtggcaattcctgccagtattacttctagtaacgtgcatgtgcccgcagcagttccccttgttagacctgtcacaatggttccctccgtacctggtattccaggcccaagctctccacagcctgtccagtctgaagccaaaatgaggttgaaagcagccctcacacaacagcatcctcctgtaactaatggggatactgtcaagggccacgggtccggccttgtgcgcacccagtccgaagaatctcggcctcaaagtttgcagcagccagcaacaagcactacagagacgcctgctagcccggctcatacgactccccaaacccaatctaccagtggacgccgaagaagagctgccaacgaggaccccgacgagaaaagaagaaagttcctggagaggaatagagcagccgctagtcgttgccgccaaaagaggaaagtctgggtgcagtcgttagagaaaaaagctgaggatctgtcctccttgaacggccagctccagtag

SEQ ID NO: 89573 - DNA, 1188 bp, Artificial Sequence
  derived and/or modified sequence
atgaaatttaagctgcacgtaaacagtgctcgacagtataaggacctttggaatatgtccgacgacaagccattcctttgcactgcaccagggtgcggacagcggttcacaaacgaagatcacctggccgtgcacaaacacaaacacgaaatgaccttaaagtttgggcctgcgaggaatgactccgtgattgtggccgaccagacaccgactcccacacgattcctgaaaaattgcgaggaagttggcttgtttaatgagctggcttcacctttcgaaaacgagtttaaaaaggcatccgaggacgacatcaaaaaaatgcctctagatttgagtcctctcgctacaccaattattagaagtaaaatcgaagaaccatcagtcgtggagacaacgcaccaggacagtccccttccccatccagagagcaccacgtccgatgaaaaagaggtcccactcgcccagaccgcccagccaacctcagctatagtaagaccagccagcctccaggtgcccaacgtgcttctgacatccagtgactcttcagttatcatccagcaggccgtgccaagcccaaccagcagtaccgtcatcacccaggctccttccagcaatcgacccatcgtgcctgtgccaggcccatttcccttgcttctgcacctgcctaatggccagaccatgccagtggccataccggcatcgatcacaagctccaacgttcacgtgcccgctgctgtgccactggtgcgccctgtgaccatggtaccttcagtgccaggcattcccggaccaagctcgccccagccagtgcagtctgaggccaaaatgagacttaaagctgctcttacccaacaacaccctccggtgaccaacggggatactgttaaagggcatggctcgggattggtcaggactcagagtgaagagagccgaccccagtcattgcagcagcctgcaacaagcaccactgaaactcccgcaagccctgcccacacaaccccccagacccaatccacatccggaaggagaagacgggcagccaatgaagatcccgatgagaagcggcgaaaattccttgagagaaatcgagccgcagcctcacgatgtcgacagaagaggaaggtgtgggtccaatccctggaaaaaaaggccgaagatctttcgagtctgaatggccaactgcaatag

SEQ ID NO: 89574 - DNA, 1449 bp, Artificial Sequence
  derived and/or modified sequence
atgaagttcaagctgcatgtgaactcagcccgacagtataaagacctttggaatatgtccgatgacaagccatttctttgcaccgcaccgggttgtggtcagcggttcactaatgaagaccaccttgccgaccagactcctactcctactcgtttcctcaagaattgtgaggaggttggtttgttcaatgagttggcctcccccttcgagaacgaattcaagaaagcgagcgaagacgacataaaaaagatgccgcttgatttatccccacttgccactccgatcatccgctcgaagattgaagagcctagcgtggttgagaccacgcatcaagacagccctctccctcaccctgagagtacaacgtccgacgaaaaagaagtaccgctagctcagaccgcacagccgacgtccgccatcgttcggcctgctagcctgcaggtgccaaacgttctgctcacatcatccgactcttccgtcatcatccagcaggctgtgcccagccccacatctagtactgtcataacacaagccccttcatcaaatagaccaatagtgcctgtcccaggcccatttccgttacttctgcatctgcctaacggccaaacaatgcccgtcgccatccccgcttccatcacatcctctaatgtgcatgtgccagcggctgtacctttggtgcggccagttacaatggtcccgtccgtcccaggcatcccaggaccctcctccccccagcccgtgcagagtgaagccaaaatgagacttaaagctgccctcacacagcagcacccgccagtgactaacggtgacaccgttaagggacacgggagcggcttggtgcgtacccaatctgaggaatctcggccacagagccttcagcagcccgctacatcaaccactgagactccagcctctcccgcacatacaacacctcaaactcagtcaacctcagggagaagaagaagggccgcaaatgaggaccccgatgagaaacgcagaaagtttctcgagcgcaatcgcgcagccgcttcaaggtgtagacaaaagcggaaagtgtgggtgcagtcacttgagaagaaagctgaggacctgagcagcctgaacggccagttgcagagcgaggtcacactgttgcgcaacgaggtcgcacagcttaagcaattattacttgcgcataaggattgtcctgtgaccgctatgcagaagaagtctggctaccacaccgcggacaaggacgactctagtgaagatatatccgttccatcatcaccccacaccgaagcaattcaacattcctccgtgagtacatcaaacggagtgtcaagtaccagtaaagccgaggctgtggctacgtctgtcctgacccagatggcggatcagtcaacggagccagctctgagccagattgttatggcaccaagctctcagagtcagcctagtggcagctag

SEQ ID NO: 89575 - DNA, 1518 bp, Artificial Sequence
  derived and/or modified sequence
atgaagttcaagctgcacgtgaacagcgccagacagtacaaggacctgtggaacatgagcgacgacaagcccttcctgtgcaccgcccccggctgcggccagagattcaccaacgaggaccacctggccgtgcacaagcacaagcacgagatgaccctgaagttcggccccgccagaaacgacagcgtgatcgtggccgaccagacccccacccccaccagattcctgaagaactgcgaggaggtgggcctgttcaacgagctggccagccccttcgagaacgagttcaagaaggccagcgaggacgacatcaagaagatgcccctggacctgagccccctggccacccccatcatcagaagcaagatcgaggagcccagcgtggtggagaccacccaccaggacagccccctgccccaccccgagagcaccaccagcgacgagaaggaggtgcccctggcccagaccgcccagcccaccagcgccatcgtgagacccgccagcctgcaggtgcccaacgtgctgctgaccagcagcgacagcagcgtgatcatccagcaggccgtgcccagccccaccagcagcaccgtgatcacccaggcccccagcagcaacagacccatcgtgcccgtgcccggccccttccccctgctgctgcacctgcccaacggccagaccatgcccgtggccatccccgccagcatcaccagcagcaacgtgcacgtgcccgccgccgtgcccctggtgagacccgtgaccatggtgcccagcgtgcccggcatccccggccccagcagcccccagcccgtgcagagcgaggccaagatgagactgaaggccgccctgacccagcagcacccccccgtgaccaacggcgacaccgtgaagggccacggcagcggcctggtgagaacccagagcgaggagagcagaccccagagcctgcagcagcccgccaccagcaccaccgagacccccgccagccccgcccacaccaccccccagacccagagcaccagcggcagaagaagaagagccgccaacgaggaccccgacgagaagagaagaaagttcctggagagaaacagagccgccgccagcagatgcagacagaagagaaaggtgtgggtgcagagcctggagaagaaggccgaggacctgagcagcctgaacggccagctgcagagcgaggtgaccctgctgagaaacgaggtggcccagctgaagcagctgctgctggcccacaaggactgccccgtgaccgccatgcagaagaagagcggctaccacaccgccgacaaggacgacagcagcgaggacatcagcgtgcccagcagcccccacaccgaggccatccagcacagcagcgtgagcaccagcaacggcgtgagcagcaccagcaaggccgaggccgtggccaccagcgtgctgacccagatggccgaccagagcaccgagcccgccctgagccagatcgtgatggcccccagcagccagagccagcccagcggcagctag

SEQ ID NO: 89576 - DNA, 1188 bp, Artificial Sequence
  derived and/or modified sequence
atgaagttcaagctgcacgtgaacagcgccagacagtacaaggacctgtggaacatgagcgacgacaagcccttcctgtgcaccgcccccggctgcggccagagattcaccaacgaggaccacctggccgtgcacaagcacaagcacgagatgaccctgaagttcggccccgccagaaacgacagcgtgatcgtggccgaccagacccccacccccaccagattcctgaagaactgcgaggaggtgggcctgttcaacgagctggccagccccttcgagaacgagttcaagaaggccagcgaggacgacatcaagaagatgcccctggacctgagccccctggccacccccatcatcagaagcaagatcgaggagcccagcgtggtggagaccacccaccaggacagccccctgccccaccccgagagcaccaccagcgacgagaaggaggtgcccctggcccagaccgcccagcccaccagcgccatcgtgagacccgccagcctgcaggtgcccaacgtgctgctgaccagcagcgacagcagcgtgatcatccagcaggccgtgcccagccccaccagcagcaccgtgatcacccaggcccccagcagcaacagacccatcgtgcccgtgcccggccccttccccctgctgctgcacctgcccaacggccagaccatgcccgtggccatccccgccagcatcaccagcagcaacgtgcacgtgcccgccgccgtgcccctggtgagacccgtgaccatggtgcccagcgtgcccggcatccccggccccagcagcccccagcccgtgcagagcgaggccaagatgagactgaaggccgccctgacccagcagcacccccccgtgaccaacggcgacaccgtgaagggccacggcagcggcctggtgagaacccagagcgaggagagcagaccccagagcctgcagcagcccgccaccagcaccaccgagacccccgccagccccgcccacaccaccccccagacccagagcaccagcggcagaagaagaagagccgccaacgaggaccccgacgagaagagaagaaagttcctggagagaaacagagccgccgccagcagatgcagacagaagagaaaggtgtgggtgcagagcctggagaagaaggccgaggacctgagcagcctgaacggccagctgcagtag

SEQ ID NO: 89577 - DNA, 1449 bp, Artificial Sequence
  derived and/or modified sequence
atgaagttcaagctgcacgtgaacagcgccagacagtacaaggacctgtggaacatgagcgacgacaagcccttcctgtgcaccgcccccggctgcggccagagattcaccaacgaggaccacctggccgaccagacccccacccccaccagattcctgaagaactgcgaggaggtgggcctgttcaacgagctggccagccccttcgagaacgagttcaagaaggccagcgaggacgacatcaagaagatgcccctggacctgagccccctggccacccccatcatcagaagcaagatcgaggagcccagcgtggtggagaccacccaccaggacagccccctgccccaccccgagagcaccaccagcgacgagaaggaggtgcccctggcccagaccgcccagcccaccagcgccatcgtgagacccgccagcctgcaggtgcccaacgtgctgctgaccagcagcgacagcagcgtgatcatccagcaggccgtgcccagccccaccagcagcaccgtgatcacccaggcccccagcagcaacagacccatcgtgcccgtgcccggccccttccccctgctgctgcacctgcccaacggccagaccatgcccgtggccatccccgccagcatcaccagcagcaacgtgcacgtgcccgccgccgtgcccctggtgagacccgtgaccatggtgcccagcgtgcccggcatccccggccccagcagcccccagcccgtgcagagcgaggccaagatgagactgaaggccgccctgacccagcagcacccccccgtgaccaacggcgacaccgtgaagggccacggcagcggcctggtgagaacccagagcgaggagagcagaccccagagcctgcagcagcccgccaccagcaccaccgagacccccgccagccccgcccacaccaccccccagacccagagcaccagcggcagaagaagaagagccgccaacgaggaccccgacgagaagagaagaaagttcctggagagaaacagagccgccgccagcagatgcagacagaagagaaaggtgtgggtgcagagcctggagaagaaggccgaggacctgagcagcctgaacggccagctgcagagcgaggtgaccctgctgagaaacgaggtggcccagctgaagcagctgctgctggcccacaaggactgccccgtgaccgccatgcagaagaagagcggctaccacaccgccgacaaggacgacagcagcgaggacatcagcgtgcccagcagcccccacaccgaggccatccagcacagcagcgtgagcaccagcaacggcgtgagcagcaccagcaaggccgaggccgtggccaccagcgtgctgacccagatggccgaccagagcaccgagcccgccctgagccagatcgtgatggcccccagcagccagagccagcccagcggcagctag

SEQ ID NO: 89578 - protein, 487 aa, Artificial Sequence
  derived and/or modified sequence
MSDDKPFLCTAPGCGQRFTNEDHLAVHKHKHEMTLKFGPARNDSVIVADQTPTPTRFLKNCEEVGLFNELASPFENEFKKASEDDIKKMPLDLSPLATPIIRSKIEEPSVVETTHQDSPLPHPESTTSDEKEVPLAQTAQPTSAIVRPASLQVPNVLLTSSDSSVIIQQAVPSPTSSTVITQAPSSNRPIVPVPGPFPLLLHLPNGQTMPVAIPASITSSNVHVPAAVPLVRPVTMVPSVPGIPGPSSPQPVQSEAKMRLKAALTQQHPPVTNGDTVKGHGSGLVRTQSEESRPQSLQQPATSTTETPASPAHTTPQTQSTSGRRRRAANEDPDEKRRKFLERNRAAASRCRQKRKVWVQSLEKKAEDLSSLNGQLQSEVTLLRNEVAQLKQLLLAHKDCPVTAMQKKSGYHTADKDDSSEDISVPSSPHTEAIQHSSVSTSNGVSSTSKAEAVATSVLTQMADQSTEPALSQIVMAPSSQSQPSGS

SEQ ID NO: 89579 - protein, 219 aa, Artificial Sequence
  derived and/or modified sequence
MSDDKPFLCTAPGCGQRFTNEDHLAVHKHKHEMTLKFGPARNDSVIVADQTPTPTRFLKNCEEVGLFNELASPFENEFKKASEDDIKKMPLDLSPLATPIIRSKIEEPSVVETTHQDSPLPHPESTTSDEKEVPLAQTAQPTSAIVRPASLQVPNVLLTSSDSSVIIQQAVPSPTSSTVITQAPSSNRPIVSFDQSPWCLVFQESQVLPLPNQYSQKQK

SEQ ID NO: 89580 - DNA, 1464 bp, Artificial Sequence
  derived and/or modified sequence
atgagcgacgataagccttttttgtgcacagcgccaggttgcggccaaagatttacaaatgaagatcatctggccgtacataagcacaagcatgagatgacgttaaagttcggtccagctcggaacgattctgttattgtggccgatcagacccccacacccacacggtttttaaaaaactgcgaagaagtcggcttattcaacgaattagccagtcccttcgagaatgaattcaaaaaggcgtctgaagatgacatcaagaaaatgccactcgacctgagcccactggcgacaccaataatcagaagtaagatagaagagcctagtgtggtggagacaactcaccaggacagtcccctgccccaccctgagtcaacaactagtgatgagaaggaggtgcctctggcccagacggcccagccaaccagcgcaattgtccgccccgcctctctacaagtacctaacgtgcttcttacctcctccgactcctccgtgatcattcaacaggccgtcccgagccctacctctagtaccgtgataacacaggcacctagctcgaacaggcccatcgtcccagtgcccggtcccttccccctgctcttgcaccttcccaatgggcagacgatgccggtggctatacctgcatctatcacgtcttcaaacgtacacgtgcccgccgcagttcccctggtgaggcccgttacaatggttcccagcgtacccggaattcctggcccatcctctccccaacccgtgcagagtgaggcaaaaatgcggctcaaagccgccttaacgcaacagcatcctccagttaccaacggagatacggtgaagggtcatggtagcggcttagtgcgtacacagagcgaggaatcaagaccgcagagtctgcagcagcccgccacttctacgactgaaacccctgccagtcccgcacacactactccccagacgcagagcacgtccgggcgtcgccggcgggcagccaacgaggatccggacgagaagcgcaggaaattcctcgaacgaaatagggcggctgccagcagatgtcgccaaaaacgcaaagtgtgggtgcagagcctggagaaaaaagctgaagaccttagctctctaaatggacaacttcagagcgaagttaccctgctgcgcaatgaggtcgcccagctcaagcaactgctattggcccacaaagattgtccagtcactgctatgcagaagaagtccggctaccataccgcagacaaagatgattcttcagaggatatcagcgtcccatcctcacctcacactgaggcaatccagcactcctcagtcagtacttcaaacggcgtgtcttctacgtcgaaagctgaggccgtcgccacctcagtgcttacgcagatggcagaccagagtacagaaccagccctgagccagatcgtcatggctccttcaagccagtcacagccctcgggtagctag

SEQ ID NO: 89581 - DNA, 1134 bp, Artificial Sequence
  derived and/or modified sequence
atgtccgacgataaacccttcctctgtaccgcccccggctgtgggcagcggtttaccaatgaggatcacttggcagtccacaaacacaagcacgaaatgaccctgaagttcggtcctgctagaaacgatagtgttatcgtagcggaccagacaccaacccctaccagatttctcaaaaactgtgaagaggtgggcctgtttaatgagcttgcatcccccttcgaaaatgagtttaaaaaggcttccgaagacgacatcaagaagatgcccctggacctcagccctttggctacacccattatccgttcaaagatagaggaaccgtcagtggtggagacaactcatcaggatagccctcttccgcacccagagtccacaacgagtgatgagaaagaggtgccactcgcccaaacagctcaacctacaagtgccatcgtcaggcccgccagcttacaagtcccaaacgttctacttaccagctcagactccagcgtgatcattcagcaggctgtgccgtcccccacatcttcaacagtgataacgcaagccccgagctctaatcgacccatagtgcctgtgccaggtcccttcccattgctgctgcacctgccaaacggccaaactatgcctgttgccattcctgccagcattacatcgtcaaatgtgcatgtgccagccgctgtgccactagttcgccccgttaccatggtcccatcagtgcccggaataccagggcccagttccccgcagcctgtgcagagtgaggccaaaatgcggttaaaggctgcccttacccagcagcacccccccgtgactaatggggatactgttaagggtcacggttccggtctggtgaggacccaatcggaagagtcacggccgcagtcactgcaacagcccgccacatctaccactgagactccagcttcacctgcccacaccactcctcagacccagtcgactagcggccggcgtcggcgggcagccaatgaagaccccgatgaaaaacgtaggaagtttctggaaaggaatcgggctgctgcaagtaggtgtcgccagaaacgaaaagtctgggtgcagtctctggaaaagaaagccgaagacctgtccagtcttaacggacaacttcagtag

SEQ ID NO: 89582 - DNA, 1464 bp, Artificial Sequence
  derived and/or modified sequence
atgtctgatgacaagcccttcctgtgcacagcccctggctgcggccagcgcttcaccaatgaagaccacctggccgtgcacaagcacaagcatgagatgaccctgaagtttggacctgccagaaatgacagcgtcatcgtggccgaccagacccccacccccacccgcttcctgaagaactgtgaggaggtgggcctcttcaatgagctggccagcccctttgaaaatgagttcaagaaggcctctgaagatgacatcaagaagatgcccctggacctgagccccctggccacccccatcatccgcagcaagattgaggagcccagcgtggtggagaccacccaccaggacagccccctgccccaccctgagagcaccaccagtgatgagaaggaggtgcccctggcccagacagcccagcccaccagcgccatcgtgcggcctgccagcctgcaggtgcccaacgtgctgctgaccagcagtgacagcagcgtcatcatccagcaggccgtgcccagccccaccagcagcaccgtcatcacccaggcccccagcagcaaccggcccatcgtgcctgtgcccggccccttccccctgctgctgcacctgcccaacggccagaccatgcctgtggccatcccagccagcatcaccagcagcaatgtgcacgtgcctgctgctgtgcccctggtgcggcctgtgaccatggtgcccagcgtgcccggcatccctggccccagcagcccccagcctgtgcagagcgaggccaagatgaggctgaaggccgccctgacccagcagcacccccctgtgaccaatggagacacagtgaagggccacggcagcggcctggtgaggacccagagcgaggagagccggccccagagcctgcagcagcctgccaccagcaccacagagaccccagccagccctgcccacaccaccccccagacccagagcaccagcggcagaagaagaagagctgccaatgaagatcctgatgagaagaggaggaagttcctggagaggaacagagctgctgccagccgctgccggcagaagaggaaggtgtgggtgcagagcctggagaagaaggccgaggacctgagcagcctgaatggccagctgcagagcgaggtgaccctgctgagaaatgaggtggcccagctgaagcagctgctgctggcccacaaggactgccctgtgacagccatgcagaagaagagcggctaccacacagctgacaaggatgacagcagcgaggacatctctgtgcccagcagcccccacacagaggccatccagcacagctctgtgtccaccagcaatggagtgagcagcaccagcaaggccgaggccgtggccacctctgtgctgacccagatggctgaccagagcacagagcccgccctgagccagatcgtgatggcccccagcagccagagccagcccagcggcagctag

SEQ ID NO: 89583 - DNA, 1134 bp, Artificial Sequence
  derived and/or modified sequence
atgtctgatgacaagcccttcctgtgcacagcccctggctgcggccagcgcttcaccaatgaagaccacctggccgtgcacaagcacaagcatgagatgaccctgaagtttggacctgccagaaatgacagcgtcatcgtggccgaccagacccccacccccacccgcttcctgaagaactgtgaggaggtgggcctcttcaatgagctggccagcccctttgaaaatgagttcaagaaggcctctgaagatgacatcaagaagatgcccctggacctgagccccctggccacccccatcatccgcagcaagattgaggagcccagcgtggtggagaccacccaccaggacagccccctgccccaccctgagagcaccaccagtgatgagaaggaggtgcccctggcccagacagcccagcccaccagcgccatcgtgcggcctgccagcctgcaggtgcccaacgtgctgctgaccagcagtgacagcagcgtcatcatccagcaggccgtgcccagccccaccagcagcaccgtcatcacccaggcccccagcagcaaccggcccatcgtgcctgtgcccggccccttccccctgctgctgcacctgcccaacggccagaccatgcctgtggccatcccagccagcatcaccagcagcaatgtgcacgtgcctgctgctgtgcccctggtgcggcctgtgaccatggtgcccagcgtgcccggcatccctggccccagcagcccccagcctgtgcagagcgaggccaagatgaggctgaaggccgccctgacccagcagcacccccctgtgaccaatggagacacagtgaagggccacggcagcggcctggtgaggacccagagcgaggagagccggccccagagcctgcagcagcctgccaccagcaccacagagaccccagccagccctgcccacaccaccccccagacccagagcaccagcggcagaagaagaagagctgccaatgaagatcctgatgagaagaggaggaagttcctggagaggaacagagctgctgccagccgctgccggcagaagaggaaggtgtgggtgcagagcctggagaagaaggccgaggacctgagcagcctgaatggccagctgcagtag

SEQ ID NO: 89584 - DNA, 1464 bp, Artificial Sequence
  derived and/or modified sequence
atgagcgacgacaagcccttcctgtgcaccgcccccggctgcggccagcggtttaccaatgaagatcacctagcagtacacaaacacaagcatgaaatgactctgaaatttggtcccgcccgcaacgactccgtcatcgtcgcagatcagacacctaccccgacaaggttcttgaaaaattgcgaagaagtcggcctcttcaatgagctggccagcccattcgagaatgagtttaaaaaagcctcggaggacgatatcaaaaagatgccactggatctaagcccactggcaacccctataatcagatccaagatcgaggaaccatccgtcgttgagactacccaccaggacagtcccctgccccaccccgagtccacaactagcgatgagaaagaagtgcctcttgcccagaccgctcagcccactagtgccatcgttcggccagcctcactgcaagtccccaatgttctcctgacatcaagcgacagttcggtgatcattcagcaggctgttccaagtcccaccagttctacggttatcactcaggctccttcaagtaataggccaatagtccctgtgccaggaccttttcccctactcctccaccttcccaacggtcagaccatgccagttgccatccccgcttcaatcacttcttccaacgttcatgtgcccgccgcggttcctctcgtgcggcccgttactatggtgccatctgtgccaggaatcccgggacccagctccccccagcctgtgcagagcgaggctaagatgaggctcaaagccgctctcacacagcagcaccctccagtgacaaacggcgataccgtgaagggacatggctctggcctcgtgcggacacagtcagaagaatccaggccccagtcactgcagcagcccgcaacaagcaccactgagactccagcctcgcccgcacataccactccacaaacgcagagtacctccggcagaaggagacgggccgccaacgaagacccagatgagaagcgtagaaagttcctcgagcgaaatcgtgctgccgcgagcagatgtcgccagaaaagaaaggtgtgggtgcagagcttagagaaaaaggcggaggacctgtcttccttgaatggccaactccagtcagaggtgacactgcttaggaatgaggtcgctcagctgaagcaactgctgttagcccacaaagattgccccgtgaccgctatgcagaaaaagagtggatatcacacagcagacaaagatgattcctcagaggacatcagcgtcccatcttctcctcacacggaagccatccagcacagttctgtgagcacctctaacggtgtcagtagcacctctaaggctgaagccgttgccacctccgtcctcacgcagatggctgaccagtccactgagccagcgctcagtcagatcgtgatggccccttctagccagtcacaaccatcaggttcatag

SEQ ID NO: 89585 - DNA, 1134 bp, Artificial Sequence
  derived and/or modified sequence
atgagcgacgacaagcccttcctgtgcaccgcccccggctgcggccagagattcacaaatgaggaccacctggctgttcacaagcacaagcacgaaatgactctgaaattcggacccgccaggaacgatagtgtgatcgtcgctgaccagactcccacccctacacggtttctgaagaactgtgaggaggtgggactgttcaacgagttggcttctccttttgagaatgagttcaagaaggcaagcgaggatgacattaagaagatgcccttggacctttcccctctcgcgactccgatcattcgaagtaagattgaagagccctctgtagtagagacaacccaccaggattccccactcccccaccccgagagtacgacctccgatgagaaggaggtccctctggcacagacggcccagccaactagcgccatcgtccgacctgcttccctccaagtgcccaatgtgctactgaccagtagtgattcctccgtaataatccaacaagctgtgccttccccgacttcatcgaccgtgatcacccaagcccctagtagtaaccggcccatcgttcctgtgccgggcccattcccccttctgttgcacctccccaatggtcagactatgccagtggccattcccgcttctatcacttcttctaacgtgcacgtccccgcagccgtgcccctggtacggcccgtcactatggttcctagcgtgccaggtattcctgggccatccagtccacagcctgtgcagtccgaggctaaaatgagacttaaggccgctctcacccagcagcaccctccagtcaccaatggggacacagttaagggtcatggtagcggactcgttagaacgcagtcagaagaatctcgccctcaaagcctccagcagcccgcgacatcaaccaccgaaactccagccagccccgcccataccactcctcagactcagagtactagtggcaggagacgccgagctgctaacgaggaccctgacgagaagagaaggaagttcctcgagagaaaccgggctgccgcctcacgttgccggcaaaagaggaaggtctgggttcagtcactcgagaaaaaggccgaggacctcagctccctaaacggccagctgcagtag

SEQ ID NO: 89586 - DNA, 1464 bp, Artificial Sequence
  derived and/or modified sequence
atgtctgacgacaaaccgtttctctgcacagcgcctggatgcggccagagatttacaaacgaagaccacctagcagtacataagcacaagcacgagatgaccctgaagttcggtccagctcgcaacgactcagtgattgtggctgaccaaacccctacccctacccggttcttgaagaattgtgaagaggtgggactgtttaatgagttagctagcccattcgaaaacgaattcaaaaaagctagcgaggatgatatcaagaagatgccgctcgacctgagccctctagcaacaccgattatcaggtccaaaatcgaggagcctagcgttgtggagaccacccatcaggatagtccactcccccaccccgagagtactacctctgacgagaaggaggtacctctggctcaaacagcccagccaacctcagctattgtgcgcccagctagcttgcaagtccctaatgtgctgctaaccagctccgattcaagcgtgatcatccagcaggccgtgccctccccgacgtcctctacagtgattactcaggcacctagttccaaccgaccaatcgtgcccgttccaggtcctttcccattgctgctgcacctgcccaacgggcagacaatgccagtcgcaattcctgccagcatcactagctctaacgtacacgtgcctgcggcagttcccctggtgcggcctgtcactatggtgcccagcgtaccaggcattcctggccctagcagtccacaacctgtgcaatccgaggctaaaatgcggttgaaggcagccctaactcagcagcatccaccagtgaccaatggagatacggttaaaggacacgggagtggcctggtgagaacacagagcgaggaatcccgcccacaatctctccagcaaccagcaacatctacaacggagacccctgcttcacctgctcataccaccccgcaaacacagtccacatctgggaggcggagacgcgcagcgaatgaggaccctgacgagaagaggaggaaatttttagagcgcaaccgggctgctgctagtcgctgccgccagaagcgtaaagtttgggttcagtctctggagaagaaagcggaggaccttagctcgctgaacgggcagctgcagtccgaagtcaccctcttgagaaacgaagtcgcccagttgaagcagctcctactggcccacaaggactgtccagtgacggctatgcagaagaagagtgggtaccacactgccgacaaagatgatagcagcgaagatatctcagtcccatcctccccccatacagaggccatccagcattccagcgtgtctacatccaacggagtcagttcaacaagcaaggcagaagctgtggcaacgtcagtcctcactcagatggcagatcagtccaccgaaccggctttaagccagatcgtgatggcaccatcctcacagagccaacccagcggctcctag

SEQ ID NO: 89587 - DNA, 1134 bp, Artificial Sequence
  derived and/or modified sequence
atgagcgacgacaaacccttcctctgtaccgctcccggatgtggccagcgcttcacgaacgaagatcatctggcagtacacaagcataagcatgaaatgactctgaaatttggcccagccaggaacgacagcgtgatcgtagcagatcagactccaaccccgacacggtttttaaagaattgtgaggaagttgggctcttcaacgagctggcctctccatttgaaaatgagtttaaaaaagccagcgaagatgacattaaaaagatgccgctggatctcagtcctctggcgacgcctattatcagaagtaaaatagaagagccttcagtggtagaaaccacacaccaggattctcccttgcctcaccccgagagtaccacttcagacgaaaaagaagtgcctctggcacaaaccgcgcagccaacttcagccatcgtccgacctgcctcactccaggtgcctaatgtactgctgacttctagcgactcctcagttatcatccagcaggccgtaccaagtccgaccagttccacagtgattactcaggcccctagctccaaccgccctatcgtgcctgtgccaggcccattccctctcctgctacacctgccgaatggtcagaccatgccagtggctatccccgcatcaattacctcctctaacgtgcacgtgcccgctgcggtcccactggtcagaccggtgacaatggtgcctagtgtccctggcatccctggcccatcctcacctcaaccagtccagagtgaggccaagatgaggttgaaggccgctctgacacaacagcatcctccagtaactaatggcgatacagtcaagggacatggctcgggattggttcgcacacagagcgaggagtcaaggccacaaagcctgcagcagcccgctaccagcaccacagaaacacctgcctcccctgcccataccactccccagacccagtccacaagtgggagaagacgcagagctgctaatgaggatccagacgaaaagaggagaaagtttctggaacgcaacagagccgctgcgagccgctgtaggcagaagcgaaaagtgtgggtgcagtccctggaaaagaaggccgaagatctgagcagcttgaatggccagctgcagtag

SEQ ID NO: 89588 - DNA, 1464 bp, Artificial Sequence
  derived and/or modified sequence
atgagcgacgacaagcccttcctgtgcaccgcccccggctgcggccagagattcaccaacgaggaccacctggccgtgcacaagcacaagcacgagatgaccctgaagttcggccccgccagaaacgacagcgtgatcgtggccgaccagacccccacccccaccagattcctgaagaactgcgaggaggtgggcctgttcaacgagctggccagccccttcgagaacgagttcaagaaggccagcgaggacgacatcaagaagatgcccctggacctgagccccctggccacccccatcatcagaagcaagatcgaggagcccagcgtggtggagaccacccaccaggacagccccctgccccaccccgagagcaccaccagcgacgagaaggaggtgcccctggcccagaccgcccagcccaccagcgccatcgtgagacccgccagcctgcaggtgcccaacgtgctgctgaccagcagcgacagcagcgtgatcatccagcaggccgtgcccagccccaccagcagcaccgtgatcacccaggcccccagcagcaacagacccatcgtgcccgtgcccggccccttccccctgctgctgcacctgcccaacggccagaccatgcccgtggccatccccgccagcatcaccagcagcaacgtgcacgtgcccgccgccgtgcccctggtgagacccgtgaccatggtgcccagcgtgcccggcatccccggccccagcagcccccagcccgtgcagagcgaggccaagatgagactgaaggccgccctgacccagcagcacccccccgtgaccaacggcgacaccgtgaagggccacggcagcggcctggtgagaacccagagcgaggagagcagaccccagagcctgcagcagcccgccaccagcaccaccgagacccccgccagccccgcccacaccaccccccagacccagagcaccagcggcagaagaagaagagccgccaacgaggaccccgacgagaagagaagaaagttcctggagagaaacagagccgccgccagcagatgcagacagaagagaaaggtgtgggtgcagagcctggagaagaaggccgaggacctgagcagcctgaacggccagctgcagagcgaggtgaccctgctgagaaacgaggtggcccagctgaagcagctgctgctggcccacaaggactgccccgtgaccgccatgcagaagaagagcggctaccacaccgccgacaaggacgacagcagcgaggacatcagcgtgcccagcagcccccacaccgaggccatccagcacagcagcgtgagcaccagcaacggcgtgagcagcaccagcaaggccgaggccgtggccaccagcgtgctgacccagatggccgaccagagcaccgagcccgccctgagccagatcgtgatggcccccagcagccagagccagcccagcggcagctag

SEQ ID NO: 89589 - DNA, 1134 bp, Artificial Sequence
  derived and/or modified sequence
atgagcgacgacaagcccttcctgtgcaccgcccccggctgcggccagagattcaccaacgaggaccacctggccgtgcacaagcacaagcacgagatgaccctgaagttcggccccgccagaaacgacagcgtgatcgtggccgaccagacccccacccccaccagattcctgaagaactgcgaggaggtgggcctgttcaacgagctggccagccccttcgagaacgagttcaagaaggccagcgaggacgacatcaagaagatgcccctggacctgagccccctggccacccccatcatcagaagcaagatcgaggagcccagcgtggtggagaccacccaccaggacagccccctgccccaccccgagagcaccaccagcgacgagaaggaggtgcccctggcccagaccgcccagcccaccagcgccatcgtgagacccgccagcctgcaggtgcccaacgtgctgctgaccagcagcgacagcagcgtgatcatccagcaggccgtgcccagccccaccagcagcaccgtgatcacccaggcccccagcagcaacagacccatcgtgcccgtgcccggccccttccccctgctgctgcacctgcccaacggccagaccatgcccgtggccatccccgccagcatcaccagcagcaacgtgcacgtgcccgccgccgtgcccctggtgagacccgtgaccatggtgcccagcgtgcccggcatccccggccccagcagcccccagcccgtgcagagcgaggccaagatgagactgaaggccgccctgacccagcagcacccccccgtgaccaacggcgacaccgtgaagggccacggcagcggcctggtgagaacccagagcgaggagagcagaccccagagcctgcagcagcccgccaccagcaccaccgagacccccgccagccccgcccacaccaccccccagacccagagcaccagcggcagaagaagaagagccgccaacgaggaccccgacgagaagagaagaaagttcctggagagaaacagagccgccgccagcagatgcagacagaagagaaaggtgtgggtgcagagcctggagaagaaggccgaggacctgagcagcctgaacggccagctgcagtag

SEQ ID NO: 89590 - protein, 447 aa, Artificial Sequence
  derived and/or modified sequence
MYCAWMWPDQTPTPTRFLKNCEEVGLFNELASPFENEFKKASEDDIKKMPLDLSPLATPIIRSKIEEPSVVETTHQDSPLPHPESTTSDEKEVPLAQTAQPTSAIVRPASLQVPNVLLTSSDSSVIIQQAVPSPTSSTVITQAPSSNRPIVPVPGPFPLLLHLPNGQTMPVAIPASITSSNVHVPAAVPLVRPVTMVPSVPGIPGPSSPQPVQSEAKMRLKAALTQQHPPVTNGDTVKGHGSGLVRTQSEESRPQSLQQPATSTTETPASPAHTTPQTQSTSGRRRRAANEDPDEKRRKFLERNRAAASRCRQKRKVWVQSLEKKAEDLSSLNGQLQSEVTLLRNEVAQLKQLLLAHKDCPVTAMQKKSGYHTADKDDSSEDISVPSSPHTEAIQHSSVSTSNGVSSTSKAEAVATSVLTQMADQSTEPALSQIVMAPSSQSQPSGS

SEQ ID NO: 89591 - protein, 126 aa, Artificial Sequence
  derived and/or modified sequence
MSDDKPFLCTAPGCGQSEVTLLRNEVAQLKQLLLAHKDCPVTAMQKKSGYHTADKDDSSEDISVPSSPHTEAIQHSSVSTSNGVSSTSKAEAVATSVLTQMADQSTEPALSQIVMAPSSQSQPSGS

SEQ ID NO: 89592 - DNA, 1344 bp, Artificial Sequence
  derived and/or modified sequence
atgtactgcgcctggatgtggccagatcagacacccacacccacacggtttttaaaaaactgcgaagaggtggggctgttcaatgagctcgcctccccatttgagaatgagttcaaaaaggcttcggaagacgacattaagaaaatgcccctggatttaagccccttggccaccccgatcatccgcagcaaaatcgaggagccttcagtggtggagaccacccaccaggatagccccctgccacatccggagtcaacgacctcggatgaaaaggaagtccctttagctcagaccgctcagccaacaagcgcaattgtgagaccagccagcctgcaggtaccaaatgtgctgctaacgtctagtgactcttcagtaatcattcagcaggctgtgccttctcctacttctagtacagtgattacgcaagcaccttcatccaatcgccctatagtccctgtgccaggtccgttcccacttctgcttcacttgccaaacggtcagacaatgcccgtcgccatccctgcttctatcaccagctccaacgtccatgtgcccgctgctgtccctcttgtccgacctgtgactatggtgccttcagtcccagggatccctggtcccagtagcccccaacctgtgcaaagcgaggctaagatgcggcttaaagccgccctcacacagcaacatccaccggtaacaaacggggacactgtcaaaggccatgggagcggactcgttaggactcagtccgaggagtctcgacctcaatcactgcagcagcccgccacatccacaaccgagacgccagcctctccagcacataccaccccacaaacccagtctacctcaggtcgccggcggagggccgccaacgaagatccagatgagaaacgccggaagttcttggaacggaatagggcagccgcttctagatgtagacagaaacgaaaagtgtgggtgcaatcacttgagaaaaaagcagaggacctgtcgtccctcaatgggcagctgcagtccgaggtcacgcttctccgtaatgaagtggctcagcttaaacaattattgctggctcataaggattgtcccgtgaccgcaatgcagaagaaaagtggctatcatacagccgacaaagacgatagctccgaggatatttcagtgcctagctctccccacacggaagccatacagcactcatctgtatctacgtccaatggcgtttccagtaccagtaaggccgaggccgtcgctacctccgtgttaacccagatggcagaccagtctaccgagcccgccctatctcagatcgtgatggcccccagttcccaaagccagccgtccggttcctag

SEQ ID NO: 89593 - DNA, 381 bp, Artificial Sequence
  derived and/or modified sequence
atgtccgacgataaaccatttttgtgcacggcaccaggatgtggccagtcagaggtcacactgctgcgcaatgaggtcgctcagctcaagcagctgctattagcccataaagattgccccgttaccgccatgcagaagaaaagcggttatcacaccgccgataaggacgactccagcgaagatatttccgtaccctcgtcaccacacaccgaggccatccaacactcttcggtgagtacctccaacggggtgagtagcaccagtaaggccgaggcagtggctacctctgtgctgacccagatggccgaccagtcgaccgagcccgctctgtcccaaattgtcatggcccctagttcacagtctcagccatctgggtcttag

SEQ ID NO: 89594 - DNA, 1344 bp, Artificial Sequence
  derived and/or modified sequence
atgtactgcgcatggatgtggcctgaccaaacaccgacgcccacgaggtttctgaagaattgcgaagaagtgggcctgtttaacgaattagcaagccctttcgaaaacgagtttaagaaagcttcggaagacgatatcaagaagatgcccttggaccttagtccacttgctacaccgatcataagaagcaagatagaggaaccatccgtcgtagaaaccacgcatcaggactcacccctacctcatcctgaaagtactacatccgacgagaaggaagtgcctctcgcacagaccgcccagccaacctccgctatcgtgagacccgcctcactgcaggtacctaacgtgctcctcactagttctgactcctctgtgataattcaacaggcagtgccgagccctacgtcctccacagtcatcactcaggcgccgagctctaacagaccgatcgtccctgtgcctggaccattccctctgctgctgcatctaccaaatggccagacaatgcccgtggctattcctgcttccattactagctccaacgtgcacgttcctgcagcagtgcctcttgtgaggcctgtaacaatggtcccctctgtgccggggattcctgggcctagcagtccgcagccagtacaatccgaagccaaaatgcggttaaaagctgcgctcacccagcagcaccccccggtgaccaacggcgatacagtcaagggacacggcagcggcctggtccgcactcaatcggaggaaagtcgcccccaaagcctacaacagccggcaacttcaaccacagaaactccagcatcccctgcccacaccacccctcaaacgcagagcaccagtgggcgacgcaggcgcgccgccaatgaagatccagatgagaaacgcagaaagtttctggagagaaaccgagcggctgctagtcggtgtaggcagaaacgcaaggtgtgggtgcagtcactggaaaagaaggccgaggatcttagctccctgaacggccagctgcagagtgaagttacgctgcttaggaacgaggtggctcagctaaagcagttgctgctcgcacataaggattgccccgtgaccgcaatgcagaagaaaagcggctaccataccgcggataaggatgatagcagcgaagacatatcagtgccctcttctcctcataccgaggccatccagcattcatccgtgagcacctcaaatggagtgagttcgacttctaaagcagaggctgtggccacatcagttctaacacagatggccgaccagagtacagaacccgctctgtcccaaattgtgatggcccctagcagccaatctcaacccagtggaagctag

SEQ ID NO: 89595 - DNA, 1344 bp, Artificial Sequence
  derived and/or modified sequence
atgtactgtgcctggatgtggccagaccagacccccacccccacccgcttcctgaagaactgtgaggaggtgggcctcttcaatgagctggccagcccctttgaaaatgagttcaagaaggcctctgaagatgacatcaagaagatgcccctggacctgagccccctggccacccccatcatccgcagcaagattgaggagcccagcgtggtggagaccacccaccaggacagccccctgccccaccctgagagcaccaccagtgatgagaaggaggtgcccctggcccagacagcccagcccaccagcgccatcgtgcggcctgccagcctgcaggtgcccaacgtgctgctgaccagcagtgacagcagcgtcatcatccagcaggccgtgcccagccccaccagcagcaccgtcatcacccaggcccccagcagcaaccggcccatcgtgcctgtgcccggccccttccccctgctgctgcacctgcccaacggccagaccatgcctgtggccatcccagccagcatcaccagcagcaatgtgcacgtgcctgctgctgtgcccctggtgcggcctgtgaccatggtgcccagcgtgcccggcatccctggccccagcagcccccagcctgtgcagagcgaggccaagatgaggctgaaggccgccctgacccagcagcacccccctgtgaccaatggagacacagtgaagggccacggcagcggcctggtgaggacccagagcgaggagagccggccccagagcctgcagcagcctgccaccagcaccacagagaccccagccagccctgcccacaccaccccccagacccagagcaccagcggcagaagaagaagagctgccaatgaagatcctgatgagaagaggaggaagttcctggagaggaacagagctgctgccagccgctgccggcagaagaggaaggtgtgggtgcagagcctggagaagaaggccgaggacctgagcagcctgaatggccagctgcagagcgaggtgaccctgctgagaaatgaggtggcccagctgaagcagctgctgctggcccacaaggactgccctgtgacagccatgcagaagaagagcggctaccacacagctgacaaggatgacagcagcgaggacatctctgtgcccagcagcccccacacagaggccatccagcacagctctgtgtccaccagcaatggagtgagcagcaccagcaaggccgaggccgtggccacctctgtgctgacccagatggctgaccagagcacagagcccgccctgagccagatcgtgatggcccccagcagccagagccagcccagcggcagctag

SEQ ID NO: 89596 - DNA, 381 bp, Artificial Sequence
  derived and/or modified sequence
atgtctgatgacaagcccttcctgtgcacagcccctggctgcggccagagcgaggtgaccctgctgagaaatgaggtggcccagctgaagcagctgctgctggcccacaaggactgccctgtgacagccatgcagaagaagagcggctaccacacagctgacaaggatgacagcagcgaggacatctctgtgcccagcagcccccacacagaggccatccagcacagctctgtgtccaccagcaatggagtgagcagcaccagcaaggccgaggccgtggccacctctgtgctgacccagatggctgaccagagcacagagcccgccctgagccagatcgtgatggcccccagcagccagagccagcccagcggcagctag

SEQ ID NO: 89597 - DNA, 4079 bp, Artificial Sequence
  derived and/or modified sequence
gttgtcagtccgatctcgcgagagaggacggaagcctgtgggagcccgtggcctttaaagtgccgttcagccttttcctccaggggtgctttgtaaacacggctgtgctcagggctcgcgggtgaccgaaaggatcatgaactagtgacctggaaagggtactagatggaaacttgagaaaggactgcttattgataacagctaaggtattcctggaagcagagtaaataaagctcatggcccaccagctagaaagtattcttgccatgagaaaaagaatgtgataagttattcaacttatgaaattcaagttacatgtgaattctgccaggcaatacaaggacctgtggaatatgagtgatgacaaaccctttctatgtactgcgcctggatgtggccagatcagaccccaacaccaacaagattcttgaaaaactgtgaagaagtgggtttgtttaatgagttggcgagtccatttgagaatgaattcaagaaagcttcagaagatgacattaaaaaaatgcctctagatttatcccctcttgcaacacctatcataagaagcaaaattgaggagccttctgttgtagaaacaactcaccaggatagtcctttacctcacccagagtctactaccagtgatgagaaggaagtaccattggcacaaactgcacagcccacatcagctattgttcgtccagcatcattacaggttcccaatgtgctgcttacaagttctgactcaagtgtaattattcagcaggcagtaccttcaccaacctcaagtactgtaatcacccaggcaccatcctctaacaggccaattgtccctgtaccaggcccatttcctcttctgttacatcttcctaatggacaaaccatgcctgttgctattcctgcatcaattacaagttctaatgtgcatgttccagctgcagtcccactcgttcgaccagtcaccatggtgcctagtgttccaggaatcccaggtccttcctctccccaaccagtacagtcagaagcaaaaatgagattaaaagctgctttgacccagcaacatcctccagttaccaatggtgatactgtcaaaggtcatggtagcggattggttaggactcagtcagaggaatctcgaccgcagtcattacaacagccagccacatccactacagaaactccggcttctccagctcacacaactccacagacccaaagtacaagtggtcgtcggagaagagcagctaacgaagatcctgatgaaaaaaggagaaagtttttagagcgaaatagagcagcagcttcaagatgccgacaaaaaaggaaagtctgggttcagtctttagagaagaaagctgaagacttgagttcattaaatggtcagctgcagagtgaagtcaccctgctgagaaatgaagtggcacagctgaaacagcttcttctggctcataaagattgccctgtaaccgccatgcagaagaaatctggctatcatactgctgataaagatgatagttcagaagacatttcagtgccgagtagtccacatacagaagctatacagcatagttcggtcagcacatccaatggagtcagttcaacctccaaggcagaagctgtagccacttcagtcctcacccagatggcggaccagagtacagagcctgctctttcacagatcgttatggctccttcctcccagtcacagccctcaggaagttgattaaaaacctgcagtacaacagttttagatactcattagtgacttcaaagggaaatcaaggaaagaccagtttccatttatgcgaaatctgtggttgtaaattttttttttttacttgaaattaaatttggctctaaagttggtgtagcagcagttgatcagactgaaaaacggtttttagtctctggaaaaagactgattttgctttttttataaatattattagatttattaatttttctgtgctcaatgtgtaaattgtattataattcattgtgatttatttcacttttaatttgctggtgttttaataaatgggggtgttactgaatctttcttcccacttccatttcttttgaccaccccttaaccctcaactgtgacggtagtagtattatcatttataccaaagttttgcatagtccctgttgactttgtaatgttaacggagtcataaaagcactaggcaagagaaagatagaaatttgcttttaatctttttgccttttattttgcacattatgcaaaaggaaaaacattaaagaacacttttttttaagtgagtgaaaacatggtaaagacatacagtgcttttatgcacattgttaagctaaatcaaggtcatttataatcattttccttttttatttaagattttaagtaaacaaattttagaattttcagcatttcaaaaatgattttatttttcaagtcttaaattcaatattttacacctatgttttgaggctaaaaatatgaaattatataatgtatgatacagggttatcaaatatctaataatttttgaaattagctcttgtttttggtttttttgttgttgtttttacagatttcaggttacaaactgcaaagtttatgcataattaagtatggtatggttgccagaaaagcctaaaattactacttagaaaatttaagactgtttacccccattgtcttgtacttgcgagctaacttgtactattcttgtgaaagcactgtcatcttttagtagcaaattttgataatgtttctcgtggaaaaaaaaatcagtatctatctttagaacaatgtaattataatgtgggaagtgtgcatgaatgagagagagtgtgtgtgtatctgtgtgtgtgtgcgcgtgtgtgtgtgtcttttaatagtttatgccagcaatctttgcttgaatgtttaacgatgccttcagtgtgatgctggccaatagatgattgcagtttaaaatgtcattattgtgcaggcttggataactaacattccatgatgtagcttgtttctgatgagatgattgtaggtacatttttctcattatccaatcatctgtgggatacttagttttctaatgtgccattatctatttttattctgcagttatgttcaaaatacagtacatattttaaaatagaataaattgttaaacataaaattttaaaagtagtagatgtgcgtaagaaaactttgtaaaatagttatgagtcctacccagtagcaacttctggcattcaagcaggattccactatgtaaatatctgtaatgcatttataataagttgtgtagtttgtcctgcatccatactacactatttgctaaagtctcagtgccatctcctaatgagactgacattttaaaagtctgtatggaatatccttgataattcaaggaaatatccctcctgcctaagttccaaactgggaaacattcaaattatataaatgacatttcaggactttaagtatgaagataatgggaattttattgttttgctttttaaaatgagagcatttttatttgataattttttttaaatttttaatttttaactaatttcattattttaaagtaatcagtttttcaaatcatgattttgatatcattattctaaggagttatctcaaaggcacaaaatatgaattctgcaagaaggctattttttattgtagtttgaatgggttaggaaaagcctcaatttttcactcttaagtccttcagtacatttttctttcatcttattacttatgcaagttaaggttctttggtaacagaattcttgcaactgtaaaataaaactacatagatgtaagaagtcatgtaaacggttaacaagcttaccaaggttagcaaaactttcattgtaaatcagtctgtactgagcaaataaaaatcattattagttgtataaacacaaattccattttgactttcaggatgtcatactacttctgtacctagcattttcagtccttatatttgcaatgttacacaaactgtactattttcttttatgtgcagtttgcatgagtaaaccatcagagaataaattctatctttaaattatgttcataa

SEQ ID NO: 89598 - DNA, 801 bp, Artificial Sequence
  derived and/or modified sequence
gtgggagcccgtggcctttaaagtgccgttcagccttttcctccaggggtgctttgtaaacacggctgtgctcagggctcgcgggtgaccgaaaggatcatgaactagtgacctggaaagggtactagatggaaacttgagaaaggactgcttattgataacagctaaggtattcctggaagcagagtaaataaagctcatggcccaccagctagaaagtattcttgccatgagaaaaagaatgtgataagttattcaacttatgaaattcaagttacatgtgaattctgccaggcaatacaaggacctgtggaatatgagtgatgacaaaccctttctatgtactgcgcctggatgtggccagagtgaagtcaccctgctgagaaatgaagtggcacagctgaaacagcttcttctggctcataaagattgccctgtaaccgccatgcagaagaaatctggctatcatactgctgataaagatgatagttcagaagacatttcagtgccgagtagtccacatacagaagctatacagcatagttcggtcagcacatccaatggagtcagttcaacctccaaggcagaagctgtagccacttcagtcctcacccagatggcggaccagagtacagagcctgctctttcacagatcgttatggctccttcctcccagtcacagccctcaggaagttgattaaaaacctgcagtacaacagttttagatactcattagtgacttcaaagggaaatcaaggaaagaccagtttccatttatgcgaaatctgtggttgtaaattt

SEQ ID NO: 89599 - DNA, 2109 bp, Artificial Sequence
  derived and/or modified sequence
gtcagtccgatctcgcgagagaggacggaagcctgtgggagcccgtggcctttaaagtgccgttcagccttttcctccaggggtgctttgtaaacacggctgtgctcagggctcgcgggtgaccgaaaggatcatgaactagtgacctggaaagggtactagatggaaacttgagaaaggactgcttattgataacagctaaggtattcctggaagcagagtaaataaagctcatggcccaccagctagaaagtattcttgccatgagaaaaagaatgtgataagttattcaacttatgaaattcaagttacatgtgaattctgccagatactgaattcattacttaaaaccacccagaagagaaacctccaggctcagatagcttcactggcaatacaaggacctgtggaatatgagtgatgacaaaccctttctatgtactgcgcctggatgtggccagatcagaccccaacaccaacaagattcttgaaaaactgtgaagaagtgggtttgtttaatgagttggcgagtccatttgagaatgaattcaagaaagcttcagaagatgacattaaaaaaatgcctctagatttatcccctcttgcaacacctatcataagaagcaaaattgaggagccttctgttgtagaaacaactcaccaggatagtcctttacctcacccagagtctactaccagtgatgagaaggaagtaccattggcacaaactgcacagcccacatcagctattgttcgtccagcatcattacaggttcccaatgtgctgcttacaagttctgactcaagtgtaattattcagcaggcagtaccttcaccaacctcaagtactgtaatcacccaggcaccatcctctaacaggccaattgtccctgtaccaggcccatttcctcttctgttacatcttcctaatggacaaaccatgcctgttgctattcctgcatcaattacaagttctaatgtgcatgttccagctgcagtcccactcgttcgaccagtcaccatggtgcctagtgttccaggaatcccaggtccttcctctccccaaccagtacagtcagaagcaaaaatgagattaaaagctgctttgacccagcaacatcctccagttaccaatggtgatactgtcaaaggtcatggtagcggattggttaggactcagtcagaggaatctcgaccgcagtcattacaacagccagccacatccactacagaaactccggcttctccagctcacacaactccacagacccaaagtacaagtggtcgtcggagaagagcagctaacgaagatcctgatgaaaaaaggagaaagtttttagagcgaaatagagcagcagcttcaagatgccgacaaaaaaggaaagtctgggttcagtctttagagaagaaagctgaagacttgagttcattaaatggtcagctgcagagtgaagtcaccctgctgagaaatgaagtggcacagctgaaacagcttcttctggctcataaagattgccctgtaaccgccatgcagaagaaatctggctatcatactgctgataaagatgatagttcagaagacatttcagtgccgagtagtccacatacagaagctatacagcatagttcggtcagcacatccaatggagtcagttcaacctccaaggcagaagctgtagccacttcagtcctcacccagatggcggaccagagtacagagcctgctctttcacagatcgttatggctccttcctcccagtcacagccctcaggaagttgattaaaaacctgcagtacaacagttttagatactcattagtgacttcaaagggaaatcaaggaaagaccagtttccatttatgcgaaatctgtggttgtaaattttttttttttacttgaaattaaatttggctctaaagttggtgtagcagcagttgatcagactgaaaaacggtttttagtctctggaaaaagactgattttgctttttttataaatattattagatttattaatttttctgtgctcaatgtgtaaattgtattataattcattgtgatttatttcacttttaatttgctggtgttttaataaatgggggtgttactg

SEQ ID NO: 89600 - DNA, 1344 bp, Artificial Sequence
  derived and/or modified sequence
atgtactgcgcctggatgtggcccgaccagacccccacccccacccggttcctgaaaaactgcgaggaagttgggctgttcaatgagctcgccagcccgttcgaaaatgaattcaagaaagcctccgaggatgatatcaagaaaatgcccctagatctgtcacctcttgctacccctatcatcagaagcaaaattgaggaaccttcagttgtggagactacacaccaagattccccactgccacacccagaatctactacatctgatgaaaaagaggttccactggcccagaccgcccaaccgacttcagctatcgttcggcccgcttccttacaggtccctaatgtcctccttacatccagtgacagttctgtgatcatacaacaggccgtgccctctccaaccagcagcacagtgatcacacaagccccttcttccaatagacccatagttccagtccctgggcccttccctttgctactgcatcttccgaatgggcaaaccatgcctgtagcgatccccgcctcgatcacctcatcgaacgtgcatgtgcctgcagccgtccccctagtgcggcccgttacgatggtgccatctgtgccgggcatccctggacctagtagcccacaaccagtgcagtccgaggcaaagatgcgactgaaggcagcgctgacacaacagcatcctcccgtgaccaacggggacacagtgaaagggcatggatccggcttggtgcgcacacagtccgaggaaagccggccgcagtcactgcaacaacctgctacctctacaacggagacaccggcttcccccgcacacaccacaccccagacacagagtaccagcggcaggcgccgaagagccgccaatgaagatcccgacgagaagcggaggaagtttttagagcgcaaccgtgccgctgcttctcggtgcaggcagaaaaggaaggtctgggtgcagagtctggagaagaaagccgaagacctttcgagtctcaacggccagctccagagcgaagtgaccctcctcaggaacgaagtggctcagctgaaacagctcttgctcgcgcataaagactgccccgtaacagccatgcagaaaaaaagcggctatcacactgcagataaagatgatagctcagaggatataagcgtgccctcatccccccacacggaagccattcagcacagctctgtttctacttctaatggcgtgagttctaccagcaaagccgaggccgtggcaacatccgtgctaacacagatggcggaccaatccacggaacccgctctttctcagatcgtcatggccccctccagtcagtcacagcccagtggtagctag

SEQ ID NO: 89601 - DNA, 381 bp, Artificial Sequence
  derived and/or modified sequence
atgagcgacgacaagcccttcctgtgcaccgcccccggctgcggccagtccgaggttacgctgctccgcaacgaagtggcacagctgaaacagttactcctggcccacaaggactgtcctgtaactgctatgcaaaagaaatcgggatatcacaccgcagacaaagacgactccagcgaggacataagcgttccgtcgagcccccatacggaagcgattcagcactcctctgtgtccacgtcaaatggcgtgtcctcgacatcaaaggctgaagctgtagccacatccgtactcacgcaaatggccgaccaaagtacagagccagcattgagtcagatagtaatggccccttccagtcagagtcagccgtccgggtcatag

SEQ ID NO: 89602 - DNA, 1344 bp, Artificial Sequence
  derived and/or modified sequence
atgtactgcgcctggatgtggcccgaccagacccccacccccacccgatttttgaaaaactgtgaggaggtgggattgttcaacgagctggcatccccgttcgagaacgaatttaaaaaagccagtgaagacgatattaaaaagatgccactcgacctgagccctctcgctacacccattattcggtctaaaatagaggagcctagcgttgtggagacaacacaccaggacagtcctctcccacacccggaatccacaacatctgacgagaaagaagtccctctggctcagacagcacaacccaccagcgccattgtgagacctgcctcactgcaggtgcccaatgtgctgctcacttcctcagacagttccgtgataattcagcaagcggtgccatcccccaccagcagcaccgtcatcacacaggccccatcttctaaccgtcccattgtaccagttcctgggccctttccactcttgctgcatcttcctaacggccaaacgatgcccgtggccatccccgcatcaatcacttcttcaaatgttcatgtgccggctgctgtgccccttgtccggcctgtgactatggtgccgtccgtccctggcatcccaggaccttcctctcctcagccagtccagagtgaagcaaagatgcgcttaaaggccgctcttacacagcaacacccaccagtgacaaacggggacaccgtcaaagggcacggaagtggactggtgaggacacagtctgaggagtcacggccacagtctctccaacagccggccacttctacaactgaaacacccgcatcccccgcccacaccacacctcaaacacagagcaccagcgggcgcaggcgacgtgccgcaaatgaagatcccgacgaaaaacgacgcaagtttctcgagaggaaccgtgcagccgcctccaggtgcaggcagaagcgaaaggtgtgggtccagtctttggagaagaaggcagaggacttgagttccctgaacggccagctccagtcagaagtgaccttactccggaacgaagttgctcagctcaagcagctgctgctggcccataaagattgtcccgtcaccgcaatgcagaagaagtcaggttaccatacagcagacaaggacgactctagcgaggacattagtgtgccttcttctccacacacagaggctatccagcacagctccgttagcacatcaaacggggtatcttctacctccaaagccgaggccgttgccacatctgtattgacgcagatggcagatcagtcgaccgagcccgctctatcacaaatcgtcatggctccatcatctcagtcccagccttcgggctcttag

SEQ ID NO: 89603 - DNA, 1344 bp, Artificial Sequence
  derived and/or modified sequence
atgtattgcgcgtggatgtggcccgaccagacacccactccaacacgctttctcaaaaattgtgaagaggtagggctttttaatgagctggcgtcaccatttgaaaacgaattcaaaaaagcttcggaagacgacattaagaagatgccattggatcttagcccactggccacgccaattattagaagcaagatcgaagagccatccgtggtcgagacaacgcatcaagatagccctcttccccatcctgagtccaccacatctgacgagaaagaggtacctctggcgcagacggcccagcctacctctgcaatcgtgagacctgccagcttgcaggtgcccaatgtcctgttgacctctagcgactctagcgtgattattcagcaggctgtcccaagcccaacgtcttcaaccgtgataactcaagcaccctcttcgaataggcccattgtgccagtgccaggcccattcccactgctccttcaccttcctaatggccagaccatgcctgtggcgattccagcctctattacctctagtaacgttcacgtccccgcagcagtgcctctcgtccgacccgtcacaatggtaccctctgtccctggtatacccggtccgtcctcaccccagccagtccagtccgaggctaagatgcgtcttaaagccgctctcacccagcagcaccccccagtcacgaatggcgatacggtgaaagggcatggaagcggcctggtgcgcacccagagcgaggagagtaggccacaaagcctgcagcagcctgctactagcacaaccgagactcccgcttctccagcacacactactccgcagacccaaagcacgtctgggaggagaagacgggctgcaaacgaggacccagatgaaaagagacggaagttcctggagcggaacagggccgctgccagtcggtgtaggcagaaacggaaagtttgggtgcaatcgcttgagaagaaggcagaggatctgagctcgctgaatgggcagctccaaagtgaggtcactttactccgcaatgaggtggctcagttaaaacagctcttgctcgcccacaaggactgccccgttactgcaatgcagaaaaagtctgggtatcatacggccgataaagacgactccagtgaagacatctctgtgccaagcagcccacataccgaggcgatccagcacagttccgtcagtacaagcaatggcgtttcatcgactagtaaagccgaggcagtggcgacaagcgtactcacccaaatggctgatcagtctacagagcccgctttgagtcagatcgtgatggcgccttcctctcaaagccagcctagtggaagttag

SEQ ID NO: 89604 - DNA, 381 bp, Artificial Sequence
  derived and/or modified sequence
atgagtgatgataagcccttcttatgcaccgctccaggctgcgggcagagtgaggtcactctcctgcgaaacgaggttgctcaactcaaacaattgcttctcgcccataaggattgtccagtgaccgcgatgcagaagaagtccggctaccacacagcggataaagatgatagctccgaggatattagcgtgcctagctccccccacacagaagctatccagcactcaagtgtatctacatcgaacggggtctcgagcacgagtaaggccgaggccgtagccacctcagtcctgacccagatggctgaccaatcgacggagcctgcccttagccaaattgtgatggccccttcctcccagtcgcagccaagtggttcttag

SEQ ID NO: 89605 - DNA, 1344 bp, Artificial Sequence
  derived and/or modified sequence
atgtattgtgcgtggatgtggccagatcagaccccaactcctacaaggtttctgaagaattgtgaggaggtgggcctttttaatgagctggcctcccccttcgaaaatgagttcaagaaggcaagtgaggatgatattaaaaaaatgcccttggatctcagtcctctcgcaacccccattatccggtcaaaaatcgaggagccatccgtggtagagaccacacatcaagacagcccccttccacatcctgagtcaacaacatcagacgaaaaagaggtacctctggctcagactgctcaaccgacttcagcaatcgtacggccagcaagcctccaagtgcccaatgtgctacttacttccagcgattcttccgttatcattcagcaagctgtgccgtcgcccacctcttccacagtcatcactcaggccccaagttctaataggccaattgtccccgtccccggtccttttcccctgctgttacacctgcccaacgggcagactatgcccgtagcaattccagcttcaattacgagcagtaacgtgcatgtgccggctgccgtgccactggtcagacctgtgaccatggtgcctagcgttcccggaatccccggtccgtcgtctccccaaccggttcagtctgaagccaagatgagactcaaagccgctctcacacagcagcaccccccagtgacaaacggagacacggttaagggccatggctctggactagtccggacccagagcgaggagtctaggccgcagagcttgcagcagcccgcaacatcaaccacagagactcccgctagcccagcccataccaccccgcaaactcagagtacgagtgggagacggcgtcgtgccgcaaacgaggaccccgacgagaagaggaggaagttcttagagagaaatagagcagccgcaagtcgctgcagacagaagcggaaggtctgggtgcagtccctcgagaagaaagcagaggacctgtcctccctgaacggacagttgcaaagtgaggtgaccttactccgtaatgaggttgcccagcttaaacaattgttactggcccacaaagattgtccagtaacagctatgcagaaaaaatcaggctaccacaccgccgataaagatgattcctccgaggatatctccgttccttcttccccccatacggaagcaattcagcactcatccgtgagcacttccaatggcgttagctctaccagtaaagccgaggcagtggctacttccgtgctcacccagatggcagaccagagtacagagcccgctctatcccagatcgtgatggccccttcctctcaatcccaaccatcgggcagctag

SEQ ID NO: 89606 - DNA, 1344 bp, Artificial Sequence
  derived and/or modified sequence
atgtactgcgcctggatgtggcccgaccagacccccacccccaccagattcctgaagaactgcgaggaggtgggcctgttcaacgagctggccagccccttcgagaacgagttcaagaaggccagcgaggacgacatcaagaagatgcccctggacctgagccccctggccacccccatcatcagaagcaagatcgaggagcccagcgtggtggagaccacccaccaggacagccccctgccccaccccgagagcaccaccagcgacgagaaggaggtgcccctggcccagaccgcccagcccaccagcgccatcgtgagacccgccagcctgcaggtgcccaacgtgctgctgaccagcagcgacagcagcgtgatcatccagcaggccgtgcccagccccaccagcagcaccgtgatcacccaggcccccagcagcaacagacccatcgtgcccgtgcccggccccttccccctgctgctgcacctgcccaacggccagaccatgcccgtggccatccccgccagcatcaccagcagcaacgtgcacgtgcccgccgccgtgcccctggtgagacccgtgaccatggtgcccagcgtgcccggcatccccggccccagcagcccccagcccgtgcagagcgaggccaagatgagactgaaggccgccctgacccagcagcacccccccgtgaccaacggcgacaccgtgaagggccacggcagcggcctggtgagaacccagagcgaggagagcagaccccagagcctgcagcagcccgccaccagcaccaccgagacccccgccagccccgcccacaccaccccccagacccagagcaccagcggcagaagaagaagagccgccaacgaggaccccgacgagaagagaagaaagttcctggagagaaacagagccgccgccagcagatgcagacagaagagaaaggtgtgggtgcagagcctggagaagaaggccgaggacctgagcagcctgaacggccagctgcagagcgaggtgaccctgctgagaaacgaggtggcccagctgaagcagctgctgctggcccacaaggactgccccgtgaccgccatgcagaagaagagcggctaccacaccgccgacaaggacgacagcagcgaggacatcagcgtgcccagcagcccccacaccgaggccatccagcacagcagcgtgagcaccagcaacggcgtgagcagcaccagcaaggccgaggccgtggccaccagcgtgctgacccagatggccgaccagagcaccgagcccgccctgagccagatcgtgatggcccccagcagccagagccagcccagcggcagctag

SEQ ID NO: 89607 - DNA, 381 bp, Artificial Sequence
  derived and/or modified sequence
atgagcgacgacaagcccttcctgtgcaccgcccccggctgcggccagagcgaggtgaccctgctgagaaacgaggtggcccagctgaagcagctgctgctggcccacaaggactgccccgtgaccgccatgcagaagaagagcggctaccacaccgccgacaaggacgacagcagcgaggacatcagcgtgcccagcagcccccacaccgaggccatccagcacagcagcgtgagcaccagcaacggcgtgagcagcaccagcaaggccgaggccgtggccaccagcgtgctgacccagatggccgaccagagcaccgagcccgccctgagccagatcgtgatggcccccagcagccagagccagcccagcggcagctag

SEQ ID NO: 89608 - DNA, 630 bp, Artificial Sequence
  derived and/or modified sequence
atgaaatttaaactccatgtaaatagcgcccggcagtataaagacctctggaacatgtcagatgataaacccttcctctgtacggcccctggatgcggtcagcggtttaccaatgaggaccacctggcagttcacaaacacaaacatgagatgaccctgaagtttgggccagctagaaatgactcagtgatagtcgctgatcagacccccacccctactaggttcctgaagaactgcgaagaggtaggactgtttaatgaactggcttcaccattcgagaacgaattcaaaaaagcttctgaggacgacatcaagaagatgcctctcgacttgagtcccctcgccaccccgatcatccgttccaaaatcgaggaacccagcgtggtcgaaacaacccaccaggatagccccctccctcatccggagtctacaacgtcagatgagaaggaagtgcctctagctcagactgctcaacctacgtccgccatagttcggcccgcttccctgcaggtccccaatgtgctgctcacctctagcgacagcagtgtcattatccaacaggctgtaccctcacccacgtcatctacggtgattactcaagccccttcatccaacagacccatcgtctag

SEQ ID NO: 89609 - DNA, 714 bp, Artificial Sequence
  derived and/or modified sequence
atgaagtttaagttacatgtcaactcagcgcggcaatataaagatttgtggaatatgtcggatgataagccattcctgtgcacagcccccggctgtgggcagaggtttaccaacgaagaccatctcgctgttcacaaacataagcacgagatgacactcaaatttggaccagcacgtaacgactcagtgatcgttgctgatcagactcccactccaacgagatttctcaaaaattgcgaagaagtggggctcttcaacgaactggcctcacccttcgaaaacgaatttaaaaaggcttcagaggatgacattaagaaaatgccactggacttgtcacctcttgctacacctatcatcaggagtaaaatcgaagagccctccgtcgtggaaactacacaccaggactcaccccttccgcatcctgagagtaccaccagtgacgaaaaggaggtgcccctggctcagaccgcacagcctacgtccgccattgtgcgccctgcaagcctccaggtccccaatgtactcttaacaagctctgactcttctgtaattattcaacaggccgttcccagccccacaagctcgacggtgatcacacaggcaccatcttccaatcggccgatcgtctccttcgatcagagcccatggtgcctggtttttcaggagagtcaggtgctccccttgccgaatcaatattcccagaaacagaagtag

SEQ ID NO: 89610 - DNA, 660 bp, Artificial Sequence
  derived and/or modified sequence
atgagtgatgataagccatttctgtgtactgcaccaggttgtggacagagattcacaaatgaagaccacctcgctgtacacaagcataagcatgagatgacactcaaattcgggcctgctaggaatgattctgtaatagtggcagaccagacacctacccctaccagatttttaaagaattgtgaggaggtcggattatttaatgagctggcttcaccctttgaaaacgagtttaagaaagcaagcgaggacgacattaaaaaaatgcccttagatctgtctcccttggccacacccatcattagatccaagattgaagagcctagcgtggtggagaccacacatcaggattccccattgcctcaccctgaatccaccacttccgacgagaaggaggtcccgttagctcaaacagcgcagcccacaagcgcaatcgtgcggcccgcttccctgcaggtaccgaacgttctgctaacaagctcggattctagcgttatcattcagcaagctgtcccctcccctacttcttctaccgtgattactcaggctcccagctcaaacaggcccattgtctcgttcgatcagtccccttggtgtctggtctttcaggagagccaggtgcttccgctcccgaaccaatactctcagaaacagaagtag

SEQ ID NO: 89611 - DNA, 630 bp, Artificial Sequence
  derived and/or modified sequence
atgaagttcaagctgcacgtgaacagcgcccggcagtacaaggacctgtggaacatgtctgatgacaagcccttcctgtgcacagcccctggctgcggccagcgcttcaccaatgaagaccacctggccgtgcacaagcacaagcatgagatgaccctgaagtttggacctgccagaaatgacagcgtcatcgtggccgaccagacccccacccccacccgcttcctgaagaactgtgaggaggtgggcctcttcaatgagctggccagcccctttgaaaatgagttcaagaaggcctctgaagatgacatcaagaagatgcccctggacctgagccccctggccacccccatcatccgcagcaagattgaggagcccagcgtggtggagaccacccaccaggacagccccctgccccaccctgagagcaccaccagtgatgagaaggaggtgcccctggcccagacagcccagcccaccagcgccatcgtgcggcctgccagcctgcaggtgcccaacgtgctgctgaccagcagtgacagcagcgtcatcatccagcaggccgtgcccagccccaccagcagcaccgtcatcacccaggcccccagcagcaaccggcccatcgtgtag

SEQ ID NO: 89612 - DNA, 714 bp, Artificial Sequence
  derived and/or modified sequence
atgaagttcaagctgcacgtgaacagcgcccggcagtacaaggacctgtggaacatgtctgatgacaagcccttcctgtgcacagcccctggctgcggccagcgcttcaccaatgaagaccacctggccgtgcacaagcacaagcatgagatgaccctgaagtttggacctgccagaaatgacagcgtcatcgtggccgaccagacccccacccccacccgcttcctgaagaactgtgaggaggtgggcctcttcaatgagctggccagcccctttgaaaatgagttcaagaaggcctctgaagatgacatcaagaagatgcccctggacctgagccccctggccacccccatcatccgcagcaagattgaggagcccagcgtggtggagaccacccaccaggacagccccctgccccaccctgagagcaccaccagtgatgagaaggaggtgcccctggcccagacagcccagcccaccagcgccatcgtgcggcctgccagcctgcaggtgcccaacgtgctgctgaccagcagtgacagcagcgtcatcatccagcaggccgtgcccagccccaccagcagcaccgtcatcacccaggcccccagcagcaaccggcccatcgtgtcctttgaccagagcccctggtgcctggtgttccaggagagccaggtgctgcccctgcccaaccagtacagccagaagcagaagtag

SEQ ID NO: 89613 - DNA, 660 bp, Artificial Sequence
  derived and/or modified sequence
atgtctgatgacaagcccttcctgtgcacagcccctggctgcggccagcgcttcaccaatgaagaccacctggccgtgcacaagcacaagcatgagatgaccctgaagtttggacctgccagaaatgacagcgtcatcgtggccgaccagacccccacccccacccgcttcctgaagaactgtgaggaggtgggcctcttcaatgagctggccagcccctttgaaaatgagttcaagaaggcctctgaagatgacatcaagaagatgcccctggacctgagccccctggccacccccatcatccgcagcaagattgaggagcccagcgtggtggagaccacccaccaggacagccccctgccccaccctgagagcaccaccagtgatgagaaggaggtgcccctggcccagacagcccagcccaccagcgccatcgtgcggcctgccagcctgcaggtgcccaacgtgctgctgaccagcagtgacagcagcgtcatcatccagcaggccgtgcccagccccaccagcagcaccgtcatcacccaggcccccagcagcaaccggcccatcgtgtcctttgaccagagcccctggtgcctggtgttccaggagagccaggtgctgcccctgcccaaccagtacagccagaagcagaagtag

SEQ ID NO: 89614 - DNA, 1335 bp, Artificial Sequence
  derived and/or modified sequence
gtgggagcccgtggcctttaaagtgccgttcagccttttcctccaggggtgctttgtaaacacggctgtgctcagggctcgcgggtgaccgaaaggatcatgaactagtgacctggaaagggtactagatggaaacttgagaaaggactgcttattgataacagctaaggtattcctggaagcagagtaaataaagctcatggcccaccagctagaaagtattcttgccatgagaaaaagaatgtgataagttattcaacttatgaaattcaagttacatgtgaattctgccaggcaatacaaggacctgtggaatatgagtgatgacaaaccctttctatgtactgcgcctggatgtggccagcgttttaccaacgaggatcatttggctgtccataaacataaacatgagatgacactgaaatttggtccagcacgtaatgacagtgtcattgtggctgatcagaccccaacaccaacaagattcttgaaaaactgtgaagaagtgggtttgtttaatgagttggcgagtccatttgagaatgaattcaagaaagcttcagaagatgacattaaaaaaatgcctctagatttatcccctcttgcaacacctatcataagaagcaaaattgaggagccttctgttgtagaaacaactcaccaggatagtcctttacctcacccagagtctactaccagtgatgagaaggaagtaccattggcacaaactgcacagcccacatcagctattgttcgtccagcatcattacaggttcccaatgtgctgcttacaagttctgactcaagtgtaattattcagcaggcagtaccttcaccaacctcaagtactgtaatcacccaggcaccatcctctaacaggccaattgtgtaagtgattcaggccaatcattgaacatatacatgaattaagtttgttttgtaatgatttttcctaagacatttgattattcaaactaagatcttagttttgtatgtgtgtgcatgcttcgaattttggaaaaagtacttgcgtagtcttctttaatataaatattaactaacagagtgggagataaatacaactaaaaacaaatatagaatgtgaatttaagatagtcttattttcatgctatttcacacaaaatataaaattactgcatcaccagattccatttctttcagttcttactggtagctcccaagagctctctgatgacagtttttctcattttacaaattggagattgtcctaagtaaatccataacttttctcttcttttcaatactgctacacaggttatgcatttaagatgcaattaaaaataattaaatttt

SEQ ID NO: 89615 - DNA, 1966 bp, Artificial Sequence
  derived and/or modified sequence
gtgggagcccgtggcctttaaagtgccgttcagccttttcctccaggggtgctttgtaaacacggctgtgctcagggctcgcgggtgaccgaaaggatcatgaactagtgacctggaaagggtactagatggaaacttgagaaaggactgcttattgataacagctaaggtattcctggaagcagagtaaataaagctcatggcccaccagctagaaagatttcctgaagaggtagtctgattggcttaactcgtattcttgccatgagaaaaagaatgtgataagttattcaacttatgaaattcaagttacatgtgaattctgccaggcaatacaaggacctgtggaatatgagtgatgacaaaccctttctatgtactgcgcctggatgtggccagcgttttaccaacgaggatcatttggctgtccataaacataaacatgagatgacactgaaatttggtccagcacgtaatgacagtgtcattgtggctgatcagaccccaacaccaacaagattcttgaaaaactgtgaagaagtgggtttgtttaatgagttggcgagtccatttgagaatgaattcaagaaagcttcagaagatgacattaaaaaaatgcctctagatttatcccctcttgcaacacctatcataagaagcaaaattgaggagccttctgttgtagaaacaactcaccaggatagtcctttacctcacccagagtctactaccagtgatgagaaggaagtaccattggcacaaactgcacagcccacatcagctattgttcgtccagcatcattacaggttcccaatgtgctgcttacaagttctgactcaagtgtaattattcagcaggcagtaccttcaccaacctcaagtactgtaatcacccaggcaccatcctctaacaggccaattgtctcgttcgaccagtcaccatggtgcctagtgttccaggaatcccaggtccttcctctccccaaccagtacagtcagaagcaaaaatgagattaaaagctgctttgacccagcaacatcctccagttaccaatggtgatactgtcaaaggtcatggtagcggattggttaggactcagtcagaggaatctcgaccgcagtcattacaacagccagccacatccactacagaaactccggcttctccagctcacacaactccacagacccaaagtacaagtggtcgtcggagaagagcagctaacgaagatcctgatgaaaaaaggagaaagtttttagagcgaaatagagcagcagcttcaagatgccgacaaaaaaggaaagtctgggttcagtctttagagaagaaagctgaagacttgagttcattaaatggtcagctgcagtgaatatattgctcgtgaaaggtgccagattgacagctttggaaactgaaggactctaattatccacagaccagagtgaagtcaccctgctgagaaatgaagtggcacagctgaaacagcttcttctggctcataaagattgccctgtaaccgccatgcagaagaaatctggctatcatacaaatatttcttcagctctattccataaggcagtgggcacccagatgtttccatatgcatggttgtgccttcttttgacctattgcagctgctgataaagatgatagttcagaagacatttcagtgccgagtagtccacatacagaagctatacagcatagttcggtcagcacatccaatggagtcagttcaacctccaaggcagaagctgtagccacttcagtcctcacccagatggcggaccagagtacagagcctgctctttcacagatcgttatggctccttcctcccagtcacagccctcaggaagttgattaaaaacctgcagtacaacagttttagatactcattagtgacttcaaagggaaatcaaggaaagaccagtttccatttatgcgaaatctgtggttgtaaattt

SEQ ID NO: 89616 - DNA, 630 bp, Artificial Sequence
  derived and/or modified sequence
atgaagttcaagctgcacgtgaacagcgcccggcagtacaaggacctgtggaacatgtccgacgacaaaccttttctttgcaccgcaccaggttgtggtcaaaggttcacaaatgaagatcatctagcagtccacaaacacaagcatgagatgactctgaaattcgggccagctcggaatgattccgtaattgtggctgaccagacacccactcctacgaggttcctcaaaaattgcgaagaggtggggctcttcaacgagctggcatcacccttcgaaaatgagtttaagaaggccagcgaggacgacatcaagaaaatgcctcttgatctgtctccccttgccacacccatcatacgcagcaaaatcgaggagccaagcgtagttgagacaacgcaccaagatagtcctctgccacaccctgagtccactaccagcgatgaaaaagaggtcccgctggctcagacagcccagccgacttctgccatcgtccgccccgccagcctccaagtgcccaacgttctactgacttctagtgactcaagcgtgattatccaacaggccgtgccttccccgaccagtagtaccgttatcacgcaggcacccagctctaacagacccatcgtatag

SEQ ID NO: 89617 - DNA, 714 bp, Artificial Sequence
  derived and/or modified sequence
atgaagttcaagctgcacgtgaacagcgcccggcagtacaaggacctatggaatatgtccgatgacaaacctttcctttgtacggcccctggttgtggtcagaggtttactaatgaagaccacctcgccgttcataagcataagcacgagatgaccctcaagttcggcccagcaagaaatgactctgtcattgtggccgatcagacgcccacccctacccggtttctgaaaaattgtgaggaagtgggcctctttaatgaactggcctcaccatttgaaaacgagttcaagaaagcctcagaagatgatatcaagaaaatgcccctggatttatcacccttagctacaccaatcattaggtctaaaatcgaggaaccctcggttgtcgaaacaacccatcaggactccccactgcctcaccccgagtcaacaaccagcgacgagaaggaggtgccccttgctcagaccgcacaaccaacatcagcaatcgtcagacccgcctctctacaagtgcctaatgtgctgctgacctcaagcgattcttctgtgatcatccagcaggctgtgccgtcacccacgtcttccactgtgatcacacaggctccgtcatcgaatcgtcccatcgtaagttttgatcagagcccgtggtgtctggtgttccaggagtcgcaagtcctgcctcttccaaatcagtattctcagaagcaaaagtag

SEQ ID NO: 89618 - DNA, 660 bp, Artificial Sequence
  derived and/or modified sequence
atgagcgacgacaagcccttcctgtgcaccgcccccggctgcggccaaagattcactaatgaggaccatctggctgttcacaagcataaacatgaaatgacactaaaattcggccctgcgaggaacgatagcgtgatcgtagctgaccaaactcccactccgacccgttttctgaagaattgtgaggaagtaggcctgttcaatgaactcgctagcccttttgaaaatgaatttaagaaggccagcgaggatgacattaagaagatgcctctggaccttagcccactagctacccccataatcagatctaaaatcgaggaaccgtccgtggttgagacaacacaccaagactcccctctcccccaccctgagagcacgactagtgacgaaaaagaggtcccgctcgctcagaccgcccaacccacatccgcaattgtgcgaccggcatccctgcaggttcccaatgtgctgctgacaagcagcgactcctctgtgattatccagcaggcagtcccctcaccaacatcgtccactgtaatcacacaggccccatcatcgaatcggcctattgtgagtttcgatcagagtccctggtgtctcgtgttccaggagagccaggtgctccccctgcctaaccaatactcccagaagcagaaatag

SEQ ID NO: 89619 - DNA, 630 bp, Artificial Sequence
  derived and/or modified sequence
atgaaatttaaactgcacgtcaattcagctcgacagtacaaagacctctggaacatgagtgatgataagccatttctttgcaccgccccaggctgcgggcagaggtttacgaacgaagatcacctcgcagtacataaacacaaacatgaaatgaccttgaaatttggaccggctcgcaacgactctgtgattgtcgcagatcaaacacctacccctacccggtttcttaaaaattgtgaagaggtaggcctgttcaatgaattggctagtccttttgagaatgagtttaagaaggccagcgaagatgacatcaaaaaaatgcctttagatctatcacctctcgctaccccaatcatccggtccaaaattgaggagcctagtgtcgtagagacaactcaccaggactccccactgccccaccccgagagtactaccagtgacgaaaaggaagtccctctggcacagacagcccaacctacgtcagcaatcgtccggcctgcttccctgcaggtgccaaatgtgctgttgacctcctcagattccagcgtcattatccagcaagcagtcccttccccaacatcctctacagtcattacacaggcgcctagttccaataggccaatcgtatag

SEQ ID NO: 89620 - DNA, 714 bp, Artificial Sequence
  derived and/or modified sequence
atgaagttcaagttgcacgtgaattccgcccgacagtataaggacctgtggaacatgtccgatgataaaccattcctgtgcaccgcccctggctgtggacagaggttcacaaatgaagaccacctggccgtacacaagcacaagcatgaaatgaccctaaaatttggaccagccagaaatgactctgtgatcgttgcggaccaaacccccactcccacaaggtttttgaagaactgtgaggaggttggacttttcaatgaactggcatctccctttgaaaacgagtttaaaaaggcatcggaggatgacattaagaagatgccacttgacctaagccccctggcaacacctatcattcggtctaagattgaggaaccgagtgtggtggaaaccacacatcaggactccccactcccacatcccgaatctacgacctccgatgagaaagaggtaccgcttgctcagaccgcacagcccactagtgcaatcgttcgcccagcaagcttgcaggtgcccaacgttctcctcacctcgtccgacagttcagtgatcatccagcaagcagtcccatcccccacaagctcaacagtcatcacacaggcaccaagctctaacaggccaatcgtttcctttgaccagagtccctggtgcctggtcttccaggagagccaggtgttgccgttacctaatcagtactcccagaagcagaaatag

SEQ ID NO: 89621 - DNA, 660 bp, Artificial Sequence
  derived and/or modified sequence
atgagtgatgataaaccttttctctgtaccgccccaggatgcgggcagcgatttactaacgaggaccatctggcagtacacaaacacaagcacgagatgaccctgaagtttggaccagccaggaacgacagcgttatcgtcgcagaccagacgccaacccctacaagattcttgaaaaattgcgaagaggtgggcttgtttaacgagttggcctcacccttcgagaacgagtttaaaaaagcttcagaggatgacataaagaaaatgcccttagatttaagcccgctggccacccctattattcgatccaaaattgaggagcctagcgtggtggaaacgacacatcaggattcgcccttgcctcatcctgagtctactaccagcgatgagaaagaagtccccttagcacagaccgcgcaacccacctcggcaatcgtgcgcccagccagtctgcaggttcccaacgtactcctgacttcatctgactcgagcgtgattatccagcaagcggtgcccagccccacgagcagcactgtaataacccaggctccctcctctaacaggccaattgtctcgttcgatcagtctccttggtgtctcgtgttccaagagtctcaggtgctgccgctgcccaatcagtattctcagaagcagaagtag

SEQ ID NO: 89622 - DNA, 630 bp, Artificial Sequence
  derived and/or modified sequence
atgaagttcaagctgcacgtgaacagcgccagacagtacaaggacctgtggaacatgagcgacgacaagcccttcctgtgcaccgcccccggctgcggccagagattcaccaacgaggaccacctggccgtgcacaagcacaagcacgagatgaccctgaagttcggccccgccagaaacgacagcgtgatcgtggccgaccagacccccacccccaccagattcctgaagaactgcgaggaggtgggcctgttcaacgagctggccagccccttcgagaacgagttcaagaaggccagcgaggacgacatcaagaagatgcccctggacctgagccccctggccacccccatcatcagaagcaagatcgaggagcccagcgtggtggagaccacccaccaggacagccccctgccccaccccgagagcaccaccagcgacgagaaggaggtgcccctggcccagaccgcccagcccaccagcgccatcgtgagacccgccagcctgcaggtgcccaacgtgctgctgaccagcagcgacagcagcgtgatcatccagcaggccgtgcccagccccaccagcagcaccgtgatcacccaggcccccagcagcaacagacccatcgtgtag

SEQ ID NO: 89623 - DNA, 714 bp, Artificial Sequence
  derived and/or modified sequence
atgaagttcaagctgcacgtgaacagcgccagacagtacaaggacctgtggaacatgagcgacgacaagcccttcctgtgcaccgcccccggctgcggccagagattcaccaacgaggaccacctggccgtgcacaagcacaagcacgagatgaccctgaagttcggccccgccagaaacgacagcgtgatcgtggccgaccagacccccacccccaccagattcctgaagaactgcgaggaggtgggcctgttcaacgagctggccagccccttcgagaacgagttcaagaaggccagcgaggacgacatcaagaagatgcccctggacctgagccccctggccacccccatcatcagaagcaagatcgaggagcccagcgtggtggagaccacccaccaggacagccccctgccccaccccgagagcaccaccagcgacgagaaggaggtgcccctggcccagaccgcccagcccaccagcgccatcgtgagacccgccagcctgcaggtgcccaacgtgctgctgaccagcagcgacagcagcgtgatcatccagcaggccgtgcccagccccaccagcagcaccgtgatcacccaggcccccagcagcaacagacccatcgtgagcttcgaccagagcccctggtgcctggtgttccaggagagccaggtgctgcccctgcccaaccagtacagccagaagcagaagtag

SEQ ID NO: 89624 - DNA, 660 bp, Artificial Sequence
  derived and/or modified sequence
atgagcgacgacaagcccttcctgtgcaccgcccccggctgcggccagagattcaccaacgaggaccacctggccgtgcacaagcacaagcacgagatgaccctgaagttcggccccgccagaaacgacagcgtgatcgtggccgaccagacccccacccccaccagattcctgaagaactgcgaggaggtgggcctgttcaacgagctggccagccccttcgagaacgagttcaagaaggccagcgaggacgacatcaagaagatgcccctggacctgagccccctggccacccccatcatcagaagcaagatcgaggagcccagcgtggtggagaccacccaccaggacagccccctgccccaccccgagagcaccaccagcgacgagaaggaggtgcccctggcccagaccgcccagcccaccagcgccatcgtgagacccgccagcctgcaggtgcccaacgtgctgctgaccagcagcgacagcagcgtgatcatccagcaggccgtgcccagccccaccagcagcaccgtgatcacccaggcccccagcagcaacagacccatcgtgagcttcgaccagagcccctggtgcctggtgttccaggagagccaggtgctgcccctgcccaaccagtacagccagaagcagaagtag

SEQ ID NO: 89625 - protein, 232 aa, Artificial Sequence
  derived and/or modified sequence
MWPPGRSITVKLREKTVSRKLEMNGPSAFQGLICGKYNGMCLQGPAGVPGRDGSPGANGIPGTPGIPGRDGFKGEKGECLRESFEESWTPNYKQCSWSSLNYGIDLGKIAECTFTKMRSNSALRVLFSGSLRLKCRNACCQRWYFTFNGAECSGPLPIEAIIYLDQGSPEMNSTINIHRTSSVEGLCEGIGAGLVDVAIWVGTCSDYPKGDASTGWNSVSRIIIEELPNYLF

SEQ ID NO: 89626 - protein, 229 aa, Artificial Sequence
  derived and/or modified sequence
MWPPGRSITVKLREKTVSRKLEMNGPSAFQGLICGKYNGMCLQGPAGVPGRDGSPGANGIPGTPGIPGRDGFKGEKGECLRESFEESWTPNYKQCSWSSLNYGIDLGKIAECTFTKMRSNSALRVLFSGSLRLKCRNACCQRWYFTFNGAECSGPLPIEAIIYLDQGSPEMNSTINIHRTSSVEGLCEGIGAGLVDVAIWVGTCSDYPKGDASTGWNSVSRIIIEELPK

SEQ ID NO: 89627 - DNA, 699 bp, Artificial Sequence
  derived and/or modified sequence
atgtggccaccaggacgcagtatcacagtgaagctcagagagaagaccgtgtcacgcaagctggaaatgaacgggccctccgcgttccaggggctaatatgtggcaagtataacgggatgtgtctgcagggccccgctggtgtgcctggccgtgatgggagtcctggcgctaacggtatccccgggactcccggaatccctggccgagatggcttcaagggcgaaaaaggagagtgtttacgagaatccttcgaggaatcctggacgccgaattacaagcagtgctcatggagctctttgaattatggaatcgatctggggaaaattgctgagtgcactttcaccaagatgaggtccaatagcgctctgcgcgtgctgtttagcggcagcctcaggctgaagtgccggaacgcttgctgccagagatggtatttcacctttaatggcgccgaatgctcaggtcctctgccaatcgaggcaattatctacttagaccaggggtcccctgagatgaattctaccattaatatccaccgaacctcttctgttgaggggctgtgcgaaggaataggagcgggcctcgtggatgtggccatctgggtcggcacatgttccgactatccaaaaggtgatgccagcaccggctggaattcagtttcgcgcatcattatcgaggaattacccaactatctcttctag

SEQ ID NO: 89628 - DNA, 690 bp, Artificial Sequence
  derived and/or modified sequence
atgtggccaccaggccgatccataacggtcaaattgagagaaaaaacagtgagccgaaaactggagatgaatggcccatctgcattccagggacttatatgtgggaaatacaacggtatgtgcctgcagggtcccgcaggagtccccggccgggatgggtcacccggtgccaacggaatcccagggactccaggcatcccagggagagatgggttcaagggcgagaagggggaatgcctgagagagtcctttgaagaatcttggacccccaattataagcagtgttcttggagcagcctcaattatggaatcgacctgggcaaaattgccgagtgtaccttcactaaaatgcgaagcaatagtgctctgagagtgttgttttccggctccttgcgcctgaaatgtcgcaatgcttgctgccagcgatggtatttcacttttaatggcgcagagtgctccggccccctccctatcgaagcgattatatacttggaccagggaagtccagaaatgaattctaccatcaacatccatcgtacttcaagcgtggagggactgtgtgagggaatcggagccggcctggtagacgttgccatatgggttggcacctgtagtgattatccaaaaggcgacgctagtaccggctggaactcagtgagtaggattatcatcgaggagttgccaaagtag

SEQ ID NO: 89629 - DNA, 699 bp, Artificial Sequence
  derived and/or modified sequence
atgtggcccccaggccgcagcatcaccgtgaagctgcgggagaagacagtgtccaggaagctggagatgaatggccccagcgccttccagggcctcatctgtgggaagtacaacggcatgtgcctgcagggccctgctggggtgcccggcagagatggcagccctggggccaacggcatccctggcaccccaggcatccctggaagagatggcttcaagggggagaagggggagtgcctgcgggagagctttgaggagagctggacccccaactacaagcagtgctcctggagcagcctgaactacggcatcgacctgggcaagattgctgaatgtaccttcaccaagatgaggagcaacagcgccctgcgggtgctcttcagcggcagcctgcggctgaagtgcagaaatgcctgctgccagcgctggtacttcaccttcaacggggctgaatgttctggccccctgcccatcgaggccatcatctacctggaccagggcagccctgagatgaacagcaccatcaacatccacaggaccagctctgtggagggcctgtgtgagggcatcggggccggcctggtggatgtggccatctgggtgggcacctgcagcgactaccccaagggagatgccagcacaggctggaacagcgtgagccgcatcatcatcgaggagctgcccaactacctgttctag

SEQ ID NO: 89630 - DNA, 690 bp, Artificial Sequence
  derived and/or modified sequence
atgtggcccccaggccgcagcatcaccgtgaagctgcgggagaagacagtgtccaggaagctggagatgaatggccccagcgccttccagggcctcatctgtgggaagtacaacggcatgtgcctgcagggccctgctggggtgcccggcagagatggcagccctggggccaacggcatccctggcaccccaggcatccctggaagagatggcttcaagggggagaagggggagtgcctgcgggagagctttgaggagagctggacccccaactacaagcagtgctcctggagcagcctgaactacggcatcgacctgggcaagattgctgaatgtaccttcaccaagatgaggagcaacagcgccctgcgggtgctcttcagcggcagcctgcggctgaagtgcagaaatgcctgctgccagcgctggtacttcaccttcaacggggctgaatgttctggccccctgcccatcgaggccatcatctacctggaccagggcagccctgagatgaacagcaccatcaacatccacaggaccagctctgtggagggcctgtgtgagggcatcggggccggcctggtggatgtggccatctgggtgggcacctgcagcgactaccccaagggagatgccagcacaggctggaacagcgtgagccgcatcatcatcgaggagctgcccaagtag

SEQ ID NO: 89631 - DNA, 699 bp, Artificial Sequence
  derived and/or modified sequence
atgtggccccccggccggagcatcaccgtgaagctgcgggagaagacagtgtcccgaaagctggagatgaatggtccaagcgcgtttcaggggctaatctgtggcaagtataacggcatgtgtctgcaagggccagcaggagtacccgggcgtgatggcagtcccggggctaacgggattcccgggaccccgggcatcccaggcagagatggtttcaagggcgaaaaaggtgaatgtctgcgagagtcatttgaagaatcctggactcctaattacaaacagtgcagctggagctccctgaattatgggattgatctcggcaaaatagccgagtgtacctttacgaagatgcggtccaattctgctctgagggtattattttctgggtcactccgcttaaaatgtcggaacgcttgttgccagcggtggtactttacctttaatggtgcagaatgctcgggtcctctcccaatcgaagccattatctacttagaccagggttccccggagatgaactcaactatcaacattcatcgtacctcaagtgtagaggggctttgcgaaggcataggagcgggacttgtggacgtcgcgatatgggtcggaacatgctccgattatccaaagggagacgcctctacaggctggaatagtgtgagtaggatcataattgaggagcttcctaactatctgttctag

SEQ ID NO: 89632 - DNA, 690 bp, Artificial Sequence
  derived and/or modified sequence
atgtggccccccggccggagcatcaccgtgaagctgcgggagaagacagtctctaggaagctggagatgaatgggcccagcgctttccagggccttatctgcggcaaatacaatggtatgtgtctgcagggacctgcaggcgtgcctgggcgggacggatctccaggagctaacggcatcccagggaccccaggcatccctggcagggatgggtttaagggagagaagggcgaatgtctccgcgagtcctttgaggagtcttggaccccgaactacaaacagtgctcctggtctagcctgaactacggcatcgacctgggcaagatcgcagagtgcacatttactaagatgcgcagcaacagtgctctgagggtcctgttcagcgggagcctgcgcctgaaatgccgcaacgcctgttgccagagatggtactttacattcaatggcgccgagtgctccggacctcttccaattgaggcaattatctatcttgatcaggggtcaccagagatgaacagcaccataaatatacatcgcaccagctccgtcgagggcttatgcgagggcatcggcgctggcctggttgacgtagccatctgggtcggcacatgctccgactaccctaaaggcgacgctagtacagggtggaattcggtctctcgcatcattatcgaggagctccccaaatag

SEQ ID NO: 89633 - DNA, 699 bp, Artificial Sequence
  derived and/or modified sequence
atgtggcctcctggccgttctatcactgtgaagctgcgcgaaaaaaccgtgtcgcgcaaactagagatgaacggaccttccgcttttcaggggctgatctgcgggaaatataacgggatgtgtctgcaggggcctgcaggagtgcccggacgggacggcagcccgggtgctaacggcattccaggaactcccggaatcccgggacgagatgggtttaagggagagaagggagaatgtctaagagaatcctttgaagaaagctggacccctaactataagcagtgctcatggtctagtctgaattacggcatagacctgggcaaaatagctgagtgtaccttcacaaaaatgaggagcaactccgccttacgcgttctgttcagtggatctctccggctcaaatgccgaaacgcctgctgccagagatggtatttcactttcaacggcgctgaatgcagcgggccacttcctatagaagctatcatctacttagaccaggggtccccagaaatgaattccactataaacatccacaggacctccagtgttgagggcttgtgcgaaggaatcggagctggcttggttgatgtagcaatttgggttgggacttgctcagattatcccaaaggtgacgcatctactggatggaactccgtcagccgcattattattgaggaacttcccaactacctgttctag

SEQ ID NO: 89634 - DNA, 690 bp, Artificial Sequence
  derived and/or modified sequence
atgtggcctcctggcaggagtatcaccgtgaagttgagagagaagactgtttctcgtaaactggagatgaacggcccatcagcgtttcagggacttatctgcggtaaatacaatgggatgtgcctgcaggggccagccggagttcccggtcgagatggctctccgggtgccaacgggatccctggcactcccggtatccctggcagggacggcttcaaaggagagaaaggggagtgtttgagagagagttttgaggagtcctggacacctaactacaaacaatgctcctggtcatcactgaactatggcatagacctcggcaagattgcagaatgtactttcacaaagatgcgttcaaattccgccctgagagttctattttccggatctctccgccttaagtgccgaaatgcatgttgccaacgatggtacttcacattcaatggggctgagtgctctggccctctccctattgaggcgatcatctacctggaccagggctcaccagagatgaactctacaatcaacatccaccgcaccagttcggtagaaggcctttgtgagggaatcggtgctggtctcgtggacgtggccatctgggtagggacctgtagcgactatcccaagggcgacgccagtactgggtggaactcggtgtcacgaattatcatcgaggagctgcccaaatag

SEQ ID NO: 89635 - DNA, 815 bp, Artificial Sequence
  derived and/or modified sequence
agaaggtttaaggccggaaagggaaatgaaggggcccggcgctaaccctctaaggacctgttttgcttctgtttaaaccaaatgggcagtctgtcattacacacaccctgggtcttcatatgtggccgccaggtaggagcatcacagtcaagctacgggagaaaacagtttccaggaaactggaaatgaacggcccgagtgctttccaggggctcatctgtgggaagtataatggaatgtgcttacaagggccagcaggagtgcctggtcgagacgggagccctggggccaatggcattccgggtacacctgggatcccaggtcgggatggattcaaaggagaaaagggggaatgtctgagggaaagctttgaggagtcctggacacccaactacaagcagtgttcatggagttcattgaattatggcatagatcttgggaaaattgcggagtgtacatttacaaagatgcgttcaaatagtgctctaagagttttgttcagtggctcacttcggctaaaatgcagaaatgcatgctgtcagcgttggtatttcacattcaatggagctgaatgttcaggacctcttcccattgaagctataatttatttggaccaaggaagccctgaaatgaattcaacaattaatattcatcgcacttcttctgtggaaggactttgtgaaggaattggtgctggattagtggatgttgctatctgggttggtacttgttcagattacccaaaaggagatgcttctactggatggaattcagtttctcgcatcattattgaagaactaccaaactacctcttt

SEQ ID NO: 89636 - DNA, 1198 bp, Artificial Sequence
  derived and/or modified sequence
agaaggtttaaggccggaaagggaaatgaaggggcccggcgctaaccctctaaggacctgttttgcttctgtttaaaccaaatgggcagtctgtcattacacacaccctgggtcttcatatgtggccgccaggtaggagcatcacagtcaagctacgggagaaaacagtttccaggaaactggaaatgaacggcccgagtgctttccaggggctcatctgtgggaagtataatggaatgtgcttacaagggccagcaggagtgcctggtcgagacgggagccctggggccaatggcattccgggtacacctgggatcccaggtcgggatggattcaaaggagaaaagggggaatgtctgagggaaagctttgaggagtcctggacacccaactacaagcagtgttcatggagttcattgaattatggcatagatcttgggaaaattgcggagtgtacatttacaaagatgcgttcaaatagtgctctaagagttttgttcagtggctcacttcggctaaaatgcagaaatgcatgctgtcagcgttggtatttcacattcaatggagctgaatgttcaggacctcttcccattgaagctataatttatttggaccaaggaagccctgaaatgaattcaacaattaatattcatcgcacttcttctgtggaaggactttgtgaaggaattggtgctggattagtggatgttgctatctgggttggtacttgttcagattacccaaaaggagatgcttctactggatggaattcagtttctcgcatcattattgaagaactaccaaaataaatgctttaattttcatttgctacctctttttttattatgccttggaatggttcacttaaatgacattttaaataagtttatgtatacatctgaatgaaaagcaaagctaaatatgtttacagaccaaagtgtgatttcacactgtttttaaatctagcattattcattttgcttcaatcaaaagtggtttcaatattttttttagttggttagaatactttcttcatagtcacattctctcaacctataatttggaatattgttgtggtcttttgttttttctcttagtatagcatttttaaaaaaatataaaagctaccaatctttgtacaatttgtaaatgttaagaattttttttatatctgttaaataaaaattatttccaacaa

SEQ ID NO: 89637 - DNA, 699 bp, Artificial Sequence
  derived and/or modified sequence
atgtggccccccggcagaagcatcaccgtgaagctgagagagaagaccgtgagcagaaagctggagatgaacggccccagcgccttccagggcctgatctgcggcaagtacaacggcatgtgcctgcagggccccgccggcgtgcccggcagagacggcagccccggcgccaacggcatccccggcacccccggcatccccggcagagacggcttcaagggcgagaagggcgagtgcctgagagagagcttcgaggagagctggacccccaactacaagcagtgcagctggagcagcctgaactacggcatcgacctgggcaagatcgccgagtgcaccttcaccaagatgagaagcaacagcgccctgagagtgctgttcagcggcagcctgagactgaagtgcagaaacgcctgctgccagagatggtacttcaccttcaacggcgccgagtgcagcggccccctgcccatcgaggccatcatctacctggaccagggcagccccgagatgaacagcaccatcaacatccacagaaccagcagcgtggagggcctgtgcgagggcatcggcgccggcctggtggacgtggccatctgggtgggcacctgcagcgactaccccaagggcgacgccagcaccggctggaacagcgtgagcagaatcatcatcgaggagctgcccaactacctgttctag

SEQ ID NO: 89638 - DNA, 690 bp, Artificial Sequence
  derived and/or modified sequence
atgtggccccccggcagaagcatcaccgtgaagctgagagagaagaccgtgagcagaaagctggagatgaacggccccagcgccttccagggcctgatctgcggcaagtacaacggcatgtgcctgcagggccccgccggcgtgcccggcagagacggcagccccggcgccaacggcatccccggcacccccggcatccccggcagagacggcttcaagggcgagaagggcgagtgcctgagagagagcttcgaggagagctggacccccaactacaagcagtgcagctggagcagcctgaactacggcatcgacctgggcaagatcgccgagtgcaccttcaccaagatgagaagcaacagcgccctgagagtgctgttcagcggcagcctgagactgaagtgcagaaacgcctgctgccagagatggtacttcaccttcaacggcgccgagtgcagcggccccctgcccatcgaggccatcatctacctggaccagggcagccccgagatgaacagcaccatcaacatccacagaaccagcagcgtggagggcctgtgcgagggcatcggcgccggcctggtggacgtggccatctgggtgggcacctgcagcgactaccccaagggcgacgccagcaccggctggaacagcgtgagcagaatcatcatcgaggagctgcccaagtag

SEQ ID NO: 89639 - DNA, 645 bp, Artificial Sequence
  derived and/or modified sequence
atggccggcagcgccatgagcagcaagttcttcctggtggccctggccatcttcttcagcttcgcccaggtggtgatcgaggccaacagctggtggagcctgggcatgaacaaccccgtgcagatgagcgaggtgtacatcatcggcgcccagcccctgtgcagccagctggccggcctgagccagggccagaagaagctgtgccacctgtaccaggaccacatgcagtacatcggcgagggcgccaagaccggcatcaaggagtgccagtaccagttcagacacagaagatggaactgcagcaccgtggacaacaccagcgtgttcggcagagtgatgcagatcggcagcagagagaccgccttcacctacgccgtgagcgccgccggcgtggtgaacgccatgagcagagcctgcagagagggcgagctgagcacctgcggctgcagcagagccgccagacccaaggacctgcccagagactggctgtggggcggctgcggcgacaacatcgactacggctacagattcgccaaggagttcgtggacgccagagagagagagagaatccacgccaagggcagctacgagagcgccagaatcctgatgaacctgcacaacaacgaggccggcagaagagtgtag

SEQ ID NO: 89640 - DNA, 1098 bp, Artificial Sequence
  derived and/or modified sequence
atggccggcagcgccatgagcagcaagttcttcctggtggccctggccatcttcttcagcttcgcccaggtggtgatcgaggccaacagctggtggagcctgggcatgaacaaccccgtgcagatgagcgaggtgtacatcatcggcgcccagcccctgtgcagccagctggccggcctgagccagggccagaagaagctgtgccacctgtaccaggaccacatgcagtacatcggcgagggcgccaagaccggcatcaaggagtgccagtaccagttcagacacagaagatggaactgcagcaccgtggacaacaccagcgtgttcggcagagtgatgcagatcggcagcagagagaccgccttcacctacgccgtgagcgccgccggcgtggtgaacgccatgagcagagcctgcagagagggcgagctgagcacctgcggctgcagcagagccgccagacccaaggacctgcccagagactggctgtggggcggctgcggcgacaacatcgactacggctacagattcgccaaggagttcgtggacgccagagagagagagagaatccacgccaagggcagctacgagagcgccagaatcctgatgaacctgcacaacaacgaggccggcagaagaaccgtgtacaacctggccgacgtggcctgcaagtgccacggcgtgagcggcagctgcagcctgaagacctgctggctgcagctggccgacttcagaaaggtgggcgacgccctgaaggagaagtacgacagcgccgccgccatgagactgaacagcagaggcaagctggtgcaggtgaacagcagattcaacagccccaccacccaggacctggtgtacatcgaccccagccccgactactgcgtgagaaacgagagcaccggcagcctgggcacccagggcagactgtgcaacaagaccagcgagggcatggacggctgcgagctgatgtgctgcggcagaggctacgaccagttcaagaccgtgcagaccgagagatgccactgcaagttccactggtgctgctacgtgaagtgcaagaagtgcaccgagatcgtggaccagttcgtgtgcaagtag

SEQ ID NO: 89641 - DNA, 876 bp, Artificial Sequence
  derived and/or modified sequence
atgcagtacatcggcgagggcgccaagaccggcatcaaggagtgccagtaccagttcagacacagaagatggaactgcagcaccgtggacaacaccagcgtgttcggcagagtgatgcagatcggcagcagagagaccgccttcacctacgccgtgagcgccgccggcgtggtgaacgccatgagcagagcctgcagagagggcgagctgagcacctgcggctgcagcagagccgccagacccaaggacctgcccagagactggctgtggggcggctgcggcgacaacatcgactacggctacagattcgccaaggagttcgtggacgccagagagagagagagaatccacgccaagggcagctacgagagcgccagaatcctgatgaacctgcacaacaacgaggccggcagaagaaccgtgtacaacctggccgacgtggcctgcaagtgccacggcgtgagcggcagctgcagcctgaagacctgctggctgcagctggccgacttcagaaaggtgggcgacgccctgaaggagaagtacgacagcgccgccgccatgagactgaacagcagaggcaagctggtgcaggtgaacagcagattcaacagccccaccacccaggacctggtgtacatcgaccccagccccgactactgcgtgagaaacgagagcaccggcagcctgggcacccagggcagactgtgcaacaagaccagcgagggcatggacggctgcgagctgatgtgctgcggcagaggctacgaccagttcaagaccgtgcagaccgagagatgccactgcaagttccactggtgctgctacgtgaagtgcaagaagtgcaccgagatcgtggaccagttcgtgtgcaagtag

SEQ ID NO: 89642 - DNA, 645 bp, Artificial Sequence
  derived and/or modified sequence
atggccggcagcgcaatgtccagcaaattcttcttggttgctctggctatcttctttagtttcgctcaggtagtgattgaggctaattcttggtggtcccttggcatgaataaccccgtacagatgagcgaagtttatattattggtgcccagcctttgtgttcgcaactggcaggactgagccaaggccagaaaaagctgtgtcacctctaccaggatcacatgcaatatattggagaaggagccaaaactggcattaaagagtgtcagtaccaatttcgacaccgcaggtggaactgtagcacagttgataacacctccgtgttcggccgggtcatgcagatcgggagccgtgaaacagcctttacctatgcagtgagtgccgccggcgtggttaacgccatgagccgggcctgtagagagggagagcttagcacctgcggatgtagccgggctgcccgccccaaggatcttccaagagactggctttggggcggatgcggcgataacatagattatgggtaccgtttcgctaaagaattcgttgatgcccgggagagggagaggattcatgccaaggggtcttatgagtccgctagaattctcatgaacctgcacaacaacgaggctggacgtagagtgtag

SEQ ID NO: 89643 - DNA, 1098 bp, Artificial Sequence
  derived and/or modified sequence
atggcagggagcgcaatgagttccaaattttttttggttgctttagccatatttttttcctttgcacaagtcgtaatagaggccaactcatggtggagtttgggcatgaataacccggtccaaatgagcgaggtgtacattattggggcacagcctctttgcagtcagcttgctggcctctcgcaaggccaaaagaagctgtgtcacctgtatcaggaccacatgcagtacattggggaaggtgccaagaccggaatcaaagagtgtcaataccagtttcgacacagaaggtggaactgctccaccgtggacaataccagcgtgtttggcagagtaatgcagatcggaagtcgagagacggccttcacctatgctgtgagcgcagccggcgtggtcaatgccatgtcaagggcctgtagggagggggagctctcaacctgcgggtgtagtagggctgcgcgcccaaaggatctgccccgggattggctgtggggcggttgtggggacaacatcgattacggctatcgattcgccaaagaatttgtcgatgcaagagagcgcgagagaatccacgccaagggaagctatgagtcggcccgtatcttgatgaacctacacaacaatgaagctgggcgcagaacagtttacaatctagccgacgtagcatgcaaatgccatggagtcagtgggtcttgttccttgaaaacatgctggctgcagttagcggactttcggaaggtgggcgacgctcttaaggagaagtatgatagtgctgccgccatgagacttaactcaagggggaagctggtacaggtcaactcacgctttaacagccctactacacaggatctcgtttacatagatccgagccctgactactgcgtgagaaacgagagcacagggtccctcggcactcagggtcggctgtgcaataagacgtccgaaggaatggacggatgcgagctgatgtgttgcggacgggggtacgatcagttcaagactgtccaaactgaaagatgtcactgcaagtttcattggtgctgttatgtcaagtgcaagaaatgtaccgagatagtggaccagttcgtttgtaagtag

SEQ ID NO: 89644 - DNA, 876 bp, Artificial Sequence
  derived and/or modified sequence
atgcagtacataggtgaaggggcgaagaccggtatcaaggagtgccagtaccagttcaggcaccgtcggtggaactgctccaccgtcgacaacacctctgtgttcgggagagtcatgcagatagggtccagggaaactgcttttacatacgcggtgtccgcagccggagtcgtgaatgccatgagccgtgcctgccgggagggcgagctgtctacttgtggctgttcaagagccgcgagacccaaggacctcccaagggactggctctgggggggatgcggagataatattgattatgggtatagattcgccaaagagtttgttgatgcacgcgagcgggagcgtatacacgcaaaggggagctatgaaagcgctaggatccttatgaacctccataacaacgaggccggccggcgcacagtatacaacctggctgacgtcgcctgtaagtgtcacggagtatccggcagctgttctctcaagacatgctggcttcagcttgcagacttccggaaggttggcgacgcactcaaagagaagtacgactccgcagccgctatgcggctaaactcccgagggaaacttgtacaggtgaattcgcgctttaacagccccactactcaggaccttgtatacatcgatccaagtcctgattattgtgtccgcaatgaatctactggttccctgggcactcagggcaggctttgtaataaaacatcggagggaatggacggttgcgagctgatgtgctgtggcaggggatacgatcagttcaaaactgttcaaaccgagcgatgtcactgcaaattccattggtgctgctatgtcaagtgtaagaagtgcacagaaatcgtcgatcagttcgtgtgcaaatag

SEQ ID NO: 89645 - DNA, 645 bp, Artificial Sequence
  derived and/or modified sequence
atggccggcagcgccatgagcagcaagttcttcctggtggccctggccatcttcttctcctttgcccaggtggtgattgaggccaacagctggtggagcctgggcatgaacaaccctgtgcagatgtctgaggtgtacatcatcggggcccagcccctgtgcagccagctggccggcctgagccagggccagaagaagctgtgccacctgtaccaggaccacatgcagtacatcggggagggcgccaagacaggcatcaaggagtgccagtaccagttccgccaccggcgctggaactgcagcacagtggacaacacctctgtgtttggccgggtgatgcagatcggcagccgggagacagccttcacctatgctgtgtctgctgctggggtggtgaatgccatgagccgggcctgccgggagggggagctgagcacctgtggctgcagccgggccgcccggcccaaggacctgccccgggactggctgtggggcggctgtggggacaacattgattatggctacagatttgccaaggagtttgtggatgcccgggagcgggagcgcatccacgccaagggcagctatgagagcgcccgcatcctgatgaacctgcacaacaatgaggccggccggcgggtgtag

SEQ ID NO: 89646 - DNA, 1098 bp, Artificial Sequence
  derived and/or modified sequence
atggccggcagcgccatgagcagcaagttcttcctggtggccctggccatcttcttctcctttgcccaggtggtgattgaggccaacagctggtggagcctgggcatgaacaaccctgtgcagatgtctgaggtgtacatcatcggggcccagcccctgtgcagccagctggccggcctgagccagggccagaagaagctgtgccacctgtaccaggaccacatgcagtacatcggggagggcgccaagacaggcatcaaggagtgccagtaccagttccgccaccggcgctggaactgcagcacagtggacaacacctctgtgtttggccgggtgatgcagatcggcagccgggagacagccttcacctatgctgtgtctgctgctggggtggtgaatgccatgagccgggcctgccgggagggggagctgagcacctgtggctgcagccgggccgcccggcccaaggacctgccccgggactggctgtggggcggctgtggggacaacattgattatggctacagatttgccaaggagtttgtggatgcccgggagcgggagcgcatccacgccaagggcagctatgagagcgcccgcatcctgatgaacctgcacaacaatgaggccggccgcaggacagtgtacaacctggctgatgtggcctgcaagtgccacggcgtgtctggcagctgcagcctgaagacctgctggctgcagctggccgacttcaggaaggtgggagatgccctgaaggagaagtatgattctgctgctgccatgaggctgaacagccggggcaagctggtgcaggtgaacagccgcttcaacagccccaccacccaggacctggtgtacatcgaccccagcccagactactgtgtgagaaatgaaagcacaggcagcctgggcacccagggccgcctgtgcaacaagaccagcgagggcatggatggctgtgagctgatgtgctgcggccggggctatgaccagttcaagacagtgcagacagagcgctgccactgcaagttccactggtgctgctacgtgaagtgcaagaagtgcacagagatcgtggaccagtttgtgtgcaagtag

SEQ ID NO: 89647 - DNA, 876 bp, Artificial Sequence
  derived and/or modified sequence
atgcagtacatcggggagggcgccaagacaggcatcaaggagtgccagtaccagttccgccaccggcgctggaactgcagcacagtggacaacacctctgtgtttggccgggtgatgcagatcggcagccgggagacagccttcacctatgctgtgtctgctgctggggtggtgaatgccatgagccgggcctgccgggagggggagctgagcacctgtggctgcagccgggccgcccggcccaaggacctgccccgggactggctgtggggcggctgtggggacaacattgattatggctacagatttgccaaggagtttgtggatgcccgggagcgggagcgcatccacgccaagggcagctatgagagcgcccgcatcctgatgaacctgcacaacaatgaggccggccgcaggacagtgtacaacctggctgatgtggcctgcaagtgccacggcgtgtctggcagctgcagcctgaagacctgctggctgcagctggccgacttcaggaaggtgggagatgccctgaaggagaagtatgattctgctgctgccatgaggctgaacagccggggcaagctggtgcaggtgaacagccgcttcaacagccccaccacccaggacctggtgtacatcgaccccagcccagactactgtgtgagaaatgaaagcacaggcagcctgggcacccagggccgcctgtgcaacaagaccagcgagggcatggatggctgtgagctgatgtgctgcggccggggctatgaccagttcaagacagtgcagacagagcgctgccactgcaagttccactggtgctgctacgtgaagtgcaagaagtgcacagagatcgtggaccagtttgtgtgcaagtag

SEQ ID NO: 89648 - DNA, 645 bp, Artificial Sequence
  derived and/or modified sequence
atggccggcagcgccatgagcagcaagttcttcctggtggccctggccatcttttttagcttcgcccaagtggttatcgaagccaatagctggtggagcctgggaatgaacaaccccgtgcagatgagcgaggtgtacattatcggagcccagcctctgtgctcccagctcgctggactgtcacagggccagaaaaagttatgtcacctatatcaggatcacatgcagtacattggtgaaggggcgaagacaggcatcaaagaatgccagtaccagttccggcacaggagatggaattgctccacagtcgataacactagtgtttttggtcgcgtgatgcagatcgggtcacgtgagactgcgttcacctatgctgtcagtgccgctggcgtggtgaatgctatgagcagagcgtgcagagagggcgagctgagtacatgcggctgctctcgagcggcccgccccaaagatttgcctcgtgattggctatggggcggctgtggggataacattgactatggctaccggtttgccaaggagtttgtggatgcacgggagagggagcggatacacgccaaaggttcctacgagtctgcccggatcctgatgaacttacataataacgaggctggtcgcagagtttag

SEQ ID NO: 89649 - DNA, 1098 bp, Artificial Sequence
  derived and/or modified sequence
atggccggcagcgccatgagcagcaagttcttcctggtggccctggccatcttcttctcctttgcccaggttgtgatcgaggccaactcctggtggagtctcggcatgaacaatcccgtgcaaatgtccgaagtgtatataatcggggcccaacctctgtgttcccagctagctggactctcacaagggcagaaaaaactctgccacctctatcaggaccatatgcagtatatcggcgagggcgccaagaccggtatcaaggaatgccagtatcaattcagacataggcgctggaattgcagtactgtcgacaacaccagcgtgttcggcagagtaatgcagattggctccagggagacagccttcacctatgctgtgtccgccgctggggttgtgaacgccatgagccgagcatgtagggagggcgagcttagtacgtgtgggtgttccagggcagccagaccaaaagacctgccacgtgactggctgtggggcggctgcggggacaatatcgattacggctaccggtttgctaaggaatttgtagacgctcgtgaacgcgagcggatccacgcgaagggcagctatgagagtgcgcggatacttatgaatttacataacaacgaggccggcagaagaactgtttacaatttggcagacgtcgcttgcaagtgccatggcgtcagcggatcttgtagccttaagacttgttggctgcagttggcggactttcgtaaggtaggagatgctctcaaggagaaatacgattccgccgccgccatgcgcctcaattccagggggaaactggttcaagtaaattctaggttcaattctcctacgacccaggacctggtatacatagacccatcccccgactactgcgtccgtaacgagtccacagggtcactggggacacagggccggctctgtaataagacttccgagggaatggacggctgcgagctcatgtgttgcggaaggggttacgaccagttcaagaccgtccagactgaacgctgccattgtaagttccattggtgctgttatgtgaagtgtaaaaagtgcactgaaattgtggatcaattcgtctgtaaatag

SEQ ID NO: 89650 - DNA, 876 bp, Artificial Sequence
  derived and/or modified sequence
atgcagtacatcggcgagggcgccaagaccggcatcaaggagtgccagtatcagttcagacaccgccgctggaactgtagcaccgtggacaatactagcgtgttcgggagagtgatgcagatcgggagccgcgagaccgcctttacctacgctgtgtcagccgctggggtggttaacgcaatgtcccgggcttgccgtgaaggtgagctgtctacctgcggatgtagcagggcggcccggcctaaggacctccctagagattggctgtggggtggttgtggggacaatatcgactatggctataggttcgctaaagagtttgtggatgccagggaaagagagagaattcatgccaaaggcagctacgaatctgcccgcattctgatgaatctgcataacaatgaggcaggaaggcgcactgtgtacaacctggcggatgtagcatgcaaatgccacggggtttcaggaagctgcagcttgaagacttgctggctccagcttgccgatttcagaaaggtgggtgacgcccttaaggagaagtacgactccgctgcggccatgcgtctcaatagccggggcaaactggtccaagtgaatagtagatttaattcacccaccacgcaggatctggtgtatatcgacccatcccccgattattgcgttaggaacgagagtactgggtccctcggaacccagggtcggctgtgcaacaagacatcagagggaatggatgggtgcgagctcatgtgctgcggcaggggctatgatcaattcaaaacagtgcagactgagagatgccactgtaaattccattggtgttgctacgtgaagtgtaaaaaatgcacagaaattgtggaccaattcgtgtgtaagtag

SEQ ID NO: 89651 - DNA, 645 bp, Artificial Sequence
  derived and/or modified sequence
atggcaggatcagcaatgtccagcaagtttttcctcgtggctttggcaattttcttttcattcgcccaggtggtgattgaggccaactcctggtggtcgcttgggatgaataaccccgtgcagatgtcagaagtgtacattataggggcacagcctctgtgttctcagctggctgggctgtcccagggccagaagaaactgtgtcatctgtatcaggatcacatgcaatacatcggggagggggctaaaaccggtatcaaggaatgccagtaccaatttagacaccgacgctggaactgctctactgtagacaatacgtcggtttttggtcgggtcatgcagatcggttccagagagacagcctttacttacgccgtgagcgccgctggggtagtaaacgccatgtctagagcatgccgagaaggcgaactatcaacatgcggttgctcgcgcgctgcccgacctaaagacctccccagagactggctctggggcggttgtggcgataacatagactacgggtatcgttttgcaaaagaattcgtggacgccagggagcgggagcgtattcatgcgaaggggtcctacgagagcgcacgaatcctgatgaacctgcataacaatgaagctggtcgccgagtctag

SEQ ID NO: 89652 - DNA, 1098 bp, Artificial Sequence
  derived and/or modified sequence
atggctgggagcgcgatgtcttccaagttcttcctcgtagccttggcgattttcttttcttttgctcaggtagtgattgaggcgaacagttggtggtcactcggcatgaacaacccagtacagatgagtgaggtgtatattatcggtgctcagcccctctgctcacagctcgccggactgtctcagggccagaagaagctatgtcatctttatcaggaccacatgcagtatatcggggaaggcgctaagactggaatcaaggaatgccagtaccagttcaggcatcgccgatggaattgttccaccgtggataacacctccgtctttgggagagttatgcagattggtagtagagaaaccgcttttacatacgccgtgtctgcggctggggtggtgaatgcaatgagtcgcgcatgccgcgagggagaactgtcaacctgtgggtgctcaagagcggctcgcccaaaagatttacctcgggactggctttggggaggctgtggggataatattgactacgggtatagattcgctaaggaatttgtggatgctcgggaaagagagcgaatccacgccaaaggttcgtacgaaagcgcgcgaattctcatgaatctccacaacaacgaggccggacgcagaacggtatacaaccttgccgatgtggcttgtaaatgccacggagtctctggttcctgttcactaaagacctgctggctgcagctcgccgattttcgcaaggtcggcgatgctttaaaagaaaaatatgactcggctgcagcaatgcggcttaattcgcgtggcaaactcgtccaggttaatagcagattcaactcccccaccacccaggaccttgtgtacatcgacccctcacctgactattgcgtgaggaacgaatccaccggaagcctaggcacccagggtcgcctgtgcaacaagacttcagaagggatggacggatgcgagctgatgtgctgtggcaggggctatgatcagttcaaaacggtgcagacagagagatgtcactgtaagtttcattggtgctgctatgtgaagtgtaaaaaatgtactgagattgtagaccagttcgtctgcaagtag

SEQ ID NO: 89653 - DNA, 876 bp, Artificial Sequence
  derived and/or modified sequence
atgcaatacattggcgaaggagccaaaaccggcatcaaggagtgtcagtatcagttcagacatcgcagatggaattgtagcacagtcgataatacaagtgtcttcggcagggtcatgcagattggctctcgtgagacagctttcacatatgcggtctccgctgcaggggtggtgaatgccatgtcgcgggcatgtcgggagggagagttgtccacctgcggatgctctcgagcagcacgaccaaaagacttgcccagagactggttgtggggtggatgcggggacaacatcgattatggttatagattcgcaaaggagttcgttgacgcaagagaacgcgaacggatccacgcaaaaggctcatatgagagcgctcgaatcctaatgaatctacacaataatgaagctggacggagaaccgtgtataacctggcagatgttgcctgtaaatgccatggggtctcaggatcatgttcgcttaagacatgctggctgcagcttgccgactttcggaaagtaggtgatgcactcaaagagaagtatgatagtgccgcagccatgcgcctgaatagtaggggtaagctcgtgcaagtgaactctagatttaacagcccaactactcaggatttggtgtatattgatccttctcccgactattgtgtgcgtaacgaaagcactggctctcttggtacccagggaagactatgtaataaaacaagcgaaggcatggatggatgtgagcttatgtgctgcgggagaggatacgatcagtttaagactgtgcagactgagaggtgccactgcaagtttcactggtgctgttacgttaagtgcaaaaagtgcacagagattgtggatcagttcgtgtgcaagtag

SEQ ID NO: 89654 - DNA, 491 bp, Artificial Sequence
  derived and/or modified sequence
caggcttaacccggtcgctccgctcggattcctcggctgcgctcgctcgggtggcgacttcctccccgcgccccctccccctcgccatgaagaagtccattggaatattaagcccaggagttgctttggggatggctggaagtgcaatgtcttccaagttcttcctagtggctttggccatatttttctccttcgcccaggttgtaattgaagccaattcttggtggtcgctaggtatgaataaccctgttcagatgtcacaagacgtcggagggcatggatggctgcgagctcatgtgctgcggccgtggctacgaccagttcaagaccgtgcagacggagcgctgccactgcaagttccactggtgctgctacgtcaagtgcaagaagtgcacggagatcgtggaccagtttgtgtgcaagtagtgggtgccacccagcactcagccccgctcccaggacccgcttatttatagaaagtacagtgattc

SEQ ID NO: 89655 - DNA, 2976 bp, Artificial Sequence
  derived and/or modified sequence
actaactcgcggctgcaggatcagcgtctggaagcagacgtttcggctacagacccagagaggaggagctggagatcaggaggcgtgagccgccaagagtttgcagaatctgtggtgtgaatgaactgggggcacctgggcgcacagatcgccccccttcccccgccccgggccacagttgagtagtggtacatttttttcaccctcttgtgaagaatttctttttattattatttgtcgtaaggtcttttgcacaatcacgcccacatttggggttggaaagccctaattaccgccgtcgctgatggacgttggaaacggagcgcctctccgtggaacagttgcctgcgcgccctcgccggaccggcggctccctagttgcgccccgaccaggccctgcccttgctgccggctcgcgcgcgtccgcgccccctccattcctgggcgcatcccagctctgccccaactcgggagtccaggcccgggcgccagtgcccgcttcagctccggttcactgcgcccgccggacgcgcgccggaggactccgcagccctgctcctgaccgtccccccaggcttaacccggtcgctccgctcggattcctcggctgcgctcgctcgggtggcgacttcctccccgcgccccctccccctcgccatgaagaagtccattggaatattaagcccaggagttgctttggggatggctggaagtgcaatgtcttccaagttcttcctagtggctttggccatatttttctccttcgcccaggactttctcaaggacagaagaaactgtgccacttgtatcaggaccacatgcagtacatcggagaaggcgcgaagacaggcatcaaagaatgccagtatcaattccgacatcgaaggtggaactgcagcactgtggataacacctctgtttttggcagggtgatgcagataggcagccgcgagacggccttcacatacgcggtgagcgcagcaggggtggtgaacgccatgagccgggcgtgccgcgagggcgagctgtccacctgcggctgcagccgcgccgcgcgccccaaggacctgccgcgggactggctctggggcggctgcggcgacaacatcgactatggctaccgctttgccaaggagttcgtggacgcccgcgagcgggagcgcatccacgccaagggctcctacgagagtgctcgcatcctcatgaacctgcacaacaacgaggccggccgcaggacggtgtacaacctggctgatgtggcctgcaagtgccatggggtgtccggctcatgtagcctgaagacatgctggctgcagctggcagacttccgcaaggtgggtgatgccctgaaggagaagtacgacagcgcggcggccatgcggctcaacagccggggcaagttggtacaggtcaacagccgcttcaactcgcccaccacacaagacctggtctacatcgaccccagccctgactactgcgtgcgcaatgagagcaccggctcgctgggcacgcagggccgcctgtgcaacaagacgtcggagggcatggatggctgcgagctcatgtgctgcggccgtggctacgaccagttcaagaccgtgcagacggagcgctgccactgcaagttccactggtgctgctacgtcaagtgcaagaagtgcacggagatcgtggaccagtttgtgtgcaagtagtgggtgccacccagcactcagccccgctcccaggacccgcttatttatagaaagtacagtgattctggtttttggtttttagaaatattttttatttttccccaagaattgcaaccggaaccattttttttcctgttaccatctaagaactctgtggtttattattaatattataattattatttggcaataatgggggtgggaaccaagaaaaatatttattttgtggatctttgaaaaggtaatacaagacttcttttgatagtatagaatgaaggggaaataacacataccctaacttagctgtgtggacatggtacacatccagaaggtaaagaaatacattttctttttctcaaatatgccatcatatgggatgggtaggttccagttgaaagagggtggtagaaatctattcacaattcagcttctatgaccaaaatgagttgtaaattctctggtgcaagataaaaggtcttgggaaaacaaaacaaaacaaaacaaacctcccttccccagcagggctgctagcttgctttctgcattttcaaaatgataatttacaatggaaggacaagaatgtcatattctcaaggaaaaaaggtatatcacatgtctcattctcctcaaatattccatttgcagaaatgacagtacttattaattgagtccctaaggaatattcagcccactacatagatagcttttttttttttttttttaataaggacacctctttccaaacagtgccatcaaatatgttcttatctcagacttacgttgttttaaaagtttggaaagatacacatctttcataccccccttaggcaggttggctttcatatcacctcagccaactgtggctcttaatttattgcataatgatattcacatcccctcagttgcagtgaattgtgagcaaaagatcttgaaagcaaaaagcactaattagtttaaaatgtcacttttttggtttttattatacaaaaaccatgaagtactttttttatttgctaaatcagattgttcctttttagtgactcatgtttatgaagagagttgagtttaacaatcctagcttttaaaagaaactatttaatgtaaaatattctacatgtcattcagatattatgtatatcttctagcctttattctgtacttttaatgtacatatttctgtcttgcgtgatttgtatatttcactggtttaaaaaacaaacatcgaaaggcttatgccaaatggaagatagaatataaaataaaacgttacttgtatattggt

SEQ ID NO: 89656 - protein, 198 aa, Artificial Sequence
  derived and/or modified sequence
MWKLGRGRVLLDEPPEEEDGLRGGPPPAAAAAAQAQVQGASFRGWKEVTSLFNKDDEQHLLERCKSPKSKGTNLRLKEELKAEKKSGFWDNLVLKQNIQSKKPDEIEGWEPPKLALEDISADPEDTVGGHPSWSGWEDDAKGSTKYTSLASSANSSRWSLRAAGRLIKEVWINFSQLIISFRKHCLAHYRELRLCIKY

SEQ ID NO: 89657 - DNA, 597 bp, Artificial Sequence
  derived and/or modified sequence
atgtggaagctgggcagaggcagagtgctgctggacgagccccccgaggaggaggacggcctgagaggcggccccccccccgccgccgccgccgccgcccaggcccaggtgcagggcgccagcttcagaggctggaaggaggtgaccagcctgttcaacaaggacgacgagcagcacctgctggagagatgcaagagccccaagagcaagggcaccaacctgagactgaaggaggagctgaaggccgagaagaagagcggcttctgggacaacctggtgctgaagcagaacatccagagcaagaagcccgacgagatcgagggctgggagccccccaagctggccctggaggacatcagcgccgaccccgaggacaccgtgggcggccaccccagctggagcggctgggaggacgacgccaagggcagcaccaagtacaccagcctggccagcagcgccaacagcagcagatggagcctgagagccgccggcagactgatcaaggaggtgtggatcaacttcagccagctgatcatcagcttcagaaagcactgcctggcccactacagagagctgagactgtgcatcaagtactag

SEQ ID NO: 89658 - DNA, 2306 bp, Artificial Sequence
  derived and/or modified sequence
ggcagagcgtccggcggccgggagggacgcggagccacagcccgacgcacggacggagggacgccggagcccgcctgaccatgtggaagctgggccggggccgagtgctgctggacgagccccccgaggaggaggacggcctgcgtggggggccgccaccggccgccgccgccgccgcccaggcgcaggttcagggagcaagtttccgaggttggaaagaagtgacttcactgtttaacaaagatgatgagcagcatctcctggaaagatgtaaatctcccaagtccaaaggaactaacttacgattaaaagaagagttgaaggcagagaagaaatctggattttgggacaatttggttttaaaacagaatatacagtctaaaaaaccagatgaaattgaaggttgggagcctccaaaacttgctcttgaagacatatcggctgaccctgaggacaccgtgggtggccacccatcctggtcaggctgggaggatgacgccaagggctcgaccaagtacaccagcctggccagctctgccaacagctccaggtggagcctgcgcgcggcagggaggctgattaaagaagtatggatcaattttagtcagttgataatttcatttaggaaacattgtcttgctcattatagagagttaagactgtgcataaaatactgaagtgcctcttttttattaggctcatatgtttgttcttgcaaagcgagatgcctattgtgattggtgttagatctgtaagaagctgtgttttttccacaagaataatcgacgaccggtttgagagcatctctcgcgttctttttctgtctgcttactgtccttgacaatgtgatcctgcacagtatcaggtgccagttatgcgtccctggaaggttggctcttatcagcaagtcctgcagatatctcttagataaaagtggtttgaaagaaaaggtatatttttcttttttgtttaaaagtaaaataaaacctccagttacactgtgcattcccctcacgtaaaaacaagacaaaaaccctttcctgagttgctcggcatgcactcctgtgctgtttcatgcatgtggatgttccttccgtttgttcctgtggaataactgagtgtgcctgatggcagaacacactgcagtgttatcagtgtctgcatgttttttaatagaacaggtttacttgatctgtcatctgttatgcaaaaaacagcaattacttttgcatccatctagctaaatctataatctgtgtcaatcacttatacctatcaatcatccgtatctattcacctgtcctctatgtctgtcttctctcagtctacatccatctagccttctgtcaatcatctacttttttttttaatagaacaagaagtttacttatcaagtcttgaaagggggacatgtttcaattggtgttcaaacaaaaattccagcttgtattagaaccttgaaatggtgaagttgtggaggttttctttgttccataatacagagacaagttcataatttttagtataacagctaagttgacaaattctaagtttcctcaggtaaatagtcataactgtccttttccctagagaagtgcttgctgggatagtaaaaacatacaccatttcatgacttctgcaaatactttccagcggaagtcagtgtaggtttgtttttggctaacatggtcttgctgcgcaggaatgtaaacactgtgtttgaaactctggaaatcacgtgtgtggggagatggggacgcttcccatgttgtggggagctctgtggctgtgatggctgcagttgccgtgcctctgttggaacgctaagtgcctgcaactcacgtcaatcatagaattgtgacgcacagttggcaaaatagttctttatgctatttctcaaaatttgaggacaaacccagattgggattggaatatgcactgtaaatcaaatttttcttatctacaaagactaatgtaaaaatgattttttcttctgtgcctgattaaattaactgtggtttttaatataaatatttattggtgtgctttgggagaaaaattatcttttcttgaaagaagttatcaaagcaaatttattatcttcacaagttaatgggagaatgtggttttgattctgggtgtttgaattgtgtaaacacacagcttccttgtgtgaagagagttgtcctgtgctccttctactgtactttttttattttttaataggaaagtgatgtgcttcagagaagggttcctccttaatgttgaggttttttaaaaataaaaatactgtttttaagctcttt

SEQ ID NO: 89659 - DNA, 2622 bp, Artificial Sequence
  derived and/or modified sequence
agtccgggccgagcccgcggcgccccaggccccagcggccccaccgcccaccagggctgggcgaggcttcctcccggcgcccccactatcccgcgacctcgggcgccggaggggatgagtcccggatgcccggcgcccaggccccgagggatgccctgaagcgctggggagccgcaggcagagcgtccggcggccgggagggacgcggagccacagcccgacgcacggacggagggacgccggagcccgcctgaccatgtggaagctgggccggggccgagtgctgctggacgagccccccgaggaggaggacggcctgcgtggggggccgccaccggccgccgccgccgccgcccaggcgcaggttcagggagcaagtttccgaggttggaaagaagtgacttcactgtttaacaaagatgatgagcagcatctcctggaaagatgtaaatctcccaagtccaaaggaactaacttacgattaaaagaagagttgaaggcagagaagaaatctggattttgggacaatttggttttaaaacagaatatacagtctaaaaaaccagatgaaattgaaggttgggagcctccaaaacttgctcttgaagacatatcggctgaccctgaggacaccgtgggtggccacccatcctggtcaggctgggaggatgacgccaagggctcgaccaagtacaccagcctggccagctctgccaacagctccaggtggagcctgcgcgcggcagggaggctgattaaagaagtatggatcaattttagtcagttgataatttcatttaggaaacattgtcttgctcattatagagagttaagactgtgcataaaatactgaagtgcctcttttttattaggctcatatgtttgttcttgcaaagcgagatgcctattgtgattggtgttagatctgtaagaagctgtgttttttccacaagaataatcgacgaccggtttgagagcatctctcgcgttctttttctgtctgcttactgtccttgacaatgtgatcctgcacagtatcaggtgccagttatgcgtccctggaaggttggctcttatcagcaagtcctgcagatatctcttagataaaagtggtttgaaagaaaaggtatatttttcttttttgtttaaaagtaaaataaaacctccagttacactgtgcattcccctcacgtaaaaacaagacaaaaaccctttcctgagttgctcggcatgcactcctgtgctgtttcatgcatgtggatgttccttccgtttgttcctgtggaataactgagtgtgcctgatggcagaacacactgcagtgttatcagtgtctgcatgttttttaatagaacaggtttacttgatctgtcatctgttatgcaaaaaacagcaattacttttgcatccatctagctaaatctataatctgtgtcaatcacttatacctatcaatcatccgtatctattcacctgtcctctatgtctgtcttctctcagtctacatccatctagccttctgtcaatcatctacttttttttttaatagaacaagaagtttacttatcaagtcttgaaagggggacatgtttcaattggtgttcaaacaaaaattccagcttgtattagaaccttgaaatggtgaagttgtggaggttttctttgttccataatacagagacaagttcataatttttagtataacagctaagttgacaaattctaagtttcctcaggtaaatagtcataactgtccttttccctagagaagtgcttgctgggatagtaaaaacatacaccatttcatgacttctgcaaatactttccagcggaagtcagtgtaggtttgtttttggctaacatggtcttgctgcgcaggaatgtaaacactgtgtttgaaactctggaaatcacgtgtgtggggagatggggacgcttcccatgttgtggggagctctgtggctgtgatggctgcagttgccgtgcctctgttggaacgctaagtgcctgcaactcacgtcaatcatagaattgtgacgcacagttggcaaaatagttctttatgctatttctcaaaatttgaggacaaacccagattgggattggaatatgcactgtaaatcaaatttttcttatctacaaagactaatgtaaaaatgattttttcttctgtgcctgattaaattaactgtggtttttaatataaatatttattggtgtgctttgggagaaaaattatcttttcttgaaagaagttatcaaagcaaatttattatcttcacaagttaatgggagaatgtggttttgattctgggtgtttgaattgtgtaaacacacagcttccttgtgtgaagagagttgtcctgtgctccttctactgtactttttttattttttaataggaaagtgatgtgcttcagagaagggttcctccttaatgttgaggttttttaaaaataaaaatactgtttttaagctctttccttattggtttgcatgattattggcatctgcttacgatggctttaatcactcagagctaatggcacctttcctatttagcctcattttagaatgcagtcaacacatgtagacttttcacaaataaatgaacaacttcaa

SEQ ID NO: 89660 - DNA, 597 bp, Artificial Sequence
  derived and/or modified sequence
atgtggaaactgggaagaggccgggttctgttggacgagccacctgaagaggaggatggtctgagggggggcccacccccagcagcagctgcggctgcgcaggcccaggtccagggagccagttttcgaggatggaaagaggtgacttcgctgttcaacaaagacgatgagcaacacttattggaaaggtgtaagtcgcccaaaagcaaaggaacgaatctgcggctgaaagaggaactgaaggctgagaagaagtctggcttttgggacaacctggtcctcaaacagaacatccaaagtaagaagccagatgaaatagagggctgggaaccccctaagctcgcactcgaagacataagtgctgaccccgaggacacagttgggggacacccctcatggagtgggtgggaggatgatgcaaagggctctactaagtacacttcattggcgagctcggccaacagttcccgatggtccctgcgggccgctggtcgcctgatcaaggaagtatggataaacttttcacagctgattattagctttcgcaaacactgcctcgcacactatcgagagttaagattgtgtatcaaatattag

SEQ ID NO: 89661 - DNA, 597 bp, Artificial Sequence
  derived and/or modified sequence
atgtggaagctgggaagaggtcgagtgctgctcgatgagccccctgaggaagaggatgggctgcgtgggggtccaccgcctgccgccgccgcagcggcacaggcccaggttcaaggggcatcgtttcgcggttggaaggaggttacatcactgtttaacaaagatgatgaacagcacttactcgagcggtgtaagagtccaaagtccaagggcacaaaccttcgcctcaaagaggaactgaaagctgagaagaaaagcggcttctgggataacctggtgctgaaacagaacatacagtcaaaaaaaccagacgagatagaaggctgggagccccctaagttggccctggaggatatcagtgctgacccagaggatacggttgggggacacccatcctggtcgggctgggaagatgacgcgaagggcagcacaaaatacacctctctagctagcagcgcaaattcttcccggtggtctctgcgagcagccgggcgtttaattaaggaagtatggattaatttcagtcagctgattatctcgttccggaaacactgtctcgctcattaccgtgagttacgactttgcattaagtactag

SEQ ID NO: 89662 - DNA, 597 bp, Artificial Sequence
  derived and/or modified sequence
atgtggaagctgggccggggccgggtgctgctggatgagcccccagaggaggaggatggcctgcggggcggccccccacctgctgctgctgctgctgcccaggcccaggtgcagggcgccagcttccggggctggaaggaggtgaccagcctcttcaacaaggatgatgagcagcacctgctggagcgctgcaagagccccaagagcaagggcaccaacctgcggctgaaggaggagctgaaggccgagaagaagagcggcttctgggacaacctggtgctgaagcagaacatccagagcaagaagccagatgaaattgagggctgggagccccccaagctggccctggaggacatctctgctgaccctgaggacacagtgggcggccaccccagctggagcggctgggaggatgatgccaagggcagcaccaagtacaccagcctggccagcagcgccaacagcagccgctggagcctgcgggctgctggccgcctcatcaaggaggtgtggatcaacttcagccagctgatcatctccttcaggaagcactgcctggcccactaccgggagctgcggctgtgcatcaagtactag

SEQ ID NO: 89663 - DNA, 597 bp, Artificial Sequence
  derived and/or modified sequence
atgtggaagctgggccggggccgggtgctgctggacgagccccccgaggaggaagacggccttcgtgggggccctcctcctgccgctgctgctgctgcccaggcacaagtacagggcgcttcttttagaggttggaaagaggtcacgagcctgttcaacaaagatgacgaacagcacctgctagagagatgtaagtccccaaagagcaaaggcacgaacctgcgcctcaaagaggagctaaaagcagaaaagaagtctgggttttgggataaccttgtgcttaaacagaatatccagagtaagaagcctgacgaaatagaggggtgggaaccccctaaactggctcttgaggacatttccgccgaccccgaggacacggtgggcggccacccatcctggtctggctgggaggatgacgcaaaggggtccaccaagtacacttctctcgccagttccgcaaactctagcagatggagcctacgggcagccggccggctgataaaagaggtttggataaacttttcccaacttattatctcattccgaaagcattgccttgctcactatcgagagctgaggctgtgtatcaagtattag

SEQ ID NO: 89664 - DNA, 597 bp, Artificial Sequence
  derived and/or modified sequence
atgtggaagctgggccggggccgggtgctgctggacgagccccccgaagaggaggatggtcttcgaggcggccccccaccggcagctgcggcggctgcacaagctcaggtccagggtgcatcctttcggggctggaaagaagtcacaagtctgtttaataaagatgacgagcagcaccttttggagaggtgtaaaagtccaaagtcaaagggtacaaacctccgcctgaaagaagagctaaaggcagagaagaaatccggcttttgggataatctcgttttgaaacagaatattcagtcgaagaagccggatgagatcgaaggatgggagccaccgaagcttgcactggaggatatcagcgccgatcccgaagacacagtgggaggccacccttcctggtcaggatgggaagatgacgcaaaagggtctacaaaatacacttctctcgcatctagcgcgaactcgagccgctggagcttaagagctgccgggagactcattaaggaggtgtggatcaacttttcccaactgatcatcagctttcgcaagcactgcctggcccactatcgcgagctccgcctttgcattaaatactag

SEQ ID NO: 89665 - DNA, 597 bp, Artificial Sequence
  derived and/or modified sequence
atgtggaagctgggtcgcggaagagttctgctggacgagcccccagaggaagaagacggcctccgcggaggcccaccacccgcagctgcagccgctgcccaggcccaagtgcaaggtgcctcctttcgcggatggaaagaggtcacttccctttttaataaagacgacgagcaacatcttctcgaaagatgtaaatcccctaaaagcaagggaaccaacctgcgcttaaaagaggagttgaaggccgagaagaaatctggtttttgggacaatctggttctgaagcagaatatccaatccaaaaaaccagatgagatcgaaggttgggagcccccaaaactggccttggaggacatctccgccgaccctgaggatacagtgggcggtcaccctagttggtcaggctgggaagatgacgctaaagggagcaccaaatacaccagtctggcttcgtctgcaaattcttcccgttggagtctgcgggctgccggtaggctgatcaaggaggtgtggattaacttctcccagctcatcatctcttttaggaagcactgcttagcccattaccgcgagcttaggctgtgcatcaaatattag

SEQ ID NO: 89666 - DNA, 597 bp, Artificial Sequence
  derived and/or modified sequence
atgtggaagctaggccgtggtcgtgttttgctggacgaacctcctgaggaagaagacggtttaaggggcggacccccacccgcagccgcagccgcagctcaggctcaagtgcagggggcatcgtttcggggatggaaggaggttacgagtctgtttaataaggatgacgagcagcacctgctggagagatgcaaaagccccaagagcaagggtaccaacctgcgactcaaagaggaactgaaggcagagaaaaaaagcggcttctgggacaatcttgtgctgaagcagaatatacagtcgaagaaaccagacgagattgagggctgggaaccgcctaagttggctctggaggatattagcgccgaccctgaggataccgtcggcggacatccgtcctggtccgggtgggaagacgacgccaagggctctacaaagtatacttcccttgcctcaagcgcaaatagctctcgctggagtctccgagctgcaggcagactcatcaaggaggtttggattaacttttcgcaactcataatctcctttagaaaacattgcctcgcacattaccgagagctgcgcctttgcatcaagtattag

SEQ ID NO: 89667 - protein, 220 aa, Artificial Sequence
  derived and/or modified sequence
MNIRNARPEDLMNMQHCNLLCLPENYQMKYYFYHGLSWPQLSYIAEDENGKIVGYVLAKMEEDPDDVPHGHITSLAVKRSHRRLGLAQKLMDQASRAMIENFNAKYVSLHVRKRISEVEPKYYADGEDAYAMKRDLTQMADELRRHLELKEKGRHVVLGAIENKVESKGNSPPSSGEACREEKGLAAEDSGGDSKDLSEVSETTESTDVKDSSEASDSAS

SEQ ID NO: 89668 - protein, 131 aa, Artificial Sequence
  derived and/or modified sequence
MNIRNARPEDLMNMQHCNLLCLPENYQMKYYFYHGLSWPQLSYIAEDENGKIVGYVLAKMEEDPDDVPHGHITSLAVKRSHRRLGLAQKLMDQASRAMIENFNAKYVSLHVRKRSVKWSPNTMQMGRTPMP

SEQ ID NO: 89669 - DNA, 663 bp, Artificial Sequence
  derived and/or modified sequence
atgaacatcagaaacgccagacccgaggacctgatgaacatgcagcactgcaacctgctgtgcctgcccgagaactaccagatgaagtactacttctaccacggcctgagctggccccagctgagctacatcgccgaggacgagaacggcaagatcgtgggctacgtgctggccaagatggaggaggaccccgacgacgtgccccacggccacatcaccagcctggccgtgaagagaagccacagaagactgggcctggcccagaagctgatggaccaggccagcagagccatgatcgagaacttcaacgccaagtacgtgagcctgcacgtgagaaagagaatcagcgaggtggagcccaagtactacgccgacggcgaggacgcctacgccatgaagagagacctgacccagatggccgacgagctgagaagacacctggagctgaaggagaagggcagacacgtggtgctgggcgccatcgagaacaaggtggagagcaagggcaacagcccccccagcagcggcgaggcctgcagagaggagaagggcctggccgccgaggacagcggcggcgacagcaaggacctgagcgaggtgagcgagaccaccgagagcaccgacgtgaaggacagcagcgaggccagcgacagcgccagctag

SEQ ID NO: 89670 - DNA, 663 bp, Artificial Sequence
  derived and/or modified sequence
atgaatataagaaacgctaggccagaagacctgatgaacatgcagcactgtaatttgctctgcctccccgagaactaccagatgaagtactacttctaccacggcctgagttggccccaactgagctacatagccgaagatgagaatggcaagatagtcgggtatgtgctcgcaaagatggaggaggacccagatgatgtcccccacggccatataacgtcgctggctgttaaaagatcacaccgaagattgggcctggcacagaagcttatggaccaggcctcgagagccatgattgagaactttaatgccaaatacgtgtccctgcatgtccgcaaaagaatctcagaggtggagcctaaatattatgccgatggagaggatgcctacgccatgaaacgggacctgacacagatggccgacgagcttaggcgccacctcgaactgaaggaaaaaggaaggcacgtggtgcttggggccatcgagaacaaggtcgaaagtaaagggaactctcccccttcatcaggagaggcctgccgggaggaaaagggactcgccgctgaagactcaggaggcgacagcaaggatctgagtgaggtctccgagaccaccgagagcaccgacgtcaaggactcgtccgaagcatctgattctgcatcctag

SEQ ID NO: 89671 - DNA, 663 bp, Artificial Sequence
  derived and/or modified sequence
atgaacatcagaaatgcccggcctgaggacctgatgaacatgcagcactgcaacctgctgtgcctgcctgagaactaccagatgaagtactacttctaccacggcctgtcctggccccagctgagctacatcgccgaggatgaaaatggcaagatcgtgggctacgtgctggccaagatggaggaggaccctgatgatgtgccccacggccacatcaccagcctggccgtgaagaggagccaccggcggctgggcctggcccagaagctgatggaccaggccagccgggccatgattgagaacttcaatgccaagtatgtgtccctgcacgtgaggaagaggatcagcgaggtggagcccaagtactatgcagatggagaagatgcctatgccatgaagagggacctgacccagatggctgatgagctgcggcggcacctggagctgaaggagaagggcagacatgtggtgctgggcgccatcgagaacaaggtggagagcaagggcaacagcccccccagcagtggagaggcctgccgggaggagaagggcctggccgctgaggacagcggcggggacagcaaggacctgtctgaggtgtctgagaccacagagagcacagatgtgaaggacagcagcgaggccagtgacagcgccagctag

SEQ ID NO: 89672 - DNA, 663 bp, Artificial Sequence
  derived and/or modified sequence
atgaacatccggaacgcccggcccgaggacctgatgaacatgcagcactgcaatttattgtgccttcccgagaactatcagatgaaatactatttctaccatggcctgtcctggcctcagctgtcttacatcgccgaggatgagaacgggaaaattgtcggctatgtcttggctaaaatggaagaagatcctgatgacgtcccgcatggacatattacatccctcgccgtgaagcgctctcatcgaaggctcgggttagctcagaaactgatggaccaggctagccgtgcaatgatcgaaaactttaatgcgaagtatgtgtccctccatgtgcgcaagcggataagcgaggtcgagcccaaatactatgctgatggcgaggacgcttatgccatgaagcgcgacctgacgcaaatggccgacgagctccgccgccatctggaacttaaggagaaagggcgacatgtcgtactgggagctattgaaaacaaggtggaatccaaagggaacagccccccatcttccggtgaggcttgcagagaagagaaagggctggccgccgaagatagcggcggcgactcaaaggacctttccgaggtgtccgagacaaccgagagcaccgacgtgaaagacagcagcgaagcgtccgacagtgcgagttag

SEQ ID NO: 89673 - DNA, 837 bp, Artificial Sequence
  derived and/or modified sequence
agcgagcccagctccggtcccagccccggccgtcccggcgtcgcttcggagcgcggcggcagctgactgcgccttcacgatccgctgggacccgcgagccccgccgccgttatgaacatccgcaatgcgaggccagaggacctaatgaacatgcagcactgcaacctcctctgcctgcccgagaactaccagatgaaatactacttctaccatggcctttcctggccccagctctcttacattgctgaggacgagaatgggaagattgtggggtatgtcctggccaaaatggaagaggacccagatgatgtgccccatggacatatcacctcattggctgtgaagcgttcccaccggcgcctcggtctggctcagaaactgatggaccaggcctctcgagccatgatagagaacttcaatgccaaatatgtctccctgcatgtcaggaagaggatcagtgaagtggagcccaaatactatgcagatggggaggacgcctatgccatgaagcgggacctcactcagatggccgacgagctgaggcggcacctggagctgaaagagaagggcaggcacgtggtgctgggtgccatcgagaacaaggtggagagcaaaggcaattcacctccgagctcaggagaggcctgtcgcgaggagaagggcctggctgccgaggatagtggtggggacagcaaggacctcagcgaggtcagcgagaccacagagagcacagatgtcaaggacagctcagaggcctccgactcagcctcctagagcctgccccatcccctcctcaccccacgagctttcacaataaattcgctccgtggcactggg

SEQ ID NO: 89674 - DNA, 663 bp, Artificial Sequence
  derived and/or modified sequence
atgaacattcgcaacgcccgtcccgaggacttaatgaatatgcagcactgcaatctcctgtgtcttcccgagaattaccagatgaagtactacttttatcacggcctgtcttggccgcaattgtcatatatagccgaggatgagaatgggaagatcgtgggttatgtcttagctaagatggaagaagaccccgacgacgttccccatgggcatatcactagcttggccgtcaagcgctcacaccgacggctcggactcgcccagaagctgatggaccaggctagtagagctatgatcgaaaactttaatgccaaatacgtgagcttgcacgttaggaagcggataagcgaggtagagccaaagtactatgccgatggcgaggatgcatacgccatgaagcgagatctcacacagatggccgacgagcttcggagacatctcgaactgaaagagaaagggcgtcacgtggtgctgggggcaatcgagaataaagtggaatcaaagggcaactcgcccccatctagtggcgaggcctgcagagaagagaaagggctcgccgctgaagattccggcggagactccaaggacctgtccgaagtgtcggagacaaccgaatctaccgatgttaaagacagtagtgaagcctcagactctgcctcctag

SEQ ID NO: 89675 - DNA, 663 bp, Artificial Sequence
  derived and/or modified sequence
atgaacatccgcaacgccagacctgaggatctgatgaatatgcagcattgcaatctgctgtgcctgccagaaaattaccagatgaaatactacttctatcatgggctgagctggccacagctgtcttacatagccgaagacgaaaacggaaaaatcgttggatatgtattggccaaaatggaggaagatccagacgatgtgccgcacgggcacatcacttcacttgcggtcaagcgttctcatcgacgcttagggctggcccaaaagcttatggatcaggcctccagggccatgatcgaaaactttaatgccaaatacgtttccctacacgtgcgcaaacggattagtgaggtcgagcccaagtactacgccgatggagaggacgcatatgctatgaaacgcgacctgacccaaatggctgacgaattacggcgccatttggagttgaaggaaaaagggaggcacgtagtgctgggcgccatcgagaacaaagtagagtctaagggtaattctccacccagctcaggagaagcctgtagggaagagaaaggccttgctgctgaagattccggtggggactcaaaggacctgagcgaagtatcggaaactaccgagtcaacggacgtgaaggactcctctgaagcaagtgactcagcatcctag

SEQ ID NO: 89676 - DNA, 396 bp, Artificial Sequence
  derived and/or modified sequence
atgaatatcaggaacgcgaggcctgaagatctgatgaatatgcagcactgtaatttgttgtgcctacccgaaaattaccaaatgaaatactacttttatcatggattgtcttggccacagctttcctatatagctgaggacgagaatggtaagatagttggttatgtcctggctaagatggaagaggatcctgatgacgttcctcatggacatatcaccagtctggcagtcaaacgatcgcatcgcaggctgggccttgcccagaagctgatggaccaggcctctcgggcaatgatcgaaaacttcaacgccaagtacgtgagcctgcacgtgaggaaacggtctgtaaaatggagccctaataccatgcaaatgggccggactccaatgccttag

SEQ ID NO: 89677 - DNA, 396 bp, Artificial Sequence
  derived and/or modified sequence
atgaacatcagaaatgcccggcctgaggacctgatgaacatgcagcactgcaacctgctgtgcctgcctgagaactaccagatgaagtactacttctaccacggcctgtcctggccccagctgagctacatcgccgaggatgaaaatggcaagatcgtgggctacgtgctggccaagatggaggaggaccctgatgatgtgccccacggccacatcaccagcctggccgtgaagaggagccaccggcggctgggcctggcccagaagctgatggaccaggccagccgggccatgattgagaacttcaatgccaagtatgtgtccctgcacgtgaggaagaggtctgtgaagtggagccccaacaccatgcagatgggccgcacccccatgccctag

SEQ ID NO: 89678 - DNA, 663 bp, Artificial Sequence
  derived and/or modified sequence
atgaacatccggaacgcccggcccgaggacctgatgaacatgcagcattgtaatctgctgtgtctgcccgagaactatcagatgaaatactatttttatcacgggttaagctggccacagctgtcttatattgctgaagatgagaacggcaagatagtggggtatgtactggcaaagatggaggaggaccctgacgacgtccctcacggacacatcacatctttggcagttaagagatcccataggagactgggcctggcccagaaactcatggaccaagcttcccgagccatgattgagaatttcaatgccaaatacgtctcgctgcacgttcggaaaaggatttccgaagtggagccaaaatattacgctgatggggaggatgcttatgcaatgaaacgggacctgacccaaatggccgacgagctgcgccgccatctggaactaaaagaaaaggggcggcatgtggtgctgggcgcaatcgagaataaggtggagtcaaaagggaacagccctccttcaagtggagaggcttgtagggaggaaaaaggcctggctgctgaggatagcgggggggacagcaaggaccttagtgaggtgagcgagaccacagaaagcacggatgtgaaggacagctccgaagcttccgacagcgcctcatag

SEQ ID NO: 89679 - DNA, 396 bp, Artificial Sequence
  derived and/or modified sequence
atgaacatccggaacgcccggcccgaggacctgatgaacatgcagcactgcaacttgctctgcctccccgaaaactatcaaatgaagtactatttctaccacggactctcttggccacagctgagctatattgccgaagatgagaatggtaagatcgttggctatgtactggcaaaaatggaagaagacccggacgacgtcccccacgggcacatcacttccctggcagtgaaacgcagccaccggcgcttgggattggcccagaagctgatggaccaggcaagccgcgccatgattgagaattttaacgctaaatatgtcagtctgcacgtgagaaagaggagcgtaaaatggagccctaacaccatgcagatggggagaacgccaatgccgtag

SEQ ID NO: 89680 - DNA, 663 bp, Artificial Sequence
  derived and/or modified sequence
atgaacatccggaacgcacgacccgaggatttaatgaacatgcagcactgtaacctgctgtgtcttcccgaaaattaccagatgaaatactatttctaccacggtttgtcctggccccaattgtcttatatcgcagaagacgagaatggaaagatcgtgggatatgtgcttgcaaaaatggaagaggaccctgacgacgtgccacatggacacataacgagtctggccgtgaagaggagtcacagacggctgggcttggcacaaaagcttatggaccaagcgtctcgagcaatgatagagaatttcaatgctaaatatgtgtccctgcatgtccgaaagagaattagtgaggtggagcccaaatattacgccgacggtgaagatgcatatgctatgaaacgagatttgacgcaaatggccgacgagctgagacggcacctcgagctcaaggagaagggcaggcatgtggtgctgggcgctatcgagaacaaggtggagtctaaagggaacagcccaccatcaagcggggaggcatgccgggaggagaagggcctagccgctgaggactctggaggcgactctaaggacctatccgaggtcagcgagacaaccgaaagcactgatgtgaaagactctagcgaagcaagcgattcagcatcctag

SEQ ID NO: 89681 - DNA, 396 bp, Artificial Sequence
  derived and/or modified sequence
atgaatattaggaatgccagacctgaggacctgatgaatatgcagcattgtaacctgctttgccttcccgaaaactatcagatgaagtactatttctaccacgggctgtcctggcctcagttgagctacatcgcagaggatgaaaacggcaagatcgttgggtacgtgctcgcaaagatggaggaagatccggatgacgttccccacggtcacataaccagtctggctgtgaagaggtctcaccgcaggctcggcctagctcaaaagttgatggaccaggccagtagggctatgatcgagaattttaatgccaaatatgtctccctgcacgttaggaaaaggagtgtgaaatggtcacccaatactatgcagatgggcagaactcccatgccgtag

SEQ ID NO: 89682 - DNA, 396 bp, Artificial Sequence
  derived and/or modified sequence
atgaacatcagaaacgccagacccgaggacctgatgaacatgcagcactgcaacctgctgtgcctgcccgagaactaccagatgaagtactacttctaccacggcctgagctggccccagctgagctacatcgccgaggacgagaacggcaagatcgtgggctacgtgctggccaagatggaggaggaccccgacgacgtgccccacggccacatcaccagcctggccgtgaagagaagccacagaagactgggcctggcccagaagctgatggaccaggccagcagagccatgatcgagaacttcaacgccaagtacgtgagcctgcacgtgagaaagagaagcgtgaagtggagccccaacaccatgcagatgggcagaacccccatgccctag

SEQ ID NO: 89683 - protein, 457 aa, Artificial Sequence
  derived and/or modified sequence
MGCSLPLSCIMVRSVAWAGFMVLLMIPWGSAAKLVCYFTNWAQYRQGEARFLPKDLDPSLCTHLIYAFAGMTNHQLSTTEWNDETLYQEFNGLKKMFTDMVATANNRQTFVNSAIRFLRKYSFDGLDLDWEYPGSQGSPAVDKERFTTLVQDLANAFQQEAQTSGKERLLLSAAVPAGQTYVDAGYEVDKIAQNLDFVNLMAYDFHGSWEKVTGHNSPLYKRQEESGAAASLNVDAAVQQWLQKGTPASKLILGMPTYGRSFTLASSSDTRVGAPATGSGTPGPFTKEGGMLAYYEVCSWKGATKQRIQDQKVPYIFRDNQWVGFDDVESFKTKVSYLKQKGLGGAMVWALDLDDFAGFSCNQGRYPLIQTLRQELSLPYLPSGTPELEVPKPGQPSEPEHGPSPGQDTFCQGKADGLYPNPRERSSFYSCAAGRLFQQSCPTGLVFSNSCKCCTWN

SEQ ID NO: 89684 - DNA, 1374 bp, Artificial Sequence
  derived and/or modified sequence
atgggatgctcactccctctcagctgcattatggttcgctcagtcgcctgggccggattcatggtactgttgatgataccgtgggggtccgctgctaagctggtgtgttacttcaccaattgggcccagtaccgccaaggcgaggccaggttccttccaaaagaccttgatccctcactttgtacccacctcatttacgcgttcgcgggtatgacaaaccatcaactgtccacaacagagtggaacgatgagacgctgtaccaggagttcaatgggctgaaaaagatgtttaccgatatggtggccacagccaataacagacagactttcgtgaactctgcaatacggtttctcagaaagtattcatttgatggcctggatctggactgggaatatcctgggtctcagggctccccagctgtagacaaagagcgcttcaccaccctcgtccaagatcttgccaatgcgttccagcaggaagcacagacaagtggcaaagagcgcctgctgctgtcggccgctgtccctgcaggacaaacgtacgtcgatgcgggatacgaggtggataaaattgctcaaaacctggacttcgtcaatctgatggcctatgattttcacggttcctgggaaaaagtcaccgggcacaacagccccctttataagcgacaagaggagagtggcgcagccgctagtctgaacgtggacgcagctgtccagcagtggttacagaaaggaactccagccagcaagctgatcctgggcatgccaacatacggcagaagcttcactctcgcgtccagttcggatacacgggttggagctcctgcaaccggctccggcacgccaggccctttcaccaaggaggggggaatgctggcctattacgaagtgtgttcgtggaaaggcgctaccaaacaacgaatccaggatcagaaggtcccttatatttttagggacaatcagtgggttggcttcgatgatgtggagtcctttaaaaccaaggtgagttacctgaagcagaaaggcctgggaggagcgatggtgtgggctctcgaccttgatgacttcgctggattctcttgtaaccagggccgttatcccctcatccagacactgcggcaggagctctcactgccctacctacctagcgggaccccggaattggaggttcccaaaccaggtcagccttctgaaccagagcacggcccttctcctgggcaggataccttctgccaaggaaaggcagatgggctgtatccaaatccccgagagagaagtagcttctactcttgtgcagcaggcagactattccagcagagctgtccaactggtttagtattctctaacagctgcaagtgctgcacttggaattag

SEQ ID NO: 89685 - DNA, 1374 bp, Artificial Sequence
  derived and/or modified sequence
atggggtgttccttgcccctcagctgtatcatggttcgtagtgtggcctgggcaggctttatggttcttcttatgatcccttggggaagtgccgccaagctcgtttgctactttacaaattgggcacagtacagacagggagaggccagattcctgccaaaagacctggatccaagcctgtgcacgcacctcatttacgcatttgccggcatgacaaaccaccagctatctacaaccgagtggaatgatgagacactctatcaggagtttaatggtctgaagaagatgtttaccgatatggtcgcaaccgctaacaacaggcagacatttgtcaacagcgcaatcaggtttcttaggaaatattcatttgacggcctcgacctcgactgggaatacccaggcagccaggggagtcctgccgtggacaaagaaaggttcactactctggtgcaagacctggccaacgcttttcagcaggaagcgcagacgtctgggaaggagcgtctgctgctgtctgcagctgttccagcggggcagacctatgtcgacgctggctacgaagtagataaaatagctcaaaatttggatttcgtgaacctgatggcatacgattttcacgggtcctgggagaaagtcacaggacacaacagcccactctataagcgtcaggaggagtctggcgccgcggcatccttgaatgtggacgccgccgtgcagcagtggcttcagaaaggcacccccgcttccaagctcattctaggcatgccaacctacggtcgctcatttaccttagctagctcaagcgacacccgcgttggcgcacccgcaactggttctggaacgcctggcccatttactaaggaagggggcatgttggcctattacgaggtgtgtagttggaagggtgcaaccaagcaaagaatacaggaccagaaagttccctatatttttagagataatcagtgggtcggctttgatgatgttgagtcctttaaaaccaaggtcagttacttgaagcagaaaggcctgggaggtgcaatggtgtgggctctggacctggacgactttgctggctttagctgcaaccaaggtcgatacccgctgatccagacactacgccaagaattaagcctgccataccttccatccggcacgcccgaattggaagtgcccaagcctgggcaaccatccgagccagaacacggacccagccccggccaggacacattttgccagggcaaggcagatgggctttaccccaatcctagagagcgctcatctttttactcttgcgcagccggcagactgttccagcagtcctgtcctaccggtctcgtcttcagcaatagttgtaaatgttgcacttggaattag

SEQ ID NO: 89686 - DNA, 1374 bp, Artificial Sequence
  derived and/or modified sequence
atggggtgttctttgcctttatcctgtattatggttcgcagcgtggcttgggctggcttcatggttcttctgatgataccttgggggtccgccgccaaactggtctgttactttactaattgggctcagtatcggcaaggggaggcccgtttcttgcctaaggacctggatccatcgctttgtacccatctaatatatgcattcgccggaatgaccaaccatcaactatcgacgacagagtggaacgatgagacactgtatcaggagtttaacggactgaaaaaaatgtttacagacatggtggccacagctaataaccggcagacctttgtcaattctgccattagatttctgcgaaaatattcattcgatggtcttgatctggattgggagtacccaggatcccaaggctctcccgccgtcgataaggagcggttcactacacttgtgcaggatctggccaacgcgttccagcaggaggcacagacttcaggtaaggaaaggttattactctccgctgctgtaccagccggtcaaacctacgtcgacgcaggctacgaggtcgacaagatagcccagaaccttgattttgtgaacctgatggcctacgattttcatgggtcttgggaaaaagttaccggtcataattccccactttacaaacgccaagaagagtctggggccgccgccagcctcaacgtggatgctgcggtccagcagtggctacagaaaggaacacccgcttctaaacttatcctgggaatgcccacatacggaagaagcttcactctcgcgtcctcatccgatactagagtgggcgcgcccgctaccggctccggtaccccgggacccttcactaaggaaggcggaatgttggcttattacgaagtttgttcttggaaaggcgccactaaacagaggattcaggaccagaaagtgccttatatattccgcgataaccaatgggttggatttgatgacgttgagtcctttaagacaaaagtctcgtatctcaaacagaagggattagggggggcaatggtttgggccttggaccttgatgactttgccggtttcagctgtaaccaaggtagatatcctctaatccaaactcttcgccaggagcttagccttccatacctgccttccggtacacccgagctcgaggtgccaaaacccggacaaccatccgagcctgagcacggcccaagtcccggacaagacaccttctgtcaaggtaaagcagatggcttatatccgaacccccgcgaacggtccagtttctattcctgcgcagccggtaggctgttccagcaatcttgcccaacaggcctggtattttccaacagctgtaaatgttgcacctggaattag

SEQ ID NO: 89687 - DNA, 1598 bp, Artificial Sequence
  derived and/or modified sequence
tttgtatgggctgcagcctgccgctgagctgcatcatggtgcggtctgtggcctgggcaggtttcatggtcctgctgatgatcccatggggctctgctgcaaaactggtctgctacttcaccaactgggcccagtacagacagggggaggctcgcttcctgcccaaggacttggaccccagcctttgcacccacctcatctacgccttcgctggcatgaccaaccaccagctgagcaccactgagtggaatgacgagactctctaccaggagttcaatggcctgaagaagatgttcacagatatggtagccacggccaacaaccgtcagacctttgtcaactcggccatcaggtttctgcgcaaatacagctttgacggccttgaccttgactgggagtacccaggaagccaggggagccctgccgtagacaaggagcgcttcacaaccctggtacaggacttggccaatgccttccagcaggaagcccagacctcagggaaggaacgccttcttctgagtgcagcggttccagctgggcagacctatgtggatgctggatacgaggtggacaaaatcgcccagaacctggattttgtcaaccttatggcctacgacttccatggctcttgggagaaggtcacgggacataacagccccctctacaagaggcaagaagagagtggtgcagcagccagcctcaacgtggatgctgctgtgcaacagtggctgcagaaggggacccctgccagcaagctgatccttggcatgcctacctacggacgctccttcacactggcctcctcatcagacaccagagtgggggccccagccacagggtctggcactccaggccccttcaccaaggaaggagggatgctggcctactatgaagtctgctcctggaagggggccaccaaacagagaatccaggatcagaaggtgccctacatcttccgggacaaccagtgggtgggctttgatgatgtggagagcttcaaaaccaaggtcagctatctgaagcagaagggactgggcggggccatggtctgggcactggacttagatgactttgccggcttctcctgcaaccagggccgataccccctcatccagacgctacggcaggaactgagtcttccatacttgccttcaggcaccccagagcttgaagttccaaaaccaggtcagccctctgaacctgagcatggccccagccctggacaagacacgttctgccagggcaaagctgatgggctctatcccaatcctcgggaacggtccagcttctacagctgtgcagcggggcggctgttccagcaaagctgcccgacaggcctggtgttcagcaactcctgcaaatgctgcacctggaattgagtcgctaaagcccctccagtcccagctttgaggctgggcccaggatcactctacagcctgcctcctgggttttccctgggggccgcaatctggctcctgcaggcctttctgtggtcttcctttatccaggctttctgctctcagccttgccttccttttttctgggtctcctgggctgcccctttcacttgcaaaataaatctttggtttgtgcccctc

SEQ ID NO: 89688 - DNA, 1374 bp, Artificial Sequence
  derived and/or modified sequence
atgggctgcagcctgcccctgagctgcatcatggtgagaagcgtggcctgggccggcttcatggtgctgctgatgatcccctggggcagcgccgccaagctggtgtgctacttcaccaactgggcccagtacagacagggcgaggccagattcctgcccaaggacctggaccccagcctgtgcacccacctgatctacgccttcgccggcatgaccaaccaccagctgagcaccaccgagtggaacgacgagaccctgtaccaggagttcaacggcctgaagaagatgttcaccgacatggtggccaccgccaacaacagacagaccttcgtgaacagcgccatcagattcctgagaaagtacagcttcgacggcctggacctggactgggagtaccccggcagccagggcagccccgccgtggacaaggagagattcaccaccctggtgcaggacctggccaacgccttccagcaggaggcccagaccagcggcaaggagagactgctgctgagcgccgccgtgcccgccggccagacctacgtggacgccggctacgaggtggacaagatcgcccagaacctggacttcgtgaacctgatggcctacgacttccacggcagctgggagaaggtgaccggccacaacagccccctgtacaagagacaggaggagagcggcgccgccgccagcctgaacgtggacgccgccgtgcagcagtggctgcagaagggcacccccgccagcaagctgatcctgggcatgcccacctacggcagaagcttcaccctggccagcagcagcgacaccagagtgggcgcccccgccaccggcagcggcacccccggccccttcaccaaggagggcggcatgctggcctactacgaggtgtgcagctggaagggcgccaccaagcagagaatccaggaccagaaggtgccctacatcttcagagacaaccagtgggtgggcttcgacgacgtggagagcttcaagaccaaggtgagctacctgaagcagaagggcctgggcggcgccatggtgtgggccctggacctggacgacttcgccggcttcagctgcaaccagggcagataccccctgatccagaccctgagacaggagctgagcctgccctacctgcccagcggcacccccgagctggaggtgcccaagcccggccagcccagcgagcccgagcacggccccagccccggccaggacaccttctgccagggcaaggccgacggcctgtaccccaaccccagagagagaagcagcttctacagctgcgccgccggcagactgttccagcagagctgccccaccggcctggtgttcagcaacagctgcaagtgctgcacctggaactag

SEQ ID NO: 89689 - DNA, 1374 bp, Artificial Sequence
  derived and/or modified sequence
atgggctgcagcctgcctctctcatgcataatggttcgctcagtggcctgggctggcttcatggtcctgctcatgattccttggggatctgcagccaagttggtttgttactttaccaactgggctcagtacagacagggcgaggctaggttcctccctaaggacttagacccttccctatgtactcatttaatctatgctttcgccggcatgacgaatcaccagctgtccaccacagagtggaatgatgaaactctgtatcaggaattcaacggactgaagaagatgttcaccgatatggtggccactgccaataaccggcaaacttttgtcaacagcgctattcgtttcttgcgcaagtactcatttgacggcctcgacctggattgggagtatcctggctctcaggggtcccctgctgttgacaaagaacggtttactacgttggtgcaggacttggcaaacgcctttcaacaggaggctcagacctccggaaaagaaaggctgctgctgagtgcagccgtgccagcaggccagacctatgtggatgcaggatacgaggtagataaaattgctcaaaacctcgattttgtaaatctgatggcatatgactttcacggatcctgggaaaaagtgactggtcacaactcccccctgtacaaaaggcaggaggaaagcggagcagccgccagcctcaatgttgatgctgccgtgcagcagtggctgcagaaaggaacccctgcatccaagctaattttgggtatgcccacatacggaagatccttcaccttggcctcctcctcagacacgcgggtgggggcaccagctaccggctctgggactccaggtcccttcacaaaggagggagggatgctggcttattatgaggtctgcagctggaagggagcgaccaagcagagaattcaagatcagaaggtcccctacatctttcgggacaaccagtgggttggattcgacgacgtcgagtccttcaaaacaaaggtaagttatttaaaacagaaaggcctagggggagctatggtctgggcccttgatttagacgactttgctggctttagttgcaatcagggaagatacccactcattcagaccttacgccaggaactgtccctgccataccttcccagtgggacacccgagctggaggtgcctaaacctggccaacccagtgaacccgaacacggacccagccctggacaggatactttctgccagggtaaggccgacggcctatatcccaatcctcgggagagatcatctttctacagctgcgccgccggccggctatttcagcagagctgtccaacgggcctggttttctcaaactcctgtaaatgctgtacatggaactag

SEQ ID NO: 89690 - DNA, 1374 bp, Artificial Sequence
  derived and/or modified sequence
atgggctgcagcctgcccctgagctgcatcatggtgcgctctgtggcctgggccggcttcatggtgctgctgatgatcccctggggcagcgctgccaagctggtgtgctacttcaccaactgggcccagtaccggcagggcgaggcccgcttcctgcccaaggacctggaccccagcctgtgcacccacctgatctatgcctttgctggcatgaccaaccaccagctgagcaccacagagtggaatgatgagaccctgtaccaggagttcaacggcctgaagaagatgttcacagacatggtggccacagccaacaaccggcagacctttgtgaacagcgccatccgcttcctgaggaagtacagctttgatggcctggacctggactgggagtacccaggcagccagggcagccctgctgtggacaaggagcgcttcaccaccctggtgcaggacctggccaatgccttccagcaggaggcccagaccagcggcaaggagcggctgctgctgtctgctgctgtgcctgctggccagacctacgtggatgctggctatgaggtggacaagatcgcccagaacctggactttgtgaacctgatggcctatgacttccacggctcctgggagaaggtgacaggccacaacagccccctgtacaagaggcaggaggagagcggggctgctgccagcctgaatgtggatgctgctgtgcagcagtggctgcagaagggcaccccagccagcaagctgatcctgggcatgcccacctacggccgctccttcaccctggccagcagcagtgacaccagggtgggcgccccagccactggaagtggcaccccaggccccttcaccaaggagggcggcatgctggcctactatgaggtgtgctcctggaagggggccaccaagcagaggatccaggaccagaaggtgccctacatcttccgggacaaccagtgggtgggctttgatgatgtggagagcttcaagaccaaggtgtcctacctgaagcagaagggcctgggcggggccatggtgtgggccctggacctggatgactttgctggcttcagctgcaaccagggccgctaccccctcatccagaccctgcggcaggagctgagcctgccctacctgcccagcggcaccccagagctggaggtgcccaagccaggccagcccagcgagcctgagcacggccccagccctggccaggacaccttctgccagggcaaggcagatggcctgtaccccaacccccgggagaggagcagcttctacagctgtgccgccggccgcctcttccagcagagctgccccaccggcctggtgttcagcaacagctgcaagtgctgcacctggaactag

SEQ ID NO: 89691 - DNA, 1374 bp, Artificial Sequence
  derived and/or modified sequence
atgggctgcagcctgcccctgagctgcatcatggtgcggagcgtggcgtgggctgggtttatggtgcttctcatgatcccctggggcagcgccgcaaagctggtgtgttactttacaaattgggcccaataccgacaaggagaagcgcgcttccttcccaaagacttggacccttctctgtgtactcacctgatatatgctttcgcaggcatgactaatcaccaactgtctaccactgaatggaatgacgagacactttaccaagagtttaatggtcttaagaaaatgttcaccgacatggttgccaccgcaaataaccgccagacatttgtaaattcagctattcgattcctgcggaagtattccttcgatggtcttgatcttgactgggagtatccaggctcacagggcagcccagccgtcgataaagaaagatttaccacactggtgcaggatctagccaatgccttccagcaggaggcccagacttcaggaaaggagagacttctgttatcagctgctgtccctgccggacagacctacgtcgatgccggatacgaggtcgataaaattgcgcagaacctggatttcgttaatttgatggcttacgactttcatggcagttgggaaaaggtcacgggccataacagccctctgtacaagagacaagaagaaagtggggctgcagccagccttaatgtagacgccgctgttcagcagtggctccagaaaggaactcctgcgagcaagttaatcctgggaatgccaacatacggtaggtcttttacccttgcttccagttctgataccagagtgggtgctcctgccacgggttccggcactccgggtccgtttaccaaggagggtggcatgctggcctattacgaggtatgttcctggaagggcgctactaagcaacgtatacaagaccaaaaggtgccttacatatttagagataatcagtgggtgggattcgacgatgttgagagctttaaaaccaaggtgagttacttgaaacaaaaagggctcgggggtgcaatggtgtgggcgttagatctcgatgacttcgctgggttttcgtgtaatcaggggagataccctcttatccagaccctccgccaggaactcagtttaccctacctgccttccggcaccccagagcttgaggtgccaaagcctggccagcccagtgagcctgagcacgggcccagtcccgggcaagatacattctgccagggtaaagctgacggtctgtacccaaatcctcgcgaaagaagctcattttatagctgcgccgctggccgcctgttccaacaatcctgtcccactgggttggtgtttagcaattcctgtaaatgctgtacatggaattag

SEQ ID NO: 89692 - RNA, 1374 nt, Artificial Sequence
  derived and/or modified sequence
augggguguuccuugccccucagcuguaucaugguucguaguguggccugggcaggcuuuaugguucuucuuaugaucccuuggggaagugccgccaagcucguuugcuacuuuacaaauugggcacaguacagacagggagaggccagauuccugccaaaagaccuggauccaagccugugcacgcaccucauuuacgcauuugccggcaugacaaaccaccagcuaucuacaaccgaguggaaugaugagacacucuaucaggaguuuaauggucugaagaagauguuuaccgauauggucgcaaccgcuaacaacaggcagacauuugucaacagcgcaaucagguuucuuaggaaauauucauuugacggccucgaccucgacugggaauacccaggcagccaggggaguccugccguggacaaagaaagguucacuacucuggugcaagaccuggccaacgcuuuucagcaggaagcgcagacgucugggaaggagcgucugcugcugucugcagcuguuccagcggggcagaccuaugucgacgcuggcuacgaaguagauaaaauagcucaaaauuuggauuucgugaaccugauggcauacgauuuucacggguccugggagaaagucacaggacacaacagcccacucuauaagcgucaggaggagucuggcgccgcggcauccuugaauguggacgccgccgugcagcaguggcuucagaaaggcacccccgcuuccaagcucauucuaggcaugccaaccuacggucgcucauuuaccuuagcuagcucaagcgacacccgcguuggcgcacccgcaacugguucuggaacgccuggcccauuuacuaaggaagggggcauguuggccuauuacgagguguguaguuggaagggugcaaccaagcaaagaauacaggaccagaaaguucccuauauuuuuagagauaaucagugggucggcuuugaugauguugaguccuuuaaaaccaaggucaguuacuugaagcagaaaggccugggaggugcaauggugugggcucuggaccuggacgacuuugcuggcuuuagcugcaaccaaggucgauacccgcugauccagacacuacgccaagaauuaagccugccauaccuuccauccggcacgcccgaauuggaagugcccaagccugggcaaccauccgagccagaacacggacccagccccggccaggacacauuuugccagggcaaggcagaugggcuuuaccccaauccuagagagcgcucaucuuuuuacucuugcgcagccggcagacuguuccagcaguccuguccuaccggucucgucuucagcaauaguuguaaauguugcacuuggaauuag

SEQ ID NO: 89693 - RNA, 1374 nt, Artificial Sequence
  derived and/or modified sequence
augggguguucuuugccuuuauccuguauuaugguucgcagcguggcuugggcuggcuucaugguucuucugaugauaccuuggggguccgccgccaaacuggucuguuacuuuacuaauugggcucaguaucggcaaggggaggcccguuucuugccuaaggaccuggauccaucgcuuuguacccaucuaauauaugcauucgccggaaugaccaaccaucaacuaucgacgacagaguggaacgaugagacacuguaucaggaguuuaacggacugaaaaaaauguuuacagacaugguggccacagcuaauaaccggcagaccuuugucaauucugccauuagauuucugcgaaaauauucauucgauggucuugaucuggauugggaguacccaggaucccaaggcucucccgccgucgauaaggagcgguucacuacacuugugcaggaucuggccaacgcguuccagcaggaggcacagacuucagguaaggaaagguuauuacucuccgcugcuguaccagccggucaaaccuacgucgacgcaggcuacgaggucgacaagauagcccagaaccuugauuuugugaaccugauggccuacgauuuucaugggucuugggaaaaaguuaccggucauaauuccccacuuuacaaacgccaagaagagucuggggccgccgccagccucaacguggaugcugcgguccagcaguggcuacagaaaggaacacccgcuucuaaacuuauccugggaaugcccacauacggaagaagcuucacucucgcguccucauccgauacuagagugggcgcgcccgcuaccggcuccgguaccccgggacccuucacuaaggaaggcggaauguuggcuuauuacgaaguuuguucuuggaaaggcgccacuaaacagaggauucaggaccagaaagugccuuauauauuccgcgauaaccaauggguuggauuugaugacguugaguccuuuaagacaaaagucucguaucucaaacagaagggauuagggggggcaaugguuugggccuuggaccuugaugacuuugccgguuucagcuguaaccaagguagauauccucuaauccaaacucuucgccaggagcuuagccuuccauaccugccuuccgguacacccgagcucgaggugccaaaacccggacaaccauccgagccugagcacggcccaagucccggacaagacaccuucugucaagguaaagcagauggcuuauauccgaacccccgcgaacgguccaguuucuauuccugcgcagccgguaggcuguuccagcaaucuugcccaacaggccugguauuuuccaacagcuguaaauguugcaccuggaauuag

SEQ ID NO: 89694 - protein, 392 aa, Artificial Sequence
  derived and/or modified sequence
MAGILAWFWNERFWLPHNVTWADLKNTEEATFPQAEDLYLAFPLAFCIFMVRLIFERFVAKPCAIALNIQANGPQIAPPNAILEKVFTAITKHPDEKRLEGLSKQLDWDVRSIQRWFRQRRNQEKPSTLTRFCESMWRFSFYLYVFTYGVRFLKKTPWLWNTRHCWYNYPYQPLTTDLHYYYILELSFYWSLMFSQFTDIKRKDFGIMFLHHLVSIFLITFSYVNNMARVGTLVLCLHDSADALLEAAKMANYAKFQKMCDLLFVMFAVVFITTRLGIFPLWVLNTTLFESWEIVGPYPSWWVFNLLLLLVQGLNCFWSYLIVKIACKAVSRGKAGKWNPLHVSKDDRSDIESSSDEEDSEPPGKNPHTATTTNGTSGTNGYLLTGSCSMDD

SEQ ID NO: 89695 - DNA, 1179 bp, Artificial Sequence
  derived and/or modified sequence
atggccggcatcctggcctggttctggaacgagagattctggctgccccacaacgtgacctgggccgacctgaagaacaccgaggaggccaccttcccccaggccgaggacctgtacctggccttccccctggccttctgcatcttcatggtgagactgatcttcgagagattcgtggccaagccctgcgccatcgccctgaacatccaggccaacggcccccagatcgccccccccaacgccatcctggagaaggtgttcaccgccatcaccaagcaccccgacgagaagagactggagggcctgagcaagcagctggactgggacgtgagaagcatccagagatggttcagacagagaagaaaccaggagaagcccagcaccctgaccagattctgcgagagcatgtggagattcagcttctacctgtacgtgttcacctacggcgtgagattcctgaagaagaccccctggctgtggaacaccagacactgctggtacaactacccctaccagcccctgaccaccgacctgcactactactacatcctggagctgagcttctactggagcctgatgttcagccagttcaccgacatcaagagaaaggacttcggcatcatgttcctgcaccacctggtgagcatcttcctgatcaccttcagctacgtgaacaacatggccagagtgggcaccctggtgctgtgcctgcacgacagcgccgacgccctgctggaggccgccaagatggccaactacgccaagttccagaagatgtgcgacctgctgttcgtgatgttcgccgtggtgttcatcaccaccagactgggcatcttccccctgtgggtgctgaacaccaccctgttcgagagctgggagatcgtgggcccctaccccagctggtgggtgttcaacctgctgctgctgctggtgcagggcctgaactgcttctggagctacctgatcgtgaagatcgcctgcaaggccgtgagcagaggcaaggccggcaagtggaaccccctgcacgtgagcaaggacgacagaagcgacatcgagagcagcagcgacgaggaggacagcgagccccccggcaagaacccccacaccgccaccaccaccaacggcaccagcggcaccaacggctacctgctgaccggcagctgcagcatggacgactag

SEQ ID NO: 89696 - DNA, 1179 bp, Artificial Sequence
  derived and/or modified sequence
atggctgggatcctcgcatggttctggaacgagaggttctggctaccacataatgttacctgggcagacctgaagaacacagaagaggccacattcccccaggctgaagacctgtacctcgcatttccattagctttctgcatatttatggtacggctgattttcgagcggttcgtggcaaaaccttgcgccattgccttgaatatccaggctaacggaccgcagattgctccacccaatgcgatcctagagaaagtatttaccgcaatcactaaacatcctgacgagaagcggttagaagggctgtctaaacagcttgattgggatgtgaggagcatccaaaggtggtttaggcagcgcagaaatcaagaaaagccaagcaccctgaccaggttctgcgagtccatgtggcggttcagcttctatttatacgtttttacctatggcgtgcgcttcctgaagaagactccctggctctggaataccagacattgctggtacaactatccataccagccgctgacaaccgatctacactattattacattctggaactctcgttctattggagcttgatgttctctcagttcaccgacataaagcgcaaagatttcggaattatgttccttcatcatttagtcagcatcttcttaatcactttctcatatgtgaataatatggcccgtgtgggcacgctggttctttgtctacacgactccgctgacgccctgctggaagctgctaaaatggcaaattacgcaaaatttcagaaaatgtgtgatctgttgtttgtgatgttcgcagtggtgttcataaccacccggctaggcatttttcctctctgggtgttaaacacaaccttgtttgagagctgggaaatcgtaggcccatacccctcttggtgggtgtttaaccttcttctcttgttagtgcagggcctgaactgcttctggtcttatctgattgtgaaaatcgcctgcaaagcagtaagcagagggaaagctgggaaatggaatcctctacatgtctctaaggatgataggtcagacatcgagtcaagctctgatgaggaggattccgagccacccggaaaaaacccccacaccgccactactaccaatgggacttccgggaccaatggctatctccttacggggtcatgctctatggacgactag

SEQ ID NO: 89697 - DNA, 1179 bp, Artificial Sequence
  derived and/or modified sequence
atggccggcatcctggcctggttctggaatgaacgcttctggctgccccacaacgtgacctgggccgacctgaagaacacagaggaggccaccttcccccaggccgaggacctgtacctggccttccccctggccttctgcatcttcatggtgcggctcatctttgaaagatttgtggccaagccctgtgccatcgccctgaacatccaggccaacggcccccagatcgcccccccaaatgccatcctggagaaggtgttcaccgccatcaccaagcacccagatgagaagaggctggagggcctgagcaagcagctggactgggatgtgcgcagcatccagcgctggttccggcagaggaggaaccaggagaagcccagcaccctgacccgcttctgtgagagcatgtggaggttctccttctacctgtatgtgttcacctacggcgtgcgcttcctgaagaagaccccctggctgtggaacaccaggcactgctggtacaactacccctaccagcccctgaccacagacctgcactactactacatcctggagctgtccttctactggagcctgatgttcagccagttcacagacatcaagaggaaggactttggcatcatgttcctgcaccacctggtgtccatcttcctgatcaccttctcctatgtgaacaacatggcccgggtgggcaccctggtgctgtgcctgcatgacagcgcagatgccctgctggaggccgccaagatggccaactatgccaagttccagaagatgtgtgacctgctgtttgtgatgtttgctgtggtgttcatcaccacccggctgggcatcttccccctgtgggtgctgaacaccaccctgtttgagagctgggagatcgtgggcccctaccccagctggtgggtgttcaacctgctgctgctgctggtgcagggcctgaactgcttctggagctacctgattgtgaagatcgcctgcaaggctgtgtcccggggcaaggccggcaagtggaaccccctgcacgtgtccaaggatgacagaagtgacatcgagagcagcagtgatgaggaggacagcgagcccccaggcaagaacccccacacagccaccaccaccaacggcaccagcggcaccaacggctacctgctgaccggcagctgcagcatggatgactag

SEQ ID NO: 89698 - DNA, 1179 bp, Artificial Sequence
  derived and/or modified sequence
atggccggcatcctggcctggttctggaacgagcggttctggctgcctcacaacgtcacctgggctgatctgaagaatacagaggaggccacttttccacaggccgaggatctgtatctcgcattcccgctcgctttctgcatctttatggttaggctgattttcgagcgctttgtcgcaaagccttgtgcaatcgccctaaacattcaggctaacgggccgcagattgccccccctaatgctatcttagaaaaggtgtttacagccatcacaaagcacccagatgagaagcggctggaaggactgagtaagcagctcgattgggatgtcagatcaattcagaggtggttccggcagcgcagaaatcaagaaaagccttccacactcaccagattctgtgagtctatgtggaggtttagtttttacctgtatgtttttacctatggcgtccgcttcctaaagaaaacaccgtggctgtggaacacacgacactgttggtataattatccttatcagcctctgacgactgatctccattactactacatcttggagctctccttctactggtcactcatgtttagccagttcaccgacatcaaaaggaaagactttggtatcatgttcctgcaccacctcgtaagtatttttttgatcacattctcgtatgtgaacaatatggccagagtggggacgttggtgctatgcttacatgacagtgcggatgcgcttctggaagcagctaaaatggcaaactacgctaaatttcaaaagatgtgcgatctgctgtttgtgatgtttgctgtcgttttcattaccacccgtctcggcatcttccctttgtgggtgctgaatacgacactgttcgagtcctgggagattgtgggaccctacccgagttggtgggtgtttaacctcttgctccttctcgtgcaggggctcaattgcttctggtcttatctcattgtcaaaatcgcatgtaaggccgtgagtcggggaaaggccggtaaatggaatccccttcacgtgtctaaggacgacagaagtgacattgagagcagctccgacgaagaggattcagaacccccaggaaagaacccgcacaccgccaccactacgaatggaacttccggaacgaatgggtatctgcttacagggtcctgtagtatggatgactag

SEQ ID NO: 89699 - DNA, 1179 bp, Artificial Sequence
  derived and/or modified sequence
atggccggaattctcgcctggttctggaatgagaggttttggctgcctcataacgtcacttgggccgatctcaagaataccgaagaagcaacattcccacaggccgaggacctgtaccttgcgtttcctctcgctttctgcattttcatggtaaggttgatctttgagaggtttgtggcaaaaccctgcgcgattgccctgaatatccaggcgaacggaccacagatcgccccacctaatgccatcctagaaaaagtctttaccgccattactaaacaccccgacgaaaagaggctggagggtcttagcaaacaacttgactgggacgtgagatccatccagaggtggtttaggcagcggagaaatcaggaaaaaccctcaacgctcactagattctgcgaatctatgtggcgcttctcgttttatctgtacgtcttcacttatggggtgcgctttctgaaaaaaaccccgtggttgtggaatacaagacactgctggtataactacccctaccagcccctcactactgacctccactattattacattctagaactttcgttttactggtcacttatgttcagccaatttactgacattaagagaaaggatttcggcattatgtttttgcaccacttggttagcatctttctcatcactttttcctatgtgaacaacatggctcgggtcggtactttggtgctgtgtctgcatgactccgcggacgcccttctcgaagccgctaaaatggcaaactatgcgaaatttcagaagatgtgtgatcttctgttcgtgatgttcgccgttgtgtttatcactactaggctggggatattccccttatgggtgctaaatacaactctatttgagagctgggaaatcgtagggccatacccctcctggtgggtcttcaatctgctattgctgctcgtgcagggcctgaattgcttttggagctacctcatagtgaaaatcgcctgtaaggctgtgtcacggggtaaagccggaaagtggaaccctttgcacgtttcaaaggacgataggtcagacatcgagtcttcgtccgacgaggaggacagcgagccccctgggaagaatccccacaccgcaaccactaccaacggaacaagtgggactaatggatatctcctgacaggttcctgtagcatggatgattag

SEQ ID NO: 89700 - DNA, 6851 bp, Artificial Sequence
  derived and/or modified sequence
gcggccagagggaggagagaaccggggctcgccgcgagccttcgagagcagcggccgcggaggaggcggcggcggcgggcgggagcagcggcggcggcggcacaggctcggggccagccgggcgcgcatccccgggcgccctgcgcggtggagagcttggcgggctgcgggtgccgcaggacaggagtggacaaagcaagatggcagggatcttagcctggttctggaacgagaggttttggctcccgcacaatgtcacctgggcggacctgaagaacacggaggaggccaccttcccgcaggctgaggacctctatctcgcttttcccctggccttctgtatcttcatggtgcggctcatcttcgagagatttgtagccaaaccgtgcgccatagccctcaacattcaggccaatggaccacaaattgctccgcccaatgccattctggaaaaggtcttcactgcaattacaaagcatcctgatgaaaagagattggaaggcctctccaagcaactggactgggatgttcgaagcattcagcgctggtttcgacaaagacgcaatcaggagaagccaagcacgctgacgaggttctgtgagagcatgtggagattttcattttacctttatgtatttacctacggagtcagattcctgaaaaagaccccctggttgtggaatacgaggcattgctggtacaactacccctatcagccactcacaactgaccttcactactattacatcctggagctgtcgttttattggtctttgatgttttctcagttcactgatatcaaaagaaaggactttggcattatgttcctgcaccaccttgtatctattttcttgattaccttttcatatgtcaacaatatggcccgagtaggaacgctggtcctttgtcttcatgattcagctgatgctcttctggaggctgccaaaatggcaaattatgccaagtttcagaaaatgtgtgatctcctgtttgttatgtttgccgtggtttttatcaccacacgactgggtatatttcctctctgggtgttaaataccacattatttgaaagctgggagatcgttggaccttacccttcctggtgggtttttaacctactgctattgctagtacaagggttgaactgcttctggtcttacttgattgtgaaaatagcttgcaaagctgtttcaagaggcaaggctgggaagtggaaccctttacatgtgtccaaggatgatcgaagtgatattgagtctagctcagatgaggaggactcagaacctccgggaaagaatccccacactgcgacaaccaccaatgggaccagtggtaccaacgggtatctcctgactggctcctgctccatggatgattaattactcaaaactacaagtcccaagcaaagtgaactatttgttcctggaagtatttaataagttgcaaatgcagttcctttcataatatctcagcaccagaaacaaaaattaagattatcaaagcattttgaatagtgcactgccatgtgtcctgtctgtgaatgaagaagaattaccattctctctttgtaggcatgctgtatgtaattgacacaagggaacagtatttgcatttgtactgtcttagaatattatttatttttttgtatttgtaaatctgtggacaaaagagggtttcctcactccttttactcactgggctcatgacagtgaaggagatgctccatctgcttctccccctttctcttgctgtagtccaatgtgctatgagcatcagcttactttgtcacttagagcaagcaaaacccagtgcaagagtctcgttcagctctaaataggtttgctttcttttagttacagtgcccattttgaaattgcctatacagtcttagtgaccatttaaaccggacgaactaggtgtttaattttcactcttcatgttcaattagcagttcaaattaaagaagatggttattggagaacttttttgaatggttttgtattaaattgctttgaaatagatttcatttcttgtgcacacagccaagatttcttcaatgggtgtgagctagttgagggttaaccttgtaggttgcagagtgtatttgtttgtttgtttgtttttctctgtgatgaggtcagtgctctgattttgaaggaggatattcactgaagctcatagttataaacaaggaaatcactgttaagaatgggaatttgtcctgtgttctgggaataacataaagagagcaactgatttcagccaggttttgccactaccctataattagtgcagtcttatgttataaaagaaagaagttaactatatttggggacaaaaaaatatttcaagagttgataaagattacctgtgcagtgcagagcactttaatgcaaccagctttcaagaaaaagccctatctagtacttgatgttgatgtttttattttgctgagcaaaataaagccaatgggagaaagactattttaccctttgcttttctccttaaacgtaatccagatgactttcctgttactaaacactgagcagcattacactacaatgcttctttggtttccaggaatttttttcaaatggggctgtttctggaaaaatgaaaaattctattggacaatggcaatatcaacaatgaggaaaattactgaagaataagtttccataagtctcctacatagcagtgttatttatgtacagataagaaaaccatatgtcagccaaagattttatctcttcttctaacttttagtaagaggaaaaagggattataaaacccttcataaatcaagaaggccatcacttagaacgaaccccaaacaaaaatgccataatataaatgtgtgaatcagggctgtgaagacaacagcagaaatgctaacaagcgtgcagaaacaccagagagtgcgtatcctgctcagaaccattcacatttaattcaattcttggaaaaaattaaagctttttgcccacaatttgcaatctgtgggttaatagttaaaagaatgttcccaaccaaaaaattcttaccgtaatattatatcttgccctacttatttacaaaataatatgtttctgttatggtccttagtaataattgaagaggcttagaaatacatctgcttgtttattgagaaaacgatgcaaataattctgcttttagagccttgttattttatttcacaaaacaggcatatgtctaggagtgtaatttgtggatggttgagtttgtaagaacaatcataaaaggacttgttagtctccagaacatctgctaaaatgcaagtatatgtataaggtaatagcatattacagctgaaaattttgagaaggtaaaagtttcttaattaaaatatgaacatatttagcttgctttagtgtctggggcaagtcctctcaatggctaaaattaactttagagatccatgtgttcaggtttagatcatatgacactcgagcacagaagaataatttcaaggaggtcatcttgtaaattaaaggtttagaagaattgcataaaacgtagtaaatggggtctgtcattagcaaaggcaaatctaagcaatcatttttccccccagaagttacttagaaggagaactgggaacacttggggtctctctaactgatggcattcacttcacacagtcgtctatgttatccagagatttttatttcattttacattttagggcacagttctttggggctaattaaaatggggtttgcaggctttttatggtgaagaataatatatctctgtctatagctttcccatggtagcctgataaggctgagagagaaaaatatgtgcagtatctcatcctccccctgtaccaggccatagctttgaagtgtattttgtaaattcaactataggttagtcagaatgctgtttttcgttaattaacttagcctgtgttgatatctcctccttcctggtcacattcaaaccttcccagagtacaaaggggtatgtagaaaggattccagaagaagtaatactttattctctaatgttaatagcttttctggatctcttagtagggggaaagtagaaaatcgagtagaatttggcctcaggtcaataaatgatataaaaacatgtgttctatttatgtatatatatgtatgtttctccaaaaagtgataaaaccaaaatatcactgactcatccctacccatattcttttcataaaacccactcaccaggtacaatagaaacttccctccttgtttgtcagcctcctgttcatgttccccacacacctgaaggtggtagaatcttttcagcctcttagccagtgagctaaatatggctaagcacaggtcataagagcacctaaggccagcatataagccaactacagttcacctttccaaatttggtcctatggatgttgagcatagggaagcaactctcagtattttggattattcaagtgtatgtggtaaaaatgcagatgattgctgctttaccccagggtttattagcatcctacttctgctgggctgcatcattatataatgccacaggcatctagtcaaggtaaagaagccagaaaggttaggcaagaagtgagataaaatcagatcacctttgatcaaaatggttggtgaacctccacatgtccagttctgttgccaaactttccattcagagtatttggtggagtttgaatttgagcaaactaaatgccttcatcttaggtagaaagggcctgaatcttccattttatattcaaacctcattgttatttggcctaagtaaaaagtcagatttcatttccatttacctgagttcgctttaaagagcttttcaaagagagctttatagacacccacaattgtccccaatctcttcatgatgttgcattaatagttgtttttgtccctttcttggaaatgttaatgccaaagttgcctgaacattgggcggttttcttaatttgaagtataaaaattataaagagtaattccaaaggtattaaaagattgtttaacagtatgtgtggtgatgtcattatctccagagaggcttcaagaaatcctttggaaataaaaagttaaatgtttacatttcatgtggtatttcaggtcttcaggttctgattagcttacttttttcctttgtctttggctgatttctgctttgtagataaataataatagccctgagatgtttctaacatttaaataagaaaaaaatcaaatcgaagtcagcctgctggaaaagtgatcacatggcagttgcagtaacttgtatggaaagagaaaatgcaatgagcccagttactgcacttgccactaccatgctgtccatggaaggaataatcagcagttcagttgtcacaagccgcccttgaagaaaacgcagcaaaatattttaaaatgaagatattgcagtccccagagccagtgaaggtttcttttggtaaaatgaaattgtgccattgtcaaagtaccccgtagtgatgagcactgactggttcactggccacattttagttcttcataataataggccacaaaagggctctgtggtttgcctccatgtgcactggcccctccccacccctagggggcactcagtagctgctgagaaggcctgtccacgaggctgttggaacccctccaataaatacttagaggtagtgtatctgatgcttgttttcgtggagaaaattgtattggagaacttaaaacatcacgaatatttttaataggatccgcagacacccaaaggagaagcttggtcttttccaggtatttccaacttgagttcaacccaaagcctttgaaaggaatgcattaccacatgaccacatgctgagaccccatggggtctaacacgggacctaagaaagtctctgcagccagatagtacatggtgtctccacaaaactaggcattctggagattgcccagaaagggatgtgaggggaccgttaagatctgtcttgcttatctcatgcactcacattccttcagcctcctggagttcctgataaaaggaagccagggtgtggacattttttagctattgatttcccaatagcttgtggatcagttgtacacccacacttccttctctgcctaattccgtttttctggaaaaagtagtatgcccatgtatgtgtgtttttcttaacacaggtccatgaaagtttggcttcctggtttgatgtctgttgcgtggcctggaaaccagggagcagcaactattgagatggtttctgtgttcagtgaaaaattctatttcattgagacaattttttctttatccacagtaattttttgacactgtcatcatgaaactacccttaggaaaataagattacctgcaaaaaaaaaaaagaaatgagttatggaataggaacagttatgtgatgattctgaaactttaacttagagcttcattactttaagaatggaaaacaacctctgagtttgatttcccaaagtttcataaagcccctaagctcatgattttcatcaactctttgcccacatagtcatttacctccacagccgtttgttgtcatagaaggggtggtggtgtttggatttgatttttttcaacttgcagtgagaaataggataggtgacaaaaccttacttgttttcttaagacaattcagtgcttgagcatctctgtcagaaatggaatgaaatactgttagccaattagaattattttatgtattgttattgtgttttgctgatttttatatgaaaatataattattcattcttgatctctggaagcaatcattattatgaggatcattttactttggaaacactttcataataaagataagtattaagagtgca

SEQ ID NO: 89701 - DNA, 1269 bp, Artificial Sequence
  derived and/or modified sequence
atggctggctgcgtgcccctgttacaggggttggtgctggttttagccctgcacagggtggaaccctcagcgacctccctgaaggaacgccatggcctgcactcagactcagcctgcacaggcgtacaggaatccctgttcctaccagcatctaaggcaaacgatgtgctggtaagatggaaacgcgccgggagttatttgctggaagagctgttcgagggcaatctagagaaagagtgctatgaggaaatctgcgtgtacgaggaggctagagaagtctttgagaacgaggtcgttaccgatgaattttggcgcagatacaaggggggatctccttgcatttcccagccttgcctgcacaatggatcctgccaggatagcatctgggggtacacctgtacatgtagcccagggtatgagggctccaattgtgaactagccaagaatgagtgccatccagagcgcacggacggctgtcagcacttctgtttgcctgggcaggagtcttatacatgttcatgcgcacagggatatcggctgggagaagatcataaacagtgcgtgcctcatgaccaatgtgcgtgtggagtcctgacgtcagagaagagagcccctgatctgcaggacctaccttggcaggtgaagttgactaactctgagggcaaagacttctgcggcggtgtcatcatccgcgaaaacttcgtgctgacaacagccaaatgttccttactgcataggaatattactgtgaaaacgtattttaaccgaacgtcccaggatcctctgatgatcaaaatcactcacgttcacgtccacatgaggtatgatgcggacgccggggagaacgacctcagccttctggagctcgaatggccaattcagtgcccgggcgcaggcctgcccgtatgcactcctgaaaaggacttcgccgagcacttgctcatccccagaacacgaggactcctgagcggatgggccagaaacggcaccgacctgggaaacagcttgaccacccggcccgtgacactggtggaaggcgaagaatgtggtcaggtgctgaacgtaacagtcaccacacgaacctattgcgagcgatcctcagtcgcagcaatgcactggatggatggtagtgtggtgacgagggagcatcgcggaagctggttcctaaccggagttctcggatctcaacctgtgggaggtcaagcccacatggtccttgtgacaaaagtgtcccggtattccttgtggtttaaacagatcatgaactag

SEQ ID NO: 89702 - DNA, 1269 bp, Artificial Sequence
  derived and/or modified sequence
atggccggctgtgtgcccctgctgcagggcctggtgctggtgctggccctgcaccgggtggagcccagcgccaccagcctgaaggagagacatggcctgcacagcgacagcgcctgcaccggggtgcaggagagcctcttcctgcctgccagcaaggccaatgatgtgctggtgcgctggaagagagctggcagctacctgctggaggagctgtttgagggcaacctggagaaggaatgttatgaggagatctgtgtgtatgaggaggcccgggaggtgtttgaaaatgaggtggtgacagatgagttctggaggcgctacaagggcggcagcccctgcatcagccagccctgcctgcacaacggcagctgccaggacagcatctggggctacacctgcacctgcagccctggctatgagggcagcaactgtgagctggccaagaatgaatgccaccctgagaggacagatggctgccagcacttctgcctgcccggccaggagagctacacctgcagctgtgcccagggctaccgcctgggggaggaccacaagcagtgtgtgccccatgaccagtgtgcctgtggggtgctgaccagcgagaagagggccccagacctgcaggacctgccctggcaggtgaagctgaccaacagcgagggcaaggacttctgtggcggcgtcatcatccgggagaactttgtgctgaccacagccaagtgcagcctgctgcacaggaacatcaccgtgaagacctacttcaacagaaccagccaggaccccctgatgatcaagatcacccacgtgcacgtgcacatgagatatgatgctgatgctggagaaaatgacctgagcctgctggagctggagtggcccatccagtgccctggggccggcctgcctgtgtgcaccccagagaaggactttgctgagcacctgctgatccccaggacccggggcctgctgagcggctgggccagaaatggaacagacctgggcaacagcctgaccaccaggcctgtgaccctggtggagggggaggagtgtggccaggtgctgaatgtgacagtgaccaccaggacctactgtgagaggagctctgtggccgccatgcactggatggatggctctgtggtgacccgggagcaccggggctcctggttcctgactggagtgctgggcagccagcctgtgggcggccaggcccacatggtgctggtgaccaaggtgagccgctacagcctgtggttcaagcagatcatgaactag

SEQ ID NO: 89703 - DNA, 1269 bp, Artificial Sequence
  derived and/or modified sequence
atggccggctgcgtgcccctgctgcagggcctggtgctggtgctggccctgcaccgggtggagccctccgcaacctctctgaaggaaagacatggacttcattctgatagcgcctgcacgggagtgcaagaaagcttattcctgcctgcatccaaagccaatgacgtgctggtgcgttggaaaagggctggtagctatttgcttgaggagttgttcgaggggaatctcgaaaaagaatgctacgaagagatctgcgtctatgaggaagcccgggaggtcttcgaaaacgaagtcgttactgatgagttttggaggcgctacaagggcggctctccctgtatatcacagccctgccttcacaacggctcttgccaagatagcatctgggggtacacctgcacttgttccccggggtatgaggggtcaaattgcgaattggccaaaaatgagtgtcatcctgagcggacagacggttgccaacatttttgcctgccaggccaagagtcttacacatgctcctgtgcacagggttatcgattgggggaggatcacaagcaatgcgtgccccacgaccaatgcgcatgtggcgtccttacctctgagaaacgggcacctgacctgcaggacctcccctggcaagtgaaattgactaattccgaggggaaagacttctgtggtggggtcatcataagggagaactttgtactcaccaccgccaaatgctctctactccatagaaacataacggttaagacgtactttaataggacatctcaggatcctttaatgattaaaatcacgcatgtgcacgtgcatatgcggtacgacgcggatgcaggggaaaatgacctttccctgctcgaactggagtggcccatacagtgtcctggtgctggactccctgtatgtacccctgagaaagactttgcggagcatctactgatcccaagaacacgcggcctcctgtccggttgggccaggaacggaaccgacttaggaaactctctcaccacccgtcctgtaacattagtggagggcgaagaatgtggccaggtgcttaatgtgactgtcactacacgcacatactgtgagcgatcaagcgtcgcagcaatgcattggatggatggatcagtcgtcacccgggaacatagggggagttggtttctgacgggggtcctggggtctcagcctgtcggcgggcaggctcatatggtgttggtgaccaaggtgtcgcggtactccttatggttcaagcaaattatgaactag

SEQ ID NO: 89704 - DNA, 1269 bp, Artificial Sequence
  derived and/or modified sequence
atggcaggatgtgttcccctgctgcaggggctggttctggtgcttgctcttcatcgcgtagaaccctccgccacatctctaaaagaaagacacggcttacatagtgactctgcatgcactggggtgcaagaatctctctttttaccagcctcaaaggctaacgacgtgcttgtaaggtggaaaagggctggctcatacctcctggaggaattgttcgaggggaatctagaaaaggagtgctatgaggaaatctgtgtctacgaggaggccagagaggtgtttgaaaatgaagtggttacagatgaattttggaggagatacaagggaggttctccctgcatcagccagccctgtctgcataacggctcgtgccaggacagcatttggggctacacctgcacatgcagtccgggatatgagggcagcaattgtgagttggccaaaaacgagtgtcatcctgaacgaacggatgggtgccagcatttctgtctgccaggacaagagagttacacttgctcctgcgcacaaggatatagactgggcgaggatcataaacagtgcgtcccacacgatcagtgcgcttgcggcgtgctgacctcagaaaaacgcgctcccgaccttcaggacctcccatggcaagtgaaacttaccaactccgagggaaaggacttttgcggcggagtcataatccgtgagaattttgtcctcaccacggccaaatgcagtctcctgcaccgcaacattaccgtgaagacctacttcaacagaacaagtcaggacccactcatgattaaaattactcatgtacacgttcatatgaggtacgatgccgacgcaggggaaaatgatctgtccctgttggagctggagtggcccatccagtgtcccggagcaggtctccccgtgtgcacccccgaaaaagacttcgctgagcatctgcttatccccagaacccgcggactcttgagcggctgggccaggaatgggacggacctcgggaacagcctgaccacccgtccagtcacattggtagaaggagaggagtgtggacaggttctgaacgtgaccgtgacaaccaggacatactgcgaacggagctctgtggcggctatgcactggatggatggcagcgtggttacgcgggagcacagaggttcttggttcctcaccggggttctgggatctcagccggtcggtgggcaagcccacatggtactggtgactaaagtgtcgcggtactccctgtggttcaagcaaatcatgaattag

SEQ ID NO: 89705 - DNA, 1269 bp, Artificial Sequence
  derived and/or modified sequence
atggcaggctgcgtccccttactccagggcttagtgctcgttctcgcgttgcacagagtggagcctagcgcgactagcctcaaggagcgacacggcttgcattcagactccgcttgcacaggagtgcaggagtccctgttcttacctgcctctaaagctaacgacgtattggtaagatggaagcgagccggcagttacctgctggaggagctgtttgaaggcaatctggagaaggagtgctacgaagagatctgtgtgtacgaagaagctagggaggttttcgagaatgaggttgttaccgacgagttttggcgacggtataaaggaggatcaccatgtatttcacaaccctgcctccacaatggttcctgccaagattccatttggggatacacctgtacatgctcccctggctacgaaggatcgaattgtgagctcgctaagaatgaatgccatccagaaagaaccgatgggtgtcagcacttttgcctgcccggacaggaaagctatacttgttcctgcgcccagggataccgactgggagaagatcataaacagtgcgtccctcacgaccagtgcgcttgtggggtcctgaccagcgagaagagagcgccagatctgcaggatctgccatggcaggtaaaactaacaaactcagagggtaaagacttctgtggcggggtcatcatccgggagaatttcgtgcttaccaccgccaaatgcagcctgctacatagaaatattactgtcaagacgtactttaataggacctcccaggatccccttatgataaaaataacccacgttcacgtgcacatgaggtatgacgcagacgccggggaaaacgacctgtcactcttagagctggagtggccaatccagtgcccaggcgccggccttccggtatgcactccagaaaaagacttcgcagagcacttgctaataccacgcacgagggggctgctttctggctgggccagaaatgggaccgatctggggaattcgctaacaacccgccccgtgacccttgtggagggagaagagtgtggccaggtgctgaacgtcacggtaacgacgcggacatattgcgaaagaagctctgtggccgccatgcattggatggacgggagcgtagtcacacgagagcatcgtggatcctggttcctaacaggtgtgctgggcagtcaacccgtaggcgggcaagcccatatggtcttggttactaaagtgtccaggtattcactgtggtttaagcagattatgaactag

SEQ ID NO: 89706 - DNA, 1269 bp, Artificial Sequence
  derived and/or modified sequence
atggctgggtgcgtgcctctgttgcaaggtttggtattagtcttggcccttcaccgcgttgaaccttccgctacatccctgaaagagaggcacggcttacattccgatagcgcctgtaccggagtccaggagagtctgtttctgcccgccagcaaagccaatgatgtgctggtacgctggaagagagccggtagttacttactggaggaactgtttgaaggaaatctggaaaaggaatgctacgaagaaatttgcgtttatgaagaagctagagaagtgtttgagaatgaggtggtaaccgacgagttttggcgacggtataaaggaggatcaccatgtatttcacaaccctgcctccacaatggttcctgccaagattccatttggggatacacctgtacatgctcccctggctacgaaggatcgaattgtgagctcgctaagaatgaatgccatccagaaagaaccgatgggtgtcagcacttttgcctgcccggacaggaaagctatacttgttcctgcgcccagggataccgactgggagaagatcataaacagtgcgtccctcacgaccagtgcgcttgtggggtcctgaccagcgaaaaaagagcccccgatctgcaggacctgccatggcaagtgaaactaacaaattctgagggaaaggacttttgcgggggcgtgatcatccgcgagaacttcgtattaacaaccgcaaagtgtagtcttctgcaccgcaacattaccgtgaagacttattttaatcgtacttctcaggacccgctcatgattaagatcacccacgtccacgtacacatgagatacgatgcagacgccggagagaatgacctttcgctgttggaactggaatggccgattcagtgccccggcgcaggactgcccgtttgcacacctgagaaagatttcgctgaacacctgctcatcccaagaaccagaggattgctgtcaggctgggcaaggaatggcactgatctgggaaactcactgacaaccagacctgtgactcttgtcgagggagaagagtgcggccaggtccttaatgttaccgttaccaccagaacatattgcgagaggtcaagcgtggcagccatgcattggatggatggctcagtggttacccgagagcatcgggggtcatggttcttaactggagtccttggtagtcagccagtgggaggacaagcccatatggtgttagtaacgaaggtcagtcggtattccttatggttcaaacaaattatgaattag

SEQ ID NO: 89707 - DNA, 1269 bp, Artificial Sequence
  derived and/or modified sequence
atggccggctgcgtgcccctgctgcagggcctggtgctggtgctggccctgcacagagtggagcccagcgccaccagcctgaaggagagacacggcctgcacagcgacagcgcctgcaccggcgtgcaggagagcctgttcctgcccgccagcaaggccaacgacgtgctggtgagatggaagagagccggcagctacctgctggaggagctgttcgagggcaacctggagaaggagtgctacgaggagatctgcgtgtacgaggaggccagagaggtgttcgagaacgaggtggtgaccgacgagttctggagaagatacaagggcggcagcccctgcatcagccagccctgcctgcacaacggcagctgccaggacagcatctggggctacacctgcacctgcagccccggctacgagggcagcaactgcgagctggccaagaacgagtgccaccccgagagaaccgacggctgccagcacttctgcctgcccggccaggagagctacacctgcagctgcgcccagggctacagactgggcgaggaccacaagcagtgcgtgccccacgaccagtgcgcctgcggcgtgctgaccagcgagaagagagcccccgacctgcaggacctgccctggcaggtgaagctgaccaacagcgagggcaaggacttctgcggcggcgtgatcatcagagagaacttcgtgctgaccaccgccaagtgcagcctgctgcacagaaacatcaccgtgaagacctacttcaacagaaccagccaggaccccctgatgatcaagatcacccacgtgcacgtgcacatgagatacgacgccgacgccggcgagaacgacctgagcctgctggagctggagtggcccatccagtgccccggcgccggcctgcccgtgtgcacccccgagaaggacttcgccgagcacctgctgatccccagaaccagaggcctgctgagcggctgggccagaaacggcaccgacctgggcaacagcctgaccaccagacccgtgaccctggtggagggcgaggagtgcggccaggtgctgaacgtgaccgtgaccaccagaacctactgcgagagaagcagcgtggccgccatgcactggatggacggcagcgtggtgaccagagagcacagaggcagctggttcctgaccggcgtgctgggcagccagcccgtgggcggccaggcccacatggtgctggtgaccaaggtgagcagatacagcctgtggttcaagcagatcatgaactag

SEQ ID NO: 89708 - protein, 915 aa, Artificial Sequence
  derived and/or modified sequence
MELSDANLQTLTEYLKKTLDPDPAIRRPAEKFLESVEGNQNYPLLLLTLLEKSQDNVIKVCASVTFKNYIKRNWRIVEDEPNKICEADRVAIKANIVHLMLSSPEQIQKQLSDAISIIGREDFPQKWPDLLTEMVNRFQSGDFHVINGVLRTAHSLFKRYRHEFKSNELWTEIKLVLDAFALPLTNLFKATIELCSTHANDASALRILFSSLILISKLFYSLNFQDLPEFFEDNMETWMNNFHTLLTLDNKLLQTDLVSNAIQFLASVCERPHYKNLFEDQNTLTSICEKVIVPNMEFRAADEEAFEDNSEEYIRRDLEGSDIDTRRRAACDLVRGLCKFFEGPVTGIFSGYVNSMLQEYAKNPSVNWKHKDAAIYLVTSLASKAQTQKHGITQANELVNLTEFFVNHILPDLKSANVNEFPVLKADGIKYIMIFRNQVPKEHLLVSIPLLINHLQAESIVVHTYAAHALERLFTMRGPNNATLFTAAEIAPFVEILLTNLFKALTLPGSSENEYIMKAIMRSFSLLQEAIIPYIPTLITQLTQKLLAVSKNPSKPHFNHYMFEAICLSIRITCKANPAAVVNFEEALFLVFTEILQNDVQEFIPYVFQVMSLLLETHKNDIPSSYMALFPHLLQPVLWERTGNIPALVRLLQAFLERGSNTIASAAADKIPGLLGVFQKLIASKANDHQGFYLLNSIIEHMPPESVDQYRKQIFILLFQRLQNSKTTKFIKSFLVFINLYCIKYGALALQEIFDGIQPKMFGMVLEKIIIPEIQKVSGNVEKKICAVGITKLLTECPPMMDTEYTKLWTPLLQSLIGLFELPEDDTIPDEEHFIDIEDTPGYQTAFSQLAFAGKKEHDPVGQMVNNPKIHLAQSLHKLSTACPGRVPSMVSTSLNAEALQYLQGYLQAASVTLL

SEQ ID NO: 89709 - protein, 569 aa, Artificial Sequence
  derived and/or modified sequence
METWMNNFHTLLTLDNKLLQTDDEEEAGLLELLKSQICDNAALYAQKYDEEFQRYLPRFVTAIWNLLVTTGQEVKYDLLVSNAIQFLASVCERPHYKNLFEDQNTLTSICEKSIVVHTYAAHALERLFTMRGPNNATLFTAAEIAPFVEILLTNLFKALTLPGSSENEYIMKAIMRSFSLLQEAIIPYIPTLITQLTQKLLAVSKNPSKPHFNHYMFEAICLSIRITCKANPAAVVNFEEALFLVFTEILQNDVQEFIPYVFQVMSLLLETHKNDIPSSYMALFPHLLQPVLWERTGNIPALVRLLQAFLERGSNTIASAAADKIPGLLGVFQKLIASKANDHQGFYLLNSIIEHMPPESVDQYRKQIFILLFQRLQNSKTTKFIKSFLVFINLYCIKYGALALQEIFDGIQPKMFGMVLEKIIIPEIQKVSGNVEKKICAVGITKLLTECPPMMDTEYTKLWTPLLQSLIGLFELPEDDTIPDEEHFIDIEDTPGYQTAFSQLAFAGKKEHDPVGQMVNNPKIHLAQSLHKLSTACPGRVPSMVSTSLNAEALQYLQGYLQAASVTLL

SEQ ID NO: 89710 - DNA, 2748 bp, Artificial Sequence
  derived and/or modified sequence
atggagctgtcagacgctaatcttcagactctgacggagtacttaaagaagactctggaccccgaccccgcaattagacgcccagcagagaaattcttggagtcagtcgaggggaaccagaattaccccctgctgttgcttacactgcttgagaaatcacaggacaacgtgataaaggtgtgtgccagtgtgacgtttaagaactatattaagaggaactggaggatcgtggaggacgaacctaataaaatctgcgaagccgatcgcgtcgcaatcaaggccaatattgtgcacttgatgcttagttctccagagcagatacagaaacagttatcagatgccatcagcattattggacgggaagacttcccacaaaagtggccggaccttctgacggaaatggtcaaccggtttcagagtggcgatttccacgtgataaacggcgtcctgcgaactgctcactcattattcaaacggtatcggcatgaattcaaaagtaatgaactctggacagaaataaaacttgtgctggacgctttcgccctcccgctcaccaatttgtttaaggccacaatcgaattatgttccacccacgctaacgatgccagcgctttgcgcatactcttcagttcactgatactgatttcaaagttattttatagcttaaactttcaggaccttcccgagtttttcgaagacaatatggagacctggatgaataacttccacactctcctgactttagataataagttgcttcagactgacctggtttctaacgcaatacagtttctggccagtgtatgcgagcgcccccactacaagaatctgtttgaagaccaaaacaccttaaccagcatatgcgagaaagtgattgtgccaaacatggagttcagggctgctgacgaggaggcattcgaggataacagcgaagaatatatccgtcgtgatcttgaggggagcgacatcgacacaaggaggcgtgccgcctgcgatttagttcggggcctctgtaagttcttcgaaggacccgtcacgggtatcttttcagggtacgtaaatagcatgttgcaggagtatgccaaaaaccctagcgtaaattggaaacacaaggacgccgcaatatacctggtaactagtctggcctccaaagcgcaaacacaaaaacacgggatcacccaagctaatgagctcgtcaacctgaccgagttcttcgtgaaccacatacttcctgatttgaaatcagcaaacgttaacgaattccccgtgctgaaagccgacgggatcaagtacattatgatcttcagaaaccaagtgccaaaagagcatcttttggtgagcatccctttgctgattaaccacctgcaggccgagagcatcgtagtgcacacctatgcagctcacgctctcgagagattgttcaccatgagaggaccgaataatgcaacactgtttacggctgccgaaattgcacccttcgtggagatattactaactaatctgtttaaggccctgaccttgccagggtcaagcgaaaatgagtatatcatgaaggcgatcatgaggagtttttcccttcttcaggaagccatcataccctatattcctactttgataacacagctgacgcagaagctgcttgctgtatccaagaacccaagcaaacctcattttaatcattacatgtttgaggcaatttgtctcagcattaggataacttgtaaggccaacccagccgccgtcgtcaattttgaggaggcgctgtttcttgttttcacggagattttgcagaatgatgtgcaggagttcattccctatgtattccaggtcatgagcctgctgttggagacccataaaaatgatatcccatcatcctacatggcactgttcccccacttattgcagcccgtattatgggaacgtacaggcaacatccccgcattagtgcgtcttctccaagccttcttggagcgcggttccaacaccatcgcgtccgccgccgcggataaaattccagggctgctgggagttttccagaaactcattgcaagcaaggcgaatgaccatcaggggttctaccttctaaacagtattatcgaacatatgcctcccgagagtgtggatcaataccggaagcagattttcatcctgctgtttcagagactacagaacagtaaaaccacgaaatttatcaagtcattcctcgtgttcattaacctctactgcatcaaatacggagcactggcactgcaggagatcttcgacggaattcagccaaagatgttcggcatggtcttagagaagataatcattcccgaaattcagaaagtgagtgggaacgttgagaagaagatatgcgctgttggtatcaccaagctcctcactgagtgcccaccaatgatggacactgagtacactaaactctggaccccattgctgcagtctctgatcggcctgttcgagctgcctgaagatgataccattcccgacgaagagcacttcatagatatcgaggacacacccggctatcagaccgcgttttcacaactggctttcgcaggaaagaaggagcacgaccccgtcgggcaaatggtcaataaccccaaaatacatcttgcgcaatctctgcacaaactgtcaacagcttgtcctggaagggtcccctcgatggtgtcgacgtcgctaaatgccgaagccttacagtacctgcaggggtacctccaggctgcctccgttactctgttatag

SEQ ID NO: 89711 - DNA, 1710 bp, Artificial Sequence
  derived and/or modified sequence
atggagacctggatgaataactttcacacactcctgacactagataacaaactgctgcagactgatgatgaggaggaggcaggcttattggagctgctgaagagccagatatgtgacaacgccgcactctacgcccaaaaatatgacgaggagttccagcggtacctgccgcggtttgtgacagcaatttggaatctgttggtgactactggacaagaagtgaaatacgatctgctggtgtccaatgccatccagttcctcgctagcgtctgcgagagacctcactacaagaacctgttcgaagaccaaaatacattgacttcaatttgtgaaaaatcaatcgtggtgcacacctatgcggctcacgctctggagcgactgtttactatgcgtgggccaaataacgcgacactcttcactgcggcagagattgcgcccttcgtagagatactgttgactaacttgtttaaggcacttacactccccgggtcttctgagaatgagtacattatgaaggctattatgagaagcttttcgctgctgcaggaggcaattatcccctatatccctaccttgatcacacagttaactcagaagcttcttgccgtctccaagaatccctctaaaccacactttaaccactatatgttcgaagccatttgtctgtctataaggatcacttgcaaagccaacccagctgccgtggtgaattttgaagaggctttattcctcgtgttcacagaaattctacagaacgatgtgcaggaatttatcccgtatgtatttcaggtgatgagcttgctgctcgagacacataagaacgacataccatcttcctacatggccctcttcccccatctgctgcagcccgttctctgggaaagaaccggcaatatacctgccttagtacgcctcttgcaggctttcctggagcgcggcagtaacacgattgcctctgcggcggcagataaaatcccgggactgctcggcgttttccagaagttgatcgctagtaaagcaaatgatcaccagggcttttatctgctgaacagtataatcgagcatatgcctcctgagagcgttgatcagtaccggaaacagatcttcatcctgttgtttcagaggctgcaaaattctaaaaccacaaagtttatcaagagcttcttagtcttcataaatctctattgtattaagtatggcgctcttgccctccaggaaatcttcgatggcatccagcccaagatgtttggcatggttctggagaagataatcatccctgaaattcagaaggttagcgggaatgtggagaaaaaaatctgtgcggtgggcattacaaagctgctcacagaatgtccccccatgatggacacagaatacacgaagctgtggactccgctgctccagtcgcttatcggcctctttgagctccctgaagacgacacaattcccgatgaggaacacttcatcgacatcgaggatacacccgggtatcagaccgcatttagccagctggcattcgcaggcaagaaggaacacgatcccgtggggcagatggtgaataaccccaagattcacttggcacagagcctgcacaaactctccaccgcctgtcccggaagggtcccctctatggtcagcacaagtctgaacgctgaagcattgcaatacctccagggctacctgcaggcagcttctgtcaccctcctctag

SEQ ID NO: 89712 - DNA, 2748 bp, Artificial Sequence
  derived and/or modified sequence
atggagctgagtgatgccaacctgcagaccctgacagagtacctgaagaagaccctggaccctgaccctgccatccggcggcctgctgagaagttcctggagagcgtggagggcaaccagaactaccccctgctgctgctgaccctgctggagaagagccaggacaacgtcatcaaggtgtgtgcctctgtgaccttcaagaactacatcaagaggaactggagaattgtggaggatgagcccaacaagatctgtgaggccgacagagtggccatcaaggccaacatcgtgcacctgatgctgagcagccctgagcagatccagaagcagctgagtgatgccatcagcatcatcggccgggaggacttcccccagaagtggccagacctgctgacagagatggtgaaccgcttccagagcggggacttccacgtgatcaatggagtgctgaggacagcccacagcctcttcaagcgctacagacatgagttcaagagcaatgagctgtggacagagatcaagctggtgctggatgcctttgccctgcccctgaccaacctcttcaaggccaccatcgagctgtgcagcacccacgccaatgatgccagcgccctgcgcatcctcttcagcagcctcatcctgatcagcaagctgttctacagcctgaacttccaggacctgcctgagttctttgaggacaacatggagacctggatgaacaacttccacaccctgctgaccctggacaacaagctgctgcagacagacctggtgtccaatgccatccagttcctggcctctgtgtgtgagcggccccactacaagaacctgtttgaggaccagaacaccctgaccagcatctgtgagaaggtgattgtgcccaacatggagttccgggctgctgatgaggaggcctttgaggacaacagcgaggagtacatcagaagagacctggagggcagtgacatcgacaccaggagaagagctgcctgtgacctggtgcggggcctgtgcaagttctttgagggccctgtgacaggcatcttcagcggctacgtgaacagcatgctgcaggagtatgccaagaaccccagcgtgaactggaagcacaaggatgctgccatctacctggtgaccagcctggccagcaaggcccagacccagaagcacggcatcacccaggccaatgagctggtgaacctgacagagttctttgtgaaccacatcctgcctgacctgaagagcgccaacgtgaatgagttccctgtgctgaaggcagatggcatcaagtacatcatgatcttcaggaaccaggtgcccaaggagcacctgctggtgtccatccccctgctgatcaaccacctgcaggccgagagcatcgtggtgcacacctacgccgcccacgccctggagcggctcttcaccatgaggggccccaacaatgccaccctcttcaccgctgctgagatcgccccctttgtggagatcctgctgaccaacctcttcaaggccctgaccctgcccggcagcagtgaaaatgagtacatcatgaaggccatcatgaggagcttcagcctgctgcaggaggccatcatcccctacatccccaccctcatcacccagctgacccagaagctgctggccgtgtccaagaaccccagcaagccccacttcaaccactacatgtttgaggccatctgcctgagcatccgcatcacctgcaaggccaacccagctgctgtggtgaactttgaggaggccctcttcctggtgttcacagagatcctgcagaatgatgtgcaggagttcatcccctacgtgttccaggtgatgagcctgctgctggagacccacaagaatgacatccccagcagctacatggccctcttcccccacctgctgcagcctgtgctgtgggagaggacaggcaacatcccagccctggtgcggctgctgcaggccttcctggagcggggcagcaacaccatcgccagcgctgctgctgacaagatccctggcctgctgggcgtcttccagaagctgattgccagcaaggccaatgaccaccagggcttctacctgctgaacagcatcatcgagcacatgcctcctgagagcgtggaccagtacaggaagcagatcttcatcctgctcttccagaggctgcagaacagcaagaccaccaagttcatcaagagcttcctggtgttcatcaacctgtactgcatcaagtatggagccctggccctgcaggagatctttgatggcatccagcccaagatgtttggcatggtgctggagaagatcatcatccctgagatccagaaggtgtctggaaatgtggagaagaagatctgtgctgtgggcatcaccaagctgctgacagagtgcccccccatgatggacacagagtacaccaagctgtggacccccctgctgcagagcctgattggcctgtttgagctgcctgaagatgacaccatcccagatgaggagcacttcattgatattgaggacaccccaggctaccagacagccttcagccagctggcctttgctgggaagaaggagcatgaccctgtgggccagatggtgaacaaccccaagatccacctggcccagagcctgcacaagctgagcacagcctgccccggccgggtgcccagcatggtgtccaccagcctgaatgctgaggccctgcagtacctgcagggctacctgcaggccgcctctgtgaccctgctgtag

SEQ ID NO: 89713 - DNA, 1710 bp, Artificial Sequence
  derived and/or modified sequence
atggagacctggatgaacaacttccacaccctgctgaccctggacaacaagctgctgcagacagatgatgaggaggaggccggcctgctggagctgctgaagagccagatctgtgacaatgctgccctgtatgcccagaagtatgatgaggagttccagcgctacctgcccaggtttgtgacagccatctggaacctgctggtgaccaccggccaggaggtgaagtatgacctgctggtgtccaatgccatccagttcctggcctctgtgtgtgagcggccccactacaagaacctgtttgaggaccagaacaccctgaccagcatctgtgagaagagcatcgtggtgcacacctacgccgcccacgccctggagcggctcttcaccatgaggggccccaacaatgccaccctcttcaccgctgctgagatcgccccctttgtggagatcctgctgaccaacctcttcaaggccctgaccctgcccggcagcagtgaaaatgagtacatcatgaaggccatcatgaggagcttcagcctgctgcaggaggccatcatcccctacatccccaccctcatcacccagctgacccagaagctgctggccgtgtccaagaaccccagcaagccccacttcaaccactacatgtttgaggccatctgcctgagcatccgcatcacctgcaaggccaacccagctgctgtggtgaactttgaggaggccctcttcctggtgttcacagagatcctgcagaatgatgtgcaggagttcatcccctacgtgttccaggtgatgagcctgctgctggagacccacaagaatgacatccccagcagctacatggccctcttcccccacctgctgcagcctgtgctgtgggagaggacaggcaacatcccagccctggtgcggctgctgcaggccttcctggagcggggcagcaacaccatcgccagcgctgctgctgacaagatccctggcctgctgggcgtcttccagaagctgattgccagcaaggccaatgaccaccagggcttctacctgctgaacagcatcatcgagcacatgcctcctgagagcgtggaccagtacaggaagcagatcttcatcctgctcttccagaggctgcagaacagcaagaccaccaagttcatcaagagcttcctggtgttcatcaacctgtactgcatcaagtatggagccctggccctgcaggagatctttgatggcatccagcccaagatgtttggcatggtgctggagaagatcatcatccctgagatccagaaggtgtctggaaatgtggagaagaagatctgtgctgtgggcatcaccaagctgctgacagagtgcccccccatgatggacacagagtacaccaagctgtggacccccctgctgcagagcctgattggcctgtttgagctgcctgaagatgacaccatcccagatgaggagcacttcattgatattgaggacaccccaggctaccagacagccttcagccagctggcctttgctgggaagaaggagcatgaccctgtgggccagatggtgaacaaccccaagatccacctggcccagagcctgcacaagctgagcacagcctgccccggccgggtgcccagcatggtgtccaccagcctgaatgctgaggccctgcagtacctgcagggctacctgcaggccgcctctgtgaccctgctgtag

SEQ ID NO: 89714 - DNA, 2748 bp, Artificial Sequence
  derived and/or modified sequence
atggagctgagcgacgccaacctgcagaccctgaccgagtacctgaagaaaacactggatccagatcctgccatccgccgcccagctgagaagtttcttgagtccgtagaagggaaccaaaactacccactcctgctcctaaccctgctggagaagagtcaggacaacgtgataaaagtgtgtgcaagcgtcacgtttaagaactacattaagagaaactggagaatcgttgaggacgagcccaacaaaatttgtgaggctgatagagtcgccattaaagccaacatcgtgcatctcatgcttagcagccccgagcagattcagaaacagctcagcgacgccatctcaatcattggccgggaggactttccccagaaatggcctgacttacttactgaaatggttaatagatttcaaagcggagatttccatgtaatcaatggcgtgctacggactgcacacagtctcttcaagcgttacaggcacgagtttaagtctaacgagctgtggactgagattaagctggttctggacgcctttgcactcccactgacaaatctgtttaaggctacaattgaactgtgtagtacacacgcaaatgatgcttccgccctgcgcatcctgttttcctcactgatactcattagcaaattattttacagcttaaactttcaggatttgccagagttctttgaggacaacatggagacttggatgaataactttcacacgctgctgacgttggacaacaagctcttacagaccgatctggtctccaacgctatccagtttctggcatccgtgtgcgaacggcctcattacaagaatctattcgaggatcagaacacactaacctctatttgcgagaaggtgatcgtacccaatatggaattcagggccgccgatgaggaggcgtttgaagataactcagaagaatatattaggcgggacttagagggaagtgatatcgatacacggcggcgggcagcctgcgatctggtgaggggactttgcaaatttttcgaaggccccgtaacaggcatcttttcaggctatgtgaattcaatgctgcaggagtatgcaaagaacccatcggtcaattggaagcacaaagatgccgccatctacctcgtgaccagcttagcctctaaggcccagacccagaaacatgggattacgcaagccaacgagctcgtgaatctgactgagttttttgtgaaccacattttgcctgaccttaagtctgccaatgtcaacgaatttcccgtgttaaaggctgacgggattaaatacattatgattttccggaaccaggtccctaaggagcacttgctcgtttccatcccactgctcatcaatcatctgcaggccgaaagcattgttgtgcacacttacgccgctcacgccctcgagagattattcaccatgagggggccaaataacgcaaccctgtttacagcggcagaaattgccccttttgtagaaattctgcttacaaacctctttaaagcattgactcttccagggtccagcgagaacgaatacatcatgaaagcgatcatgcggtcctttagcttgctgcaagaggccatcattccctatattcctacattaatcacgcagttaacacagaagctgctagccgtcagtaagaacccttccaagccacacttcaatcactacatgttcgaggctatctgtctctcaattcggattacatgcaaggctaatccagccgctgtcgttaactttgaggaagccctcttcctggtgtttacagaaattctccagaatgatgtgcaggaatttataccctacgtgtttcaggtaatgtctctgttattagagacccataagaatgacattcctagcagttacatggccctattcccccatcttctacagcctgtgctgtgggagagaacgggaaatattcccgccctcgtgcgactgttacaggcctttttagaaaggggctcaaatactattgcatctgccgccgccgacaagataccaggtctattaggcgtgtttcagaaattaatcgcaagcaaggctaacgatcatcagggattttatctgctgaattctatcatagaacatatgccccctgaatccgtggatcagtaccggaagcagatcttcatacttctctttcagcgcctccagaatagtaaaaccacaaagttcattaagagttttctggtgttcataaacctttactgcatcaagtacggcgcgttggcactacaggaaatctttgatggaatccagccaaagatgttcggaatggtgcttgaaaagatcataatccccgagatccagaaggtctcaggaaatgttgagaagaagatctgcgccgttggtatcacaaagttgcttacggaatgccctccaatgatggacaccgaatataccaaactgtggactcccctactccagagcctgatcggtctttttgagctccctgaagacgacactatccccgacgaggagcattttatcgacattgaggatacgcccggttatcaaactgcgttctctcagttggcttttgccggaaaaaaagagcatgatcccgtcggacagatggttaataaccctaagatccatttggcccagtcgctccacaagctgagcactgcctgtccaggccgggtgccttccatggtgagtacctcactgaacgccgaggctcttcaatatttacagggttatctgcaggccgcctcagttacactgctgtag

SEQ ID NO: 89715 - DNA, 1710 bp, Artificial Sequence
  derived and/or modified sequence
atggagacctggatgaacaacttccacaccctgctgaccctggacaataagcttcttcaaactgacgatgaagaggaggccggcctgttagagctgctaaagtcccaaatctgtgacaatgccgcactctatgcccagaaatatgatgaggaattccaaaggtaccttcccaggttcgtaactgccatttggaacctgctggttactacaggacaggaagtcaagtacgaccttctcgtgtccaatgcgattcagtttctggcctctgtgtgcgagcgacctcattacaagaacttattcgaagaccaaaacacacttacatcaatctgtgaaaaatctatagttgttcacacttatgcggctcatgcactagagcggctgtttacgatgcgcggtcctaataatgcaactctatttaccgccgcagagatagctcccttcgtcgagatccttctgaccaaccttttcaaggcactcacccttccaggaagttctgagaacgaatacatcatgaaggcaattatgcggagtttctcactcctgcaggaagccatcattccctatattcccaccctcattacccagctcactcaaaagctgttagctgttagtaaaaatccatcaaagccccatttcaatcattacatgttcgaagccatttgtctgtccattcggattacttgcaaggccaatccagctgccgtagtgaattttgaagaggcactgtttttggtctttacagagatcctgcaaaacgacgtccaggaattcatcccctatgtgtttcaagtcatgagcctgctgctcgagacccacaaaaacgacatcccgagtagctatatggccttgttcccccatcttttgcaaccagtcttgtgggagaggaccggaaatatcccagcgctagttcgactattgcaggcgttcttggagcggggcagtaacaccatcgcctcagccgccgctgataagattcccgggttactcggagttttccagaagctgatagcttccaaggctaacgaccaccagggattctacttgttgaacagcatcattgaacacatgcctcctgagtcagttgaccaatatcgaaagcagatctttatactcctgtttcagcggctgcaaaactctaagacaacgaaatttattaaatcctttcttgtgtttataaacctgtactgtatcaagtatggcgctctggccttgcaagagatctttgacgggatccagcccaaaatgtttggtatggtgctggagaaaatcatcatcccagagatccaaaaggtgtcggggaatgtcgagaaaaagatctgtgcagtcggaattactaagttgctgaccgagtgcccccctatgatggataccgaatataccaagttgtggacccccctactgcagagcctgatcggcctattcgagttgccggaggatgatacaattccagacgaagagcacttcatagatatcgaggatacgccggggtaccagaccgccttctcccagctggccttcgctggaaaaaaagaacacgatccagtcggtcaaatggttaataatccaaagatacatttggcgcaaagtctccataagcttagcacagcttgtcccggtagggtcccctcgatggtgtccacgtctttaaacgcagaagctctgcagtacctgcaggggtacctgcaagccgccagtgtaacattgctctag

SEQ ID NO: 89716 - DNA, 2748 bp, Artificial Sequence
  derived and/or modified sequence
atggagttgagcgacgccaatctgcaaactctaactgagtacctcaagaagactctggaccctgatccagccattcgcagacccgctgaaaagtttttggagtctgtcgagggtaaccagaactatccactcctgttactgacactgctggaaaaatcacaggacaacgtgattaaggtttgtgcttccgtaacattcaagaattacattaaaagaaattggcgcatcgtcgaggatgaaccgaataagatctgcgaagccgatcgggtggctatcaaagccaatattgtgcacctgatgttgtcatcacctgaacagatccagaagcagctttctgacgccatttccatcatcggcagggaggactttccacagaaatggcccgacctccttacagagatggtaaaccgctttcagtccggcgacttccatgtgatcaacggagtgctccggactgcacacagtctgtttaagaggtatagacacgagttcaaatcgaatgaattatggaccgagatcaagctggtgttggacgctttcgctctgcctctcacaaatctcttcaaggctacaatcgagctatgttccacccacgctaacgacgcctctgccctgagaattctgtttagctctttaatactgatctcaaaattgttttatagccttaattttcaagacctacctgagttttttgaggataatatggaaacctggatgaataacttccatactctcctgactctggataacaagctgcttcaaactgatttggtgtcgaacgccatccagttcctcgcctccgtttgcgagaggcctcactataaaaatctcttcgaggaccaaaacaccctgacctcaatttgtgaaaaagtgattgtccccaacatggagttcagagcagccgatgaggaggcctttgaagataactctgaagagtacattcgcagggacctcgaagggagtgacatcgataccagacgtagagccgcttgcgatcttgtcagagggttgtgcaaattcttcgaagggcctgtgaccggcatattttcaggctatgttaattccatgctccaagagtatgccaaaaaccccagcgttaattggaaacacaaggatgccgctatttatctcgtgacatctctggcttcaaaggctcagacccagaagcacggcatcacacaggccaatgagcttgtgaatctgactgaattttttgtcaaccacatcttgcctgatctgaaaagcgcaaacgtcaatgaattcccagtcctgaaagcagatggcatcaaatatattatgattttccgtaaccaggttccaaaggaacaccttctcgtgtcaataccactactgataaaccacctgcaggctgaatcaattgtagtccatacctacgctgcccacgctctcgaacggctcttcacaatgcgagggcctaacaacgccactctgtttacggccgcagaaattgccccatttgtggagattctgctgactaacctctttaaggccctcaccctcccaggctctagtgagaacgagtacatcatgaaggctatcatgaggagtttctctctccttcaggaggctatcattccctacatacccacactgatcacccagcttactcagaagctcttggctgtatctaagaacccctccaagcctcacttcaatcattacatgttcgaggcgatttgcctctcaattaggataacatgcaaagcaaaccccgcagccgtagttaattttgaggaagctctattcctcgtcttcacggaaattcttcagaacgacgtccaggagttcatcccctacgtgttccaggtgatgtccctgcttctggagacacataaaaacgatatccccagtagctacatggctctgtttccacacttactccagccagtcctgtgggaaagaaccgggaatataccagcactcgttaggctgctgcaggcctttctggagcgcggaagcaatactattgcatctgctgccgctgacaaaatacctgggctgttaggggtgttccagaagctgatagcctctaaggcaaacgatcatcagggcttttacctacttaattcaatcatcgagcacatgccccctgagtctgtggatcagtaccggaagcagatctttatcctgctattccaacgccttcagaacagcaagacgacgaagtttatcaaaagttttttggtgttcatcaatttgtactgtatcaagtacggcgcactagcactgcaggaaatctttgatggtatccagccgaagatgtttggcatggtgcttgagaagatcattatcccagaaatccagaaagtgtctggcaatgttgaaaagaagatctgtgcagtaggaattacaaagctgctcaccgaatgccctccgatgatggatactgaatataccaagctttggactccactactgcagtcattgattggactcttcgagctgcctgaagacgacacgatcccggacgaagaacactttattgacatagaggacaccccaggctaccagacagcattctcacagctcgccttcgctgggaaaaaggaacatgacccagtaggacagatggtgaacaatcctaaaattcaccttgcacagtccctgcacaagcttagtaccgcatgtccaggtagagttccatcaatggttagcactagcctaaacgccgaggcgctgcagtaccttcaggggtatcttcaggccgcatcagtgactttgttatag

SEQ ID NO: 89717 - DNA, 1710 bp, Artificial Sequence
  derived and/or modified sequence
atggagacttggatgaataactttcacaccctgctgacactggacaacaagctgctgcagacagatgatgaagaggaagccggattgctcgaactgctgaagagccagatatgcgacaatgctgctctttatgcacagaaatacgatgaagagtttcagaggtacctgccgagattcgtgaccgccatttggaatctgttagtaaccactgggcaagaagtcaagtatgatctattagtgagtaacgccatccagttcttggcctccgtgtgcgagcggcctcactataaaaacctgttcgaagaccagaatacactgacaagcatttgcgagaagagtatcgtcgtgcacacttacgccgctcacgctctcgagcgactgtttaccatgagaggccctaataatgcgactctatttaccgccgctgagatagcacctttcgtggagatcctcctgacgaatttgttcaaagccctgaccttacctggctcaagcgagaacgaatacataatgaaagccattatgcggtcgttctctctcctgcaggaagcaataatcccatacatccctacactgatcacccagttaactcagaagctactcgctgtgtcaaaaaatcccagtaagccgcattttaaccattatatgttcgaggctatctgcttgtcaattcgaatcacttgtaaggcaaacccggctgcagtggttaactttgaagaggccctcttcctcgtttttactgagatcctgcagaacgacgtccaagagttcattccttacgtgttccaagtcatgagcctcttactggagacacataagaacgacattccaagctcttacatggcactgttcccccacctgctgcagcctgtcttgtgggagcggacagggaacatcccagcattagtgagactactacaagctttcctggagcggggtagcaacacaattgcctccgcagctgccgataaaatccccggattactgggtgtgttccaaaagctgattgcttctaaggccaacgaccaccagggtttctacctacttaactccattattgagcatatgccacccgagagcgttgaccagtacaggaagcagatcttcattttactgtttcagcgtttgcagaactcgaagaccacgaagttcattaaatcctttctggttttcataaatctctattgtatcaagtacggggctctcgcactgcaagagatcttcgatggcattcagcccaagatgtttgggatggttctcgagaagatcataatccctgaaatccaaaaagttagcggaaacgtggagaagaagatttgcgccgtcggaataacaaagctgctcacggaatgtcccccaatgatggataccgagtatacaaagctttggacaccgttgctgcagtcactcatcggtcttttcgaactgccggaggatgatacaattcccgacgaagagcacttcatcgacattgaggacaccccagggtatcagacagcattttcgcaactagctttcgcaggcaaaaaggaacacgacccagttggacagatggtcaacaaccccaagatccacctcgcccagtcattgcacaagttgtctactgcctgtccaggacgcgtgcccagcatggtttcaacgtctctgaatgcagaggccctacagtacctccagggctatctgcaagccgcaagtgtgactttgctctag

SEQ ID NO: 89718 - DNA, 2749 bp, Artificial Sequence
  derived and/or modified sequence
atggaactcagcgatgcaaatctgcaaacactaacagaatatttaaagaaaacacttgatcctgatcctgccatccgacgtccagctgagaaatttcttgaatctgttgaaggaaatcagaattatccactgttgcttttgacattactggagaagtcccaggataatgttatcaaagtatgtgcttcagtaacattcaaaaactatattaaaaggaactggagaattgttgaagatgaaccaaacaaaatttgtgaagccgatcgagtggccattaaagccaacatagtgcacttgatgcttagcagcccagagcaaattcagaagcagttaagtgatgcaattagcattattggcagagaagattttccacagaaatggcctgacttgctgacagaaatggtgaatcgctttcagagtggagatttccatgttattaatggagtcctccgtacagcacattcattatttaaaagataccgtcatgaatttaagtcaaacgagttatggactgaaattaagcttgttctggatgcctttgctttgcctttgactaatctttttaaggccactattgaactctgcagtacccatgcaaatgatgcctctgccctgaggattctgttttcttccctgatcctgatctcaaaattgttctatagtttaaactttcaggatctccctgaattttttgaagataatatggaaacttggatgaataattttcatactctcttaacattggataataagcttttacaaactgatttggtaagtaatgcaattcaatttctggcttcagtttgtgagagacctcattataagaatctatttgaggaccagaacacgctgacaagtatctgtgaaaaggttattgtgcctaacatggaatttagagctgctgatgaagaagcatttgaagataattctgaggagtacataaggagagatttggaaggatctgatattgatactagacgcagggctgcttgtgatctggtacgaggattatgcaagttttttgagggacctgtgacaggaatcttctctggttatgttaattccatgctgcaggaatacgcaaaaaatccatctgtcaactggaaacacaaagatgcagccatctacctagtgacatctttggcatcaaaagcccaaacacagaagcatggaattacacaagcaaatgaacttgtaaacctaactgagttctttgtgaatcacatcctccctgatttaaaatcagctaatgtgaatgaatttcctgtccttaaagctgacggtatcaaatatattatgatttttagaaatcaagtgccaaaagaacatcttttagtctcgattcctctcttgattaatcatcttcaagctgaaagtattgttgttcatacttacgcagctcatgctcttgaacggctctttactatgcgagggcctaacaatgccactctctttacagctgcagaaatcgcaccgtttgttgagattctgctaacaaaccttttcaaagctctcacacttcctggctcttcagaaaatgaatatattatgaaagctatcatgagaagtttttctctcctacaagaagccataatcccctacatccctactctcatcactcagcttacacagaagctattagctgttagtaagaacccaagcaaacctcactttaatcactacatgtttgaagcaatatgtttatccataagaataacttgcaaagctaaccctgctgctgttgtaaattttgaggaggctttgtttttggtgtttactgaaatcttacaaaatgatgtgcaagaatttattccatacgtctttcaagtgatgtctttgcttctggaaacacacaaaaatgacatcccgtcttcctatatggccttatttcctcatctccttcagccagtgctttgggaaagaacaggaaatattcctgctctagtgaggcttcttcaagcattcttagaacgcggttcaaacacaatagcaagtgctgcagctgacaaaattcctgggttactaggtgtctttcagaagctgattgcatccaaagcaaatgaccaccaaggtttttatcttctaaacagtataatagagcacatgcctcctgaatcagttgaccaatataggaaacaaatcttcattctgctattccagagacttcagaattccaaaacaaccaagtttatcaagagttttttagtctttattaatttgtattgcataaaatatggggcactagcactacaagaaatatttgatggtatacaaccaaaaatgtttggaatggttttggaaaaaattattattcctgaaattcagaaggtatctggaaatgtagagaaaaagatctgtgcggttggcataaccaaattactaacagaatgtcccccaatgatggacactgagtataccaaactgtggactccattattacagtctttgattggtctttttgagttacccgaagatgataccattcctgatgaggaacattttattgacatagaagatacaccaggatatcagactgccttctcacagttggcatttgctgggaaaaaagagcatgatcctgtaggtcaaatggtgaataaccccaaaattcacctggcacagtcacttcacaagttgtctaccgcctgtccaggaagggttccatcaatggtgagcaccagcctgaatgcagaagcgctccagtatctccaagggtaccttcaggcagccagtgtgacactgctttaaa

SEQ ID NO: 89719 - DNA, 3055 bp, Artificial Sequence
  derived and/or modified sequence
tcaggctcgctgtcgcgccattttgccggggtttgaatgtgaggcggagcggcggcaggagcgggtagtgccagctacggtccgcggctggggttccctcctccgtttctgtatccccacgagatcctatagcaatggaactcagcgatgcaaatctgcaaacactaacagaatatttaaagaaaacacttgatcctgatcctgccatccgacgtccagctgagaaatttcttgaatctgttgaaggaaatcagaattatccactgttgcttttgacattactggagaagtcccaggataatgttatcaaagtatgtgcttcagtaacattcaaaaactatattaaaaggaactggagaattgttgaagatgaaccaaacaaaatttgtgaagccgatcgagtggccattaaagccaacatagtgcacttgatgcttagcagcccagagcaaattcagaagcagttaagtgatgcaattagcattattggcagagaagattttccacagaaatggcctgacttgctgacagaaatggtgaatcgctttcagagtggagatttccatgttattaatggagtcctccgtacagcacattcattatttaaaagataccgtcatgaatttaagtcaaacgagttatggactgaaattaagcttgttctggatgcctttgctttgcctttgactaatctttttaaggccactattgaactctgcagtacccatgcaaatgatgcctctgccctgaggattctgttttcttccctgatcctgatctcaaaattgttctatagtttaaactttcaggatctccctgaattttttgaagataatatggaaacttggatgaataattttcatactctcttaacattggataataagcttttacaaactgatgatgaagaggaagccggcttattggagctcttaaaatcccagatttgtgataatgccgcactctatgcacaaaagtacgatgaagaattccagcgatacctgcctcgttttgttacagccatctggaatttactagttacaacgggtcaagaggttaaatatgatttgttggtaagtaatgcaattcaatttctggcttcagtttgtgagagacctcattataagaatctatttgaggaccagaacacgctgacaagtatctgtgaaaagagtattgttgttcatacttacgcagctcatgctcttgaacggctctttactatgcgagggcctaacaatgccactctctttacagctgcagaaatcgcaccgtttgttgagattctgctaacaaaccttttcaaagctctcacacttcctggctcttcagaaaatgaatatattatgaaagctatcatgagaagtttttctctcctacaagaagccataatcccctacatccctactctcatcactcagcttacacagaagctattagctgttagtaagaacccaagcaaacctcactttaatcactacatgtttgaagcaatatgtttatccataagaataacttgcaaagctaaccctgctgctgttgtaaattttgaggaggctttgtttttggtgtttactgaaatcttacaaaatgatgtgcaagaatttattccatacgtctttcaagtgatgtctttgcttctggaaacacacaaaaatgacatcccgtcttcctatatggccttatttcctcatctccttcagccagtgctttgggaaagaacaggaaatattcctgctctagtgaggcttcttcaagcattcttagaacgcggttcaaacacaatagcaagtgctgcagctgacaaaattcctgggttactaggtgtctttcagaagctgattgcatccaaagcaaatgaccaccaaggtttttatcttctaaacagtataatagagcacatgcctcctgaatcagttgaccaatataggaaacaaatcttcattctgctattccagagacttcagaattccaaaacaaccaagtttatcaagagttttttagtctttattaatttgtattgcataaaatatggggcactagcactacaagaaatatttgatggtatacaaccaaaaatgtttggaatggttttggaaaaaattattattcctgaaattcagaaggtatctggaaatgtagagaaaaagatctgtgcggttggcataaccaaattactaacagaatgtcccccaatgatggacactgagtataccaaactgtggactccattattacagtctttgattggtctttttgagttacccgaagatgataccattcctgatgaggaacattttattgacatagaagatacaccaggatatcagactgccttctcacagttggcatttgctgggaaaaaagagcatgatcctgtaggtcaaatggtgaataaccccaaaattcacctggcacagtcacttcacaagttgtctaccgcctgtccaggaagggttccatcaatggtgagcaccagcctgaatgcagaagcgctccagtatctccaagggtaccttcaggcagccagtgtgacactgctttaaactgcatttttctaatgggctaaacccagatggtttcctaggaaatcacaggcttctgagcacagctgcattaaaacaaaggaagttctccttttgaacttgtcacgaattccatcttgtaaaggatattaaatgttgctttaacctgaaccttgagcaaattagttggtttgtgtgatcatacagttatgtgggtggcttctagtttgcaacttcaagggacaagtattaatagttcagtgtatggcgttggtttgtgttgagcgtttgcacggtttggataatcttaaattttgacggacactgtggagactttctgttactaaatccttttgttttgaagctgttgctatttgtatttctcttgtcctttatattttttgtctgtttatttacgcttttattggaaatgtgaataagtaaagaattacttgtgttacttgccaagcagtgcacatttcatagtttcaaatctgtaatcagcaataaaaatcctaaaatatgtacct

SEQ ID NO: 89720 - DNA, 2748 bp, Artificial Sequence
  derived and/or modified sequence
atggagctgagcgacgccaacctgcagaccctgaccgagtacctgaagaagaccctggaccccgaccccgccatcagaagacccgccgagaagttcctggagagcgtggagggcaaccagaactaccccctgctgctgctgaccctgctggagaagagccaggacaacgtgatcaaggtgtgcgccagcgtgaccttcaagaactacatcaagagaaactggagaatcgtggaggacgagcccaacaagatctgcgaggccgacagagtggccatcaaggccaacatcgtgcacctgatgctgagcagccccgagcagatccagaagcagctgagcgacgccatcagcatcatcggcagagaggacttcccccagaagtggcccgacctgctgaccgagatggtgaacagattccagagcggcgacttccacgtgatcaacggcgtgctgagaaccgcccacagcctgttcaagagatacagacacgagttcaagagcaacgagctgtggaccgagatcaagctggtgctggacgccttcgccctgcccctgaccaacctgttcaaggccaccatcgagctgtgcagcacccacgccaacgacgccagcgccctgagaatcctgttcagcagcctgatcctgatcagcaagctgttctacagcctgaacttccaggacctgcccgagttcttcgaggacaacatggagacctggatgaacaacttccacaccctgctgaccctggacaacaagctgctgcagaccgacctggtgagcaacgccatccagttcctggccagcgtgtgcgagagaccccactacaagaacctgttcgaggaccagaacaccctgaccagcatctgcgagaaggtgatcgtgcccaacatggagttcagagccgccgacgaggaggccttcgaggacaacagcgaggagtacatcagaagagacctggagggcagcgacatcgacaccagaagaagagccgcctgcgacctggtgagaggcctgtgcaagttcttcgagggccccgtgaccggcatcttcagcggctacgtgaacagcatgctgcaggagtacgccaagaaccccagcgtgaactggaagcacaaggacgccgccatctacctggtgaccagcctggccagcaaggcccagacccagaagcacggcatcacccaggccaacgagctggtgaacctgaccgagttcttcgtgaaccacatcctgcccgacctgaagagcgccaacgtgaacgagttccccgtgctgaaggccgacggcatcaagtacatcatgatcttcagaaaccaggtgcccaaggagcacctgctggtgagcatccccctgctgatcaaccacctgcaggccgagagcatcgtggtgcacacctacgccgcccacgccctggagagactgttcaccatgagaggccccaacaacgccaccctgttcaccgccgccgagatcgcccccttcgtggagatcctgctgaccaacctgttcaaggccctgaccctgcccggcagcagcgagaacgagtacatcatgaaggccatcatgagaagcttcagcctgctgcaggaggccatcatcccctacatccccaccctgatcacccagctgacccagaagctgctggccgtgagcaagaaccccagcaagccccacttcaaccactacatgttcgaggccatctgcctgagcatcagaatcacctgcaaggccaaccccgccgccgtggtgaacttcgaggaggccctgttcctggtgttcaccgagatcctgcagaacgacgtgcaggagttcatcccctacgtgttccaggtgatgagcctgctgctggagacccacaagaacgacatccccagcagctacatggccctgttcccccacctgctgcagcccgtgctgtgggagagaaccggcaacatccccgccctggtgagactgctgcaggccttcctggagagaggcagcaacaccatcgccagcgccgccgccgacaagatccccggcctgctgggcgtgttccagaagctgatcgccagcaaggccaacgaccaccagggcttctacctgctgaacagcatcatcgagcacatgccccccgagagcgtggaccagtacagaaagcagatcttcatcctgctgttccagagactgcagaacagcaagaccaccaagttcatcaagagcttcctggtgttcatcaacctgtactgcatcaagtacggcgccctggccctgcaggagatcttcgacggcatccagcccaagatgttcggcatggtgctggagaagatcatcatccccgagatccagaaggtgagcggcaacgtggagaagaagatctgcgccgtgggcatcaccaagctgctgaccgagtgcccccccatgatggacaccgagtacaccaagctgtggacccccctgctgcagagcctgatcggcctgttcgagctgcccgaggacgacaccatccccgacgaggagcacttcatcgacatcgaggacacccccggctaccagaccgccttcagccagctggccttcgccggcaagaaggagcacgaccccgtgggccagatggtgaacaaccccaagatccacctggcccagagcctgcacaagctgagcaccgcctgccccggcagagtgcccagcatggtgagcaccagcctgaacgccgaggccctgcagtacctgcagggctacctgcaggccgccagcgtgaccctgctgtag

SEQ ID NO: 89721 - DNA, 1710 bp, Artificial Sequence
  derived and/or modified sequence
atggagacctggatgaacaacttccacaccctgctgaccctggacaacaagctgctgcagaccgacgacgaggaggaggccggcctgctggagctgctgaagagccagatctgcgacaacgccgccctgtacgcccagaagtacgacgaggagttccagagatacctgcccagattcgtgaccgccatctggaacctgctggtgaccaccggccaggaggtgaagtacgacctgctggtgagcaacgccatccagttcctggccagcgtgtgcgagagaccccactacaagaacctgttcgaggaccagaacaccctgaccagcatctgcgagaagagcatcgtggtgcacacctacgccgcccacgccctggagagactgttcaccatgagaggccccaacaacgccaccctgttcaccgccgccgagatcgcccccttcgtggagatcctgctgaccaacctgttcaaggccctgaccctgcccggcagcagcgagaacgagtacatcatgaaggccatcatgagaagcttcagcctgctgcaggaggccatcatcccctacatccccaccctgatcacccagctgacccagaagctgctggccgtgagcaagaaccccagcaagccccacttcaaccactacatgttcgaggccatctgcctgagcatcagaatcacctgcaaggccaaccccgccgccgtggtgaacttcgaggaggccctgttcctggtgttcaccgagatcctgcagaacgacgtgcaggagttcatcccctacgtgttccaggtgatgagcctgctgctggagacccacaagaacgacatccccagcagctacatggccctgttcccccacctgctgcagcccgtgctgtgggagagaaccggcaacatccccgccctggtgagactgctgcaggccttcctggagagaggcagcaacaccatcgccagcgccgccgccgacaagatccccggcctgctgggcgtgttccagaagctgatcgccagcaaggccaacgaccaccagggcttctacctgctgaacagcatcatcgagcacatgccccccgagagcgtggaccagtacagaaagcagatcttcatcctgctgttccagagactgcagaacagcaagaccaccaagttcatcaagagcttcctggtgttcatcaacctgtactgcatcaagtacggcgccctggccctgcaggagatcttcgacggcatccagcccaagatgttcggcatggtgctggagaagatcatcatccccgagatccagaaggtgagcggcaacgtggagaagaagatctgcgccgtgggcatcaccaagctgctgaccgagtgcccccccatgatggacaccgagtacaccaagctgtggacccccctgctgcagagcctgatcggcctgttcgagctgcccgaggacgacaccatccccgacgaggagcacttcatcgacatcgaggacacccccggctaccagaccgccttcagccagctggccttcgccggcaagaaggagcacgaccccgtgggccagatggtgaacaaccccaagatccacctggcccagagcctgcacaagctgagcaccgcctgccccggcagagtgcccagcatggtgagcaccagcctgaacgccgaggccctgcagtacctgcagggctacctgcaggccgccagcgtgaccctgctgtag

SEQ ID NO: 89722 - protein, 333 aa, Artificial Sequence
  derived and/or modified sequence
MYTAIPQSGSPFPGSVQDPGLHVWRVEKLKPVPVAQENQGVFFSGDSYLVLHNGPEEVSHLHLWIGQQSSRDEQGACAVLAVHLNTLLGERPVQHREVQGNESDLFMSYFPRGLKYQEGGVESAFHKTSTGAPAAIKKLYQVKGKKNIRATERALNWDSFNTGDCFILDLGQNIFAWCGGKSNILERNKARDLALAIRDSERQGKAQVLGPKPALKEGNPEEDLTADKANAQAAALYKVSDATGQMNLTKVADSSPFALELLISDDCFVLDNGLCGKIYIWKGRKANEKERQAALQVAEGFISRMQYAPNTQVEILPQGHESPIFKQFFKDWK

SEQ ID NO: 89723 - DNA, 1002 bp, Artificial Sequence
  derived and/or modified sequence
atgtatacagccatcccacaatcaggtagtccttttcccgggtctgtgcaggaccctgggctgcacgtctggagagtcgagaaactaaaaccagtcccagtggctcaagagaaccagggtgtgttcttttccggagactcctacctggtcctccacaatggacccgaagaggtttctcatctgcatctgtggatcggccagcagtcgagtagagatgagcagggtgcgtgcgccgtgctggccgtgcatctgaatacactgctgggcgaaaggcccgtgcagcaccgagaagtacaagggaatgaatcagatttatttatgagttacttccccagaggattgaaataccaggagggaggcgtggagtcggccttccataaaaccagcaccggggcgccggctgctatcaagaagttgtatcaggtgaagggaaagaagaatatccgagctactgagcgggccttgaattgggatagttttaacaccggggactgcttcatacttgacctcggacagaacatattcgcctggtgtggaggtaaatctaacatactggaacgaaataaggcgcgtgacctagcattggccatcagggactctgagagacaggggaaggctcaggtcctcggaccaaaaccggctctcaaggagggcaatcccgaggaagacctcactgctgataaagccaatgcccaggcagccgccttatacaaagtgagcgacgccacaggccagatgaatttgactaaagtcgcggattcctctcccttcgctctcgagttgctgatttcagatgattgcttcgtactagacaacgggctctgcggaaagatctatatttggaagggtagaaaggccaatgagaaggaaagacaggctgctcttcaggttgccgaggggttcatctctagaatgcaatacgcgcctaatacacaggtcgaaatcttaccccagggccacgagagtcctatctttaaacagttcttcaaggattggaagtag

SEQ ID NO: 89724 - DNA, 1002 bp, Artificial Sequence
  derived and/or modified sequence
atgtacacagccatcccccagagcggcagccccttccctggctctgtgcaggaccccggcctgcacgtgtggagggtggagaagctgaagcctgtgcctgtggcccaggagaaccagggcgtcttcttcagcggggacagctacctggtgctgcacaatggacctgaggaggtgagccacctgcacctgtggattggccagcagagcagcagagatgagcagggcgcctgtgctgtgctggccgtgcacctgaacaccctgctgggggagaggcctgtgcagcaccgggaggtgcagggcaatgaaagtgacctcttcatgagctacttcccccggggcctgaagtaccaggagggcggcgtggagagcgccttccacaagaccagcactggagccccagctgccatcaagaagctgtaccaggtgaagggcaagaagaacatccgggccacagagcgggccctgaactgggacagcttcaacacaggagactgcttcatcctggacctgggccagaacatctttgcctggtgtggcggcaagagcaacatcctggagaggaacaaggcccgggacctggccctggccatccgggacagcgagcggcagggcaaggcccaggtgctgggccccaagccagccctgaaggagggcaaccctgaggaggacctgacagctgacaaggccaatgcccaggccgccgccctgtacaaggtgtctgatgccaccggccagatgaacctgaccaaggtggccgacagcagcccctttgccctggagctgctgatcagtgatgactgctttgtgctggacaatggcctgtgtgggaagatctacatctggaagggcaggaaggccaatgagaaggagcggcaggccgccctgcaggtggccgagggcttcatcagcaggatgcagtatgcccccaacacccaggtggagatcctgccccagggccacgagagccccatcttcaagcagttcttcaaggactggaagtag

SEQ ID NO: 89725 - DNA, 1002 bp, Artificial Sequence
  derived and/or modified sequence
atgtacaccgccatcccccagagcggcagccccttccccggcagcgtgcaggatcctggacttcacgtctggcgtgtggagaaactcaagccagtgcctgtagcacaggagaatcagggcgtgttcttttccggagactcctatctggtgcttcacaatggacccgaggaagtttctcatctgcacctttggattggccagcagtcgtcaagagatgaacagggagcttgcgccgttctggccgtccatctgaatactctgctgggggaaaggccggtacagcatcgtgaagtacagggcaatgaaagcgatctctttatgtcctacttcccacgtgggctgaaataccaggagggcggcgtagagagcgcctttcataaaacctcaaccggcgcacccgccgctatcaaaaagttgtaccaggtaaagggaaaaaaaaatatccgggccaccgaaagggccctgaattgggactcctttaacactggggactgttttattctcgacctgggacagaatatctttgcctggtgtggcggaaagagcaacattctggagcggaataaggcgcgcgacctggcattggccattcgtgattctgagcgccagggaaaggcccaagtcctcggtcctaaaccggcgctgaaagaagggaaccccgaagaggatctgaccgccgacaaagcaaatgcccaggccgcggccttatataaagtcagcgacgctaccggccagatgaacttgaccaaagtggccgattcatctcccttcgccctcgaactcttgattagcgacgactgctttgtgctggacaatggcttgtgtggtaaaatctacatttggaaagggcgaaaggctaacgaaaaagagcgccaggctgcattgcaggtggccgaggggtttattagcaggatgcagtacgcacctaacacccaggtggagattttgccgcagggacatgagtccccgattttcaagcagttcttcaaggactggaagtag

SEQ ID NO: 89726 - DNA, 1002 bp, Artificial Sequence
  derived and/or modified sequence
atgtacacagctattccgcagtcgggctctcccttccccggatccgtacaggaccctgggctgcacgtctggcgggtggaaaagctgaaaccagtgcccgtggctcaagaaaaccaaggggtcttcttttctggcgacagttatctcgtgttacataatggtcccgaggaagtatcccatctgcatctgtggatcggacagcagagcagccgggatgaacaaggtgcatgtgcagttctggcggtacatttgaacaccctcctaggcgaacgccctgtgcagcatcgggaggtgcaaggcaatgagtcagatctcttcatgagctattttccgaggggtctcaaatatcaggaaggtggtgtcgagtcagcgttccataagacatccacaggtgcacccgcagctattaagaaactgtatcaggtgaagggcaagaaaaacatccgagccactgagcgggctctgaattgggacagcttcaacacgggggattgcttcatactcgatcttgggcagaacattttcgcttggtgtggaggcaagagtaacatactggagcggaacaaggcacgcgatctggccctagcaatcagggacagtgagagacagggcaaggctcaagttctcggtcctaagccagcacttaaggaaggcaatcccgaagaggatctcactgctgataaagccaatgcccaggccgcagccctctacaaagtgagtgacgcaactggacagatgaatcttactaaggttgcagactcctcaccctttgccctggaactgttgattagcgatgactgtttcgtactggacaacgggttgtgtggaaaaatatacatatggaaagggaggaaagccaacgagaaagagcgacaggccgcacttcaagtggcagagggcttcatctctcgaatgcaatacgcgcctaatacacaggttgaaatactaccccaggggcacgagtcaccgattttcaaacagttttttaaggattggaaatag

SEQ ID NO: 89727 - DNA, 1195 bp, Artificial Sequence
  derived and/or modified sequence
aagtgagaagccgggtggggcaggctggaaggaagacgaacctacgaagcagagatctgaagacagcatgtacacagccattccccagagtggctctccattcccaggctcagtgcaggatccaggcctgcatgtgtggcgggtggagaagctgaagccggtgcctgtggcgcaagagaaccagggcgtcttcttctcgggggactcctacctagtgctgcacaatggcccagaagaggtttcccatctgcacctgtggataggccagcagtcatcccgggatgagcagggggcctgtgccgtgctggctgtgcacctcaacacgctgctgggagagcggcctgtgcagcaccgcgaggtgcagggcaatgagtctgacctcttcatgagctacttcccacggggcctcaagtaccaggaaggtggtgtggagtcagcatttcacaagacctccacaggagccccagctgccatcaagaaactctaccaggtgaaggggaagaagaacatccgtgccaccgagcgggcactgaactgggacagcttcaacactggggactgcttcatcctggacctgggccagaacatcttcgcctggtgtggtggaaagtccaacatcctggaacgcaacaaggcgagggacctggccctggccatccgggacagtgagcgacagggcaaggcccaggtcctgggccccaagcctgctctgaaggagggcaaccctgaggaagacctcacagctgacaaggcaaatgcccaggccgcagctctgtataaggtctctgatgccactggacagatgaacctgaccaaggtggctgactccagcccatttgcccttgaactgctgatatctgatgactgctttgtgctggacaacgggctctgtggcaagatctatatctggaaggggcgaaaagcgaatgagaaggagcggcaggcagccctgcaggtggccgagggcttcatctcgcgcatgcagtacgccccgaacactcaggtggagattctgcctcagggccatgagagtcccatcttcaagcaatttttcaaggactggaaatgagggtgggcgtcttcctgccccatgctcccctgccccccaccacctgcctgcttgcttctctggctgcctggtcagtgcagaggtgccccctgcagatgttcaataaaggagacaagtgctttccca

SEQ ID NO: 89728 - DNA, 1002 bp, Artificial Sequence
  derived and/or modified sequence
atgtacaccgccatcccccagagcggcagccccttccccggcagcgtgcaggaccccggcctgcacgtgtggagagtggagaagctgaagcccgtgcccgtggcccaggagaaccagggcgtgttcttcagcggcgacagctacctggtgctgcacaacggccccgaggaggtgagccacctgcacctgtggatcggccagcagagcagcagagacgagcagggcgcctgcgccgtgctggccgtgcacctgaacaccctgctgggcgagagacccgtgcagcacagagaggtgcagggcaacgagagcgacctgttcatgagctacttccccagaggcctgaagtaccaggagggcggcgtggagagcgccttccacaagaccagcaccggcgcccccgccgccatcaagaagctgtaccaggtgaagggcaagaagaacatcagagccaccgagagagccctgaactgggacagcttcaacaccggcgactgcttcatcctggacctgggccagaacatcttcgcctggtgcggcggcaagagcaacatcctggagagaaacaaggccagagacctggccctggccatcagagacagcgagagacagggcaaggcccaggtgctgggccccaagcccgccctgaaggagggcaaccccgaggaggacctgaccgccgacaaggccaacgcccaggccgccgccctgtacaaggtgagcgacgccaccggccagatgaacctgaccaaggtggccgacagcagccccttcgccctggagctgctgatcagcgacgactgcttcgtgctggacaacggcctgtgcggcaagatctacatctggaagggcagaaaggccaacgagaaggagagacaggccgccctgcaggtggccgagggcttcatcagcagaatgcagtacgcccccaacacccaggtggagatcctgccccagggccacgagagccccatcttcaagcagttcttcaaggactggaagtag

SEQ ID NO: 89729 - protein, 299 aa, Artificial Sequence
  derived and/or modified sequence
MVGKARSSNFTLSEKLDLLKLVKPYVKILEEHTNKHSVIVEKNRCWDIIAVNYNAIGVDRPPRTAQGLRTLYKRLKEYAKQELLQQKETQSDFKSNISEPTKKVMEMIPQISSFCLVRDRNHIQSANLDEEAQAGTSSLQVMLDHHPVAITVEVKQEEDIKPPPPLVLNSQQSDTLEQREEHELVHVMERSLSPSLSSVDMRMTSSPSSIPRRDDFFRHESGEHFRSLLGYDPQILQMLKEEHQIILENQKNFGLYVQEKRDGLKRRQQLEEELLRAKIEVEKLKAIRLRHDLPEYNSL

SEQ ID NO: 89730 - protein, 158 aa, Artificial Sequence
  derived and/or modified sequence
MLDHHPVAITVEVKQEEDIKPPPPLVLNSQQSDTLEQREEHELVHVMERSLSPSLSSVDMRMTSSPSSIPRRDDFFRHESGEHFRSLLGYDPQILQMLKEEHQIILENQKNFGLYVQEKRDGLKRRQQLEEELLRAKIEVEKLKAIRLRHDLPEYNSL

SEQ ID NO: 89731 - DNA, 900 bp, Artificial Sequence
  derived and/or modified sequence
atggtagggaaggcgcgctcatctaactttaccctctcagagaagctggacttgttgaaactagtaaagccctatgttaaaattctcgaggagcacacgaacaagcacagtgtcattgtggaaaagaatcgttgctgggacatcatcgccgtcaattacaatgctatcggcgtcgatcggcctcctcgaacggcccagggcctgaggacactgtacaagcggttgaaagagtacgccaagcaggagcttctgcagcagaaagagacccaaagcgacttcaaatcaaatattagcgaaccaaccaagaaggttatggagatgatcccccagatttcctcattctgcctggtgcgcgaccgcaaccatatccagtctgcgaacctggatgaagaagcgcaggccgggacatccagcctgcaggttatgctggaccaccaccccgtggctatcacagtggaagtgaaacaggaggaagatattaagccccctcctccactagtgctgaacagtcaacagagtgataccctggaacagcgggaagaacacgagctggtgcatgtgatggagagaagtctgagtccctccttgtcttcggtggatatgcgaatgacttccagcccttcgagtattccccggagggacgacttctttaggcatgaaagcggagaacattttaggtctcttctaggatacgaccctcaaattcttcaaatgctcaaagaagagcaccagatcatcctggagaaccaaaaaaatttcggactctatgtacaggaaaagagggacggtctgaaacggcgacagcagttagaagaagagctgctgagagcaaagattgaagtggagaaattaaaggccatcagactgagacacgatctcccggaatacaactctctgtag

SEQ ID NO: 89732 - DNA, 477 bp, Artificial Sequence
  derived and/or modified sequence
atgttggatcatcatcccgtggctattacggtggaggtgaaacaggaggaagacattaagcccccacccccactcgtcctgaacagtcagcagtctgacacacttgagcaaagggaggaacatgaattagtccacgtgatggagcgcagccttagtcctagcttgagttctgttgatatgaggatgacatcaagtcccagctcgatccctcgccgggatgatttcttccggcacgagtctggcgagcattttcgcagtctactaggttacgaccctcagattcttcagatgttgaaggaagagcaccagatcatactggaaaatcagaaaaacttcgggctctatgtgcaagagaagagagacggcctcaagaggcgccagcagctcgaggaagagctattgagagcaaagattgaagtcgaaaaactgaaggcaattcggctcagacatgatctgccagagtataacagcctgtag

SEQ ID NO: 89733 - DNA, 900 bp, Artificial Sequence
  derived and/or modified sequence
atggtgggcaaggcccggagcagcaacttcaccctgtctgagaagctggacctgctgaagctggtgaagccctacgtgaagatcctggaggagcacaccaacaagcacagcgtgattgtggagaagaaccgctgctgggacatcatcgctgtgaactacaatgccatcggcgtggacaggcctcccaggacagcccagggcctgcggaccctgtacaagaggctgaaggagtatgccaagcaggagctgctgcagcagaaggagacccagagcgacttcaagagcaacatcagcgagcccaccaagaaggtgatggagatgatcccccagatcagcagcttctgcctggtgcgggacaggaaccacatccagagcgccaacctggatgaggaggcccaggccggcaccagcagcctgcaggtgatgctggaccaccaccctgtggccatcaccgtggaggtgaagcaggaggaggacatcaagcccccaccacccctggtgctgaacagccagcagagcgacaccctggagcagcgggaggagcacgagctggtgcacgtgatggagaggagcctgagccccagcctgagctctgtggacatgaggatgaccagcagccccagcagcatccccaggagagatgacttcttcagacatgaaagtggagagcacttccgcagcctgctgggctatgacccccagatcctgcagatgctgaaggaggagcaccagatcatcctggagaaccagaagaactttggcctgtatgtgcaggagaagagagatggcctgaagaggcggcagcagctggaggaggagctgctgcgggccaagattgaggtggagaagctgaaggccatccggctgcggcatgacctgcctgagtacaacagcctgtag

SEQ ID NO: 89734 - DNA, 477 bp, Artificial Sequence
  derived and/or modified sequence
atgctggaccaccaccctgtggccatcaccgtggaggtgaagcaggaggaggacatcaagcccccaccacccctggtgctgaacagccagcagagcgacaccctggagcagcgggaggagcacgagctggtgcacgtgatggagaggagcctgagccccagcctgagctctgtggacatgaggatgaccagcagccccagcagcatccccaggagagatgacttcttcagacatgagagcggggagcacttccgcagcctgctgggctatgacccccagatcctgcagatgctgaaggaggagcaccagatcatcctggagaaccagaagaactttggcctgtatgtgcaggagaagagagatggcctgaagaggcggcagcagctggaggaggagctgctgcgggccaagattgaggtggagaagctgaaggccatccggctgcggcatgacctgcctgagtacaacagcctgtag

SEQ ID NO: 89735 - DNA, 900 bp, Artificial Sequence
  derived and/or modified sequence
atggtgggcaaggcccggagcagcaacttcaccctgagcgagaagctggatctgctcaaattggtcaaaccatacgtgaagatcctcgaggagcacacaaataagcacagcgtgatcgtcgaaaaaaatcgctgctgggacattatcgctgtgaattacaatgctataggggtggatcggccccccagaacagctcaagggctacggacgctatacaagaggctcaaagagtacgccaagcaagaactgctgcagcagaaagagacccagtctgatttcaaaagtaacatcagtgaaccaactaagaaggtgatggagatgattccacagataagctctttctgcctggtgagggacaggaaccacatccagagcgctaatctggatgaggaggcacaggcgggtaccagctcgctccaagtaatgctggaccatcatcccgtcgcgatcaccgtagaggtgaagcaggaagaagacataaagcctcccccccctctggttctcaacagccagcagtccgacaccctggaacagcgtgaggaacacgagctcgtacatgtcatggaaagatcccttagcccatcacttagctcagttgacatgagaatgactagcagcccgagtagcattccgaggagagatgacttctttcgtcatgagtctggagagcacttccggagcctgctgggctatgatcctcagattctgcagatgctcaaagaagaacaccagataatcctggagaaccagaagaatttcggtctatatgtgcaggaaaagcgcgacggactgaagcggagacagcaattagaagaggaactgctgagggcaaaaattgaagtggagaagttgaaggctataagacttaggcacgatctgccggaatacaattcattgtag

SEQ ID NO: 89736 - DNA, 477 bp, Artificial Sequence
  derived and/or modified sequence
atgctggaccaccaccccgtggccatcaccgtggaggtgaagcaggaagaggatatcaagccaccaccccccttggtgcttaacagccagcagagtgacacactggaacaacgagaggagcatgaactggtgcacgtgatggaacggagtctaagcccaagtttgtcaagcgtggatatgcggatgacatcatcccctagttccattccccgccgcgacgatttcttccgacatgagtccggggagcacttccgcagcctgcttggctacgatccccagatcctgcagatgttgaaggaagaacaccagattattttagaaaaccaaaagaacttcggcttatatgtgcaggagaaacgagacggactcaagcgtcgacaacagctggaagaggaactgttaagagccaaaattgaggtggagaaattaaaagctattcgcctcaggcatgatctcccagaatataactccctatag

SEQ ID NO: 89737 - DNA, 900 bp, Artificial Sequence
  derived and/or modified sequence
atggtgggcaaagccaggtcatccaatttcacgttgtccgaaaagctcgatctgctaaaactggtcaaaccctatgtgaagatcctggaggagcacaccaataagcattctgtgatagtggaaaaaaatagatgctgggacattatcgccgttaactacaacgcaattggagtggatagaccccctaggaccgcccagggtctgagaacactatacaaaagactcaaggagtacgcgaagcaggagctgttgcagcaaaaggagacacagtcagattttaaatccaacatctctgagccaaccaaaaaggtgatggagatgatcccccagatctcttcattctgcctagtacgggaccgtaaccacatccagtctgcaaatctggatgaggaggctcaagctgggacctcttcgctccaggtcatgttagatcatcacccagtcgctatcacggtcgaagtgaagcaggaagaggacatcaaaccaccccctcctctggtgctgaactcacagcagagcgacactttagagcagagagaagagcacgagcttgtacatgtcatggagcggtcattaagcccctcattaagtagtgtggatatgagaatgactagcagtccctccagtattcccagacgcgacgatttctttcgtcatgagtcgggggagcattttagaagcctccttgggtacgatcctcagatcctccagatgttaaaagaagagcatcagatcatcttggaaaaccaaaagaactttgggctttacgtccaagaaaaacgagacgggcttaagagaaggcaacaactggaagaggaactcttacgcgcaaagattgaggtggaaaaattgaaggcgattcggctcaggcacgacctcccggaatataattctctttag

SEQ ID NO: 89738 - DNA, 477 bp, Artificial Sequence
  derived and/or modified sequence
atgctggatcatcaccctgtggctattacagtagaagttaagcaggaggaagatatcaaaccacccccacccctggtgctaaattcccaacaatccgataccttagagcagagagaagaacacgagttggtgcacgtgatggaaaggagtctctcacctagtctgagctccgtggacatgaggatgacaagttctcccagctccatacctcggagagatgactttttcagacacgaaagtggagagcacttccggtctctgctgggctacgacccccagatcctgcagatgctcaaagaggagcatcagattatcctggaaaaccagaagaactttggtttgtatgtccaagagaagcgtgacggattaaagaggcgccaacagttggaggaagaactgctccgcgcaaagatagaggttgaaaagctcaaagccatccggctccggcacgaccttcctgagtataactctctctag

SEQ ID NO: 89739 - DNA, 1158 bp, Artificial Sequence
  derived and/or modified sequence
ttgtgaaaagagctgagcagagctgaaggctgcatggtggtttcagaaactgcctacttaatttgaaaagaacaatggtaggaaaggctagatcttccaattttaccttatccgaaaagcttgatttgctaaagcttgtgaagccatatgtgaaaattctcgaagaacacactaataaacattcagtaatagtagaaaagaatagatgttgggatatcatagcagttaactataatgcaattggagtagaccgccctcctcgaacagcacagggcctacgcaccctttataaaaggctcaaagaatatgccaaacaggagctattgcagcaaaaagagacccaatcagattttaaaagcaatatttctgagccaaccaagaaagttatggagatgattccccagatttccagtttttgcctggtaagagacaggaaccacatacaaagtgcaaacttggatgaggaggcacaggctggtaccagttcactacaggtaatgttggatcaccatcctgttgctattacagtggaggtgaagcaagaagaagacattaaaccacctcctccactggttttaaattctcaacagagtgatactttagagcaaagagaagaacatgaattagtacatgttatggaaagatccttgtcgccttcactttcctctgttgatatgagaatgacatcgtctccatcttctattccaaggagagatgatttttttcggcatgagagtggtgaacactttaggtcactattagggtatgatcctcagatcctgcaaatgttgaaagaggagcatcagataattttagaaaatcaaaaaaattttggattgtatgttcaggagaagagggatggattgaaaagaaggcagcagctagaggaagagctactaagagcaaaaattgaagtggagaagctgaaagcaattcgcttacggcatgatctacctgaatataacagtctctaagtttttttttcaatcttgcaatttgataattttgattttggccaaattactttaatttgggaatatcctgaaacagaatacacgttcttgaaaaatgttgttaatctctattatggaaaaactttttagatataattttctaattattttcttttgagatattaaaatttactggttggttggc

SEQ ID NO: 89740 - DNA, 1879 bp, Artificial Sequence
  derived and/or modified sequence
ggatagctggttaccagaaggacttctttgcagggccagtggtttctgtcagattttcgccggtcacgactgctgaatatgagacgatctgcagcaccaagtcagttgcaggggaattccttcaaaaaaccaaaatttatacctccaggaagaagtaatccaggtctgaatgaagagattacaaaactgaatccagatataaaattatttgagggtgttgcaattaataacacctttctcccgtcacaaaatgatcttagaatatgcagtttaaatctgcctagtgaagaaagtactagagaaatcaataacagagataattgcagtggaaaatattgttttgaagcacctacactggcaacattagatccacctcatacagtgcaaacttggatgaggaggcacaggctggtaccagttcactacaggtaatgttggatcaccatcctgttgctattacagtggaggtgaagcaagaagaagacattaaaccacctcctccactggttttaaattctcaacagagtgatactttagagcaaagagaagaacatgaattagtacatgttatggaaagatccttgtcgccttcactttcctctgttgatatgagaatgacatcgtctccatcttctattccaaggagagatgatttttttcggcatgagagtggtgaacactttaggtcactattagggtatgatcctcagatcctgcaaatgttgaaagaggagcatcagataattttagaaaatcaaaaaaattttggattgtatgttcaggagaagagggatggattgaaaagaaggcagcagctagaggaagagctactaagagcaaaaattgaagtggagaagctgaaagcaattcgcttacggcatgatctacctgaatataacagtctctaagtttttttttcaatcttgcaatttgataattttgattttggccaaattactttaatttgggaatatcctgaaacagaatacacgttcttgaaaaatgttgttaatctctattatggaaaaactttttagatataattttctaattattttcttttgagatattaaaatttactggttggttggcatggttatagtttttattgtcttcttttttttttccctaagtttaattgttgaccttacaaaagatattttattctgatcactaagatatacacaaatgcatatacaaacacatattctttcaaagttctgagtcttcaacatttttagttagaactttgaaagctataattagagatttttaagtcagtctaatttaggagctatactaacctaataccaagaagcttgtctgtatgacattggtttttatgcttttatcttttgaaggagtaaatcctaggattttagagatggaagatatttggagaacactttttttccatctctgcagtttaggggtaatgaaacaggtccagggagaactcaatgacttacttagggtaacaaagctatttatggcagagcagagaccagcacttagtttttctttgtgtaatttccatcccgctattcgatagaagtaaatatccactaaaacattctctagatttaaatattagaagcatttctttcattaaaattgcctttaaagattgttaggttgtgaaatcaggataattacatcaattacccccattctctctctatttttgttccagcaaaatagataaggtattccattgaagctattatatattttggctgtgtgatttaaagacatgtcttaattcattttgaatgtcctgttctggaaaaaatttctttcacagtaaaaatcagaatgaacaaaattaaaattttatgtattttataagtattgttattttagtattcatggaaataaa

SEQ ID NO: 89741 - DNA, 900 bp, Artificial Sequence
  derived and/or modified sequence
atggtgggcaaggccagaagcagcaacttcaccctgagcgagaagctggacctgctgaagctggtgaagccctacgtgaagatcctggaggagcacaccaacaagcacagcgtgatcgtggagaagaacagatgctgggacatcatcgccgtgaactacaacgccatcggcgtggacagaccccccagaaccgcccagggcctgagaaccctgtacaagagactgaaggagtacgccaagcaggagctgctgcagcagaaggagacccagagcgacttcaagagcaacatcagcgagcccaccaagaaggtgatggagatgatcccccagatcagcagcttctgcctggtgagagacagaaaccacatccagagcgccaacctggacgaggaggcccaggccggcaccagcagcctgcaggtgatgctggaccaccaccccgtggccatcaccgtggaggtgaagcaggaggaggacatcaagccccccccccccctggtgctgaacagccagcagagcgacaccctggagcagagagaggagcacgagctggtgcacgtgatggagagaagcctgagccccagcctgagcagcgtggacatgagaatgaccagcagccccagcagcatccccagaagagacgacttcttcagacacgagagcggcgagcacttcagaagcctgctgggctacgacccccagatcctgcagatgctgaaggaggagcaccagatcatcctggagaaccagaagaacttcggcctgtacgtgcaggagaagagagacggcctgaagagaagacagcagctggaggaggagctgctgagagccaagatcgaggtggagaagctgaaggccatcagactgagacacgacctgcccgagtacaacagcctgtag

SEQ ID NO: 89742 - DNA, 477 bp, Artificial Sequence
  derived and/or modified sequence
atgctggaccaccaccccgtggccatcaccgtggaggtgaagcaggaggaggacatcaagccccccccccccctggtgctgaacagccagcagagcgacaccctggagcagagagaggagcacgagctggtgcacgtgatggagagaagcctgagccccagcctgagcagcgtggacatgagaatgaccagcagccccagcagcatccccagaagagacgacttcttcagacacgagagcggcgagcacttcagaagcctgctgggctacgacccccagatcctgcagatgctgaaggaggagcaccagatcatcctggagaaccagaagaacttcggcctgtacgtgcaggagaagagagacggcctgaagagaagacagcagctggaggaggagctgctgagagccaagatcgaggtggagaagctgaaggccatcagactgagacacgacctgcccgagtacaacagcctgtag

SEQ ID NO: 89743 - protein, 617 aa, Artificial Sequence
  derived and/or modified sequence
MPSYTVTVATGSQWFAGTDDYIYLSLVGSAGCSEKHLLDKPFYNDFERGAVDSYDVTVDEELGEIQLVRIEKRKYWLNDDWYLKYITLKTPHGDYIEFPCYRWITGDVEVVLRDGRAKLARDDQIHILKQHRRKELETRQKQYRWMEWNPGFPLSIDAKCHKDLPRDIQFDSEKGVDFVLNYSKAMENLFINRFMHMFQSSWNDFADFEKIFVKISNTISERVMNHWQEDLMFGYQFLNGCNPVLIRRCTELPEKLPVTTEMVECSLERQLSLEQEVQQGNIFIVDFELLDGIDANKTDPCTLQFLAAPICLLYKNLANKIVPIAIQLNQIPGDENPIFLPSDAKYDWLLAKIWVRSSDFHVHQTITHLLRTHLVSEVFGIAMYRQLPAVHPIFKLLVAHVRFTIAINTKAREQLICECGLFDKANATGGGGHVQMVQRAMKDLTYASLCFPEAIKARGMESKEDIPYYFYRDDGLLVWEAIRTFTAEVVDIYYEGDQVVEEDPELQDFVNDVYVYGMRGRKSSGFPKSVKSREQLSEYLTVVIFTASAQHAAVNFGQLFLGMYPEEHFIEKPVKEAMARFRKNLEAIVSVIAERNKKKQLPYYYLSPDRIPNSVAI

SEQ ID NO: 89744 - DNA, 1854 bp, Artificial Sequence
  derived and/or modified sequence
atgcccagttataccgtgaccgtcgcaacagggtctcagtggttcgcggggaccgacgactatatatatctttcacttgttgggtccgctgggtgtagcgagaagcatcttctcgacaagcctttttacaacgatttcgaaaggggagccgttgactcttatgacgttacagtggacgaagaactcggggaaattcaattggtccgcattgagaagcgtaagtactggttaaacgatgattggtatctcaaatacatcaccttaaagaccccacatggagactacatcgaattcccctgctatagatggatcacgggggatgtggaggtcgtcctgcgagacggtcgggctaaacttgccagggatgaccagattcacattctcaagcaacacaggagaaaggaactggagactcgccagaagcagtaccggtggatggagtggaatcccggcttccctcttagtatcgatgcaaaatgccataaggacttaccacgggatattcagttcgactccgaaaaaggcgtagactttgtacttaactattccaaggcaatggagaatctatttatcaatcgattcatgcacatgttccagtcttcctggaatgatttcgcagactttgagaagatctttgtgaaaatctcaaatactatctctgaacgcgtcatgaaccattggcaagaggatcttatgtttgggtaccagttccttaacggctgcaaccctgtcctgatcagacgatgtaccgagctgcctgaaaagttacccgtgacaaccgagatggtcgagtgttcccttgaaaggcagttgagcctcgaacaggaggttcaacagggcaatatctttatcgtggatttcgaactgcttgacggcatcgacgccaacaagacggatccatgcacattgcagtttctggcggctccaatttgcctgctgtataaaaatcttgcaaataagattgtcccgattgccatccaactgaaccagattcccggagatgagaaccctatttttcttccttcagacgctaaatatgattggctcctcgcaaagatatgggtgcggtcctcggattttcatgtgcaccagaccataacacatctgttgcggacccatttggtcagtgaggtgtttggcattgccatgtatcgccagcttcccgctgtgcatcctatcttcaaattacttgttgctcacgtgagattcaccatcgctatcaatactaaggctcgcgaacagttaatctgtgagtgtggtttatttgacaaggccaacgccactggcggcggaggccacgtgcaaatggtccaaagagccatgaaggatctgacttacgccagcctgtgttttcctgaggccatcaaagcccggggaatggagtctaaggaagatataccctactatttctatcgggatgatggtctacttgtgtgggaggccatcagaaccttcaccgcggaagtggtggatatctactacgagggagaccaggtggtggaggaagacccagagctgcaggattttgtgaatgacgtgtatgtttacggcatgcgtggacgcaaaagcagcggtttccctaagagcgtgaagtcccgggagcaattatcagaatatctcacagtggtgattttcactgcctccgcccagcacgccgcggtgaacttcgggcagttgttcctggggatgtacccagaggagcattttattgaaaaacctgtcaaggaggcaatggcacggttcagaaagaacctcgaggcaattgtgtcagtgatcgccgagagaaataaaaaaaagcagctaccttattattacctctctccagatcggattccaaactccgtggcaatttag

SEQ ID NO: 89745 - DNA, 1854 bp, Artificial Sequence
  derived and/or modified sequence
atgcccagctacacagtgacagtggccaccggcagccagtggtttgctggaacagatgactacatctacctgagcctggtgggcagcgctggctgcagcgagaagcacctgctggacaagcccttctacaatgactttgaaagaggagctgtggacagctatgatgtgacagtggatgaggagctgggggagatccagctggtgcgcatcgagaagaggaagtactggctgaatgatgactggtacctgaagtacatcaccctgaagaccccccacggggactacatcgagttcccctgctaccgctggatcactggagatgtggaggtggtgctgagagatggccgggccaagctggccagagatgaccagatccacatcctgaagcagcacaggaggaaggagctggagacccggcagaagcagtaccgctggatggagtggaaccctggcttccccctgagcattgatgccaagtgccacaaggacctgccccgggacatccagtttgacagcgagaagggcgtggactttgtgctgaactacagcaaggccatggagaacctcttcatcaaccgcttcatgcacatgttccagagctcctggaatgactttgctgactttgagaagatctttgtgaagatcagcaacaccatcagcgagcgggtgatgaaccactggcaggaggacctgatgtttggctaccagttcctgaatggctgcaaccctgtgctgatccgccgctgcacagagctgcctgagaagctgcctgtgaccacagagatggtggagtgcagcctggagcggcagctgagcctggagcaggaggtgcagcagggcaacatcttcatcgtggactttgagctgctggatggcattgatgccaacaagacagacccctgcaccctgcagttcctggccgcccccatctgcctgctgtacaagaacctggccaacaagatcgtgcccatcgccatccagctgaaccagatccctggagatgagaaccccatcttcctgcccagtgatgccaagtatgactggctgctggccaagatctgggtgcgcagcagtgacttccacgtgcaccagaccatcacccacctgctgcggacccacctggtgtctgaggtgtttggaattgccatgtaccggcagctgcctgctgtgcaccccatcttcaagctgctggtggcccacgtgcgcttcaccatcgccatcaacaccaaggcccgggagcagctgatctgtgaatgtggcctgtttgacaaggccaatgccaccggcggcggcggccacgtgcagatggtgcagagggccatgaaggacctgacctacgccagcctgtgcttccctgaggccatcaaggcccggggcatggagagcaaggaggacatcccctactacttctacagagatgatggcctgctggtgtgggaggccatccgcaccttcaccgctgaggtggtggacatctactatgaaggagaccaggtggtggaggaggaccctgagctgcaggactttgtgaatgatgtgtatgtgtatggcatgaggggcaggaagagcagcggcttccccaagtctgtgaagagccgggagcagctgtctgagtacctgactgtggtgatcttcaccgccagcgcccagcacgccgctgtgaactttggccagctgttcctgggcatgtacccagaggagcacttcatcgagaagcctgtgaaggaggccatggcccgcttcaggaagaacctggaggccatcgtgtctgtgattgctgagaggaacaagaagaagcagctgccctactactacctgagcccagaccgcatccccaacagcgtggccatctag

SEQ ID NO: 89746 - DNA, 1854 bp, Artificial Sequence
  derived and/or modified sequence
atgcccagctacaccgtgaccgtggccaccggcagccagtggttcgctggcaccgatgactacatctacttgtcactggtcggcagcgctggatgcagtgaaaagcatctgcttgataagccattttacaacgatttcgagagaggtgccgtggatagctatgatgttaccgtggacgaggagctgggcgagatccagctggtccgcattgagaaacggaagtactggctcaatgacgactggtatctgaagtatatcacactcaagacgccccacggcgattatatcgagtttccctgttatagatggattaccggggacgtggaggtagtactccgcgatggtagggctaagctagcccgagacgatcaaatccatatcctgaaacagcaccgacgaaaggaattagagactagacagaaacagtatagatggatggagtggaatcccggcttccctttgtccatagacgctaagtgccacaaggatctgcctcgtgatatccagtttgattctgaaaaaggtgtcgatttcgtcctaaactactcaaaagccatggaaaacctctttatcaacaggttcatgcatatgtttcagtcctcctggaatgatttcgctgattttgagaaaatattcgtgaagattagcaacaccatttcggagagggtaatgaaccattggcaggaagacttgatgttcgggtaccagttccttaacggttgcaatcccgttctaattaggaggtgcactgaattgcccgagaagcttccagtgacaaccgagatggtggagtgctcacttgagcggcaactgtccctggagcaggaagtgcagcagggtaatatatttatagtggactttgaactgctggacggtattgatgccaacaagacagacccctgcacattgcagttcctcgcggcgcccatatgtttgctctacaagaatttagccaacaaaatcgtgcctatcgcaatccagctgaaccaaatacctggagacgagaacccaatattcttaccaagcgatgccaagtacgattggctgctagccaaaatctgggtgcggagttctgatttccacgtgcaccagaccattacacatttgctgagaacccaccttgtgagcgaggtttttggcatcgcaatgtatcgacagctcccagcagttcatccgatttttaagttactcgtggcccacgtgcggttcaccatcgccattaatactaaggctcgggaacagctgatatgtgaatgcggcctcttcgacaaagctaatgccacaggcggcggcggccatgtccagatggtccagagagctatgaaggatctgacatacgcttccctgtgctttcctgaggcaattaaggctcggggcatggaatctaaggaggatattccctattacttctaccgcgacgacggcttactggtctgggaagctattcgcaccttcacggcagaggtggtcgacatttattatgaaggagaccaggtggtggaggaagatcccgagctgcaggatttcgtgaatgatgtctacgtttacggtatgcgcggccggaagtccagtggttttcccaaatcagtgaagagtcgggagcagctgagtgaatatctcaccgtggttatttttacagcaagcgctcagcatgccgctgtgaatttcggccagctgtttttaggtatgtatccagaggagcacttcattgaaaagcctgtgaaggaagcaatggccaggttcagaaagaatttggaagcaattgtttccgtgatcgctgagcggaacaaaaagaagcagctcccctactattacctgtctccagaccgcatccctaacagtgtggcaatctag

SEQ ID NO: 89747 - DNA, 1854 bp, Artificial Sequence
  derived and/or modified sequence
atgccctcctacacagtgaccgtggctacaggttcacagtggtttgctggcacagacgactacatttacctctccttggtgggtagtgccggttgtagcgagaagcacctgctcgataagccattctataacgactttgaacgaggcgcagtcgacagttatgacgtcacagtagatgaagaactgggcgaaatacagttagttcgtattgaaaaacgcaaatactggttgaatgacgattggtacctaaagtacatcactcttaagacccctcatggcgattatattgaattcccttgctaccggtggataacaggagatgtcgaagtggtactgagagacggacgtgccaaactagctcgagacgaccaaatacacatcctgaagcagcatcgtagaaaagaattagagacaaggcagaaacagtatcggtggatggaatggaatcccggatttccactttcaatagacgctaagtgccacaaggacttgccacgggatatccagtttgactccgaaaaaggagtggatttcgttcttaattactcaaaggccatggaaaatctgttcatcaaccggttcatgcacatgttccaaagtagttggaatgattttgcagacttcgagaagatctttgtgaaaattagtaacacaatctccgagcgcgtcatgaaccactggcaggaagacctgatgttcggctaccaattcttgaacggttgcaaccctgtgctgatccggagatgtactgagttgccggagaaactcccagtgacgacagagatggtggagtgctccttggagaggcagctttcactcgagcaggaagtccagcagggcaacatatttattgtggatttcgaactgctcgacgggattgacgccaataagacagacccgtgcaccttacagttcctggccgctccaatctgtctactgtacaagaacctcgctaacaagatagttcccatagccatccaactgaaccagattcctggcgacgagaacccgatctttttaccttcggatgcaaaatacgattggctccttgctaagatctgggtgcggtccagtgattttcacgtacaccagactattacacacctcttgaggacccatttagttagtgaggtgttcggtattgcaatgtaccgacagctcccggctgttcatcccatcttcaagctgcttgtggcccacgtgaggtttacaatagctatcaatactaaagcaagggaacagttaatctgcgaatgtgggttgtttgataaggccaacgccaccggtggagggggacacgtgcagatggtacaaagagccatgaaagacctgacgtacgcaagtctgtgtttcccagaggcaattaaagcaaggggcatggagagcaaagaggacattccttattatttttatcgcgacgacggactgctcgtctgggaggcaatccgaaccttcactgcagaggtcgtggacatttactatgagggcgaccaggtcgttgaagaggatcccgagttgcaggattttgttaatgatgtctatgtctacggtatgagaggaagaaaatcatctggattcccgaaaagtgttaagtctagagagcaactgagtgagtatctgaccgtggtgatcttcaccgcaagcgcacaacacgccgcagtgaacttcgggcaactctttctgggtatgtatcctgaagaacattttatcgaaaaacctgtaaaggaagcgatggcccgatttagaaagaacctcgaggcaatcgtatctgtgatcgcagaacggaacaagaagaagcagttgccttattactatctttcgccggaccggataccaaacagcgtggccatctag

SEQ ID NO: 89748 - DNA, 2178 bp, Artificial Sequence
  derived and/or modified sequence
gctagatgcggacacctggaccgccgcgccgaggctcccggcgctcgctgctcccgcggcccgcgccatgccctcctacacggtcaccgtggccactggcagccagtggttcgccggcactgacgactacatctacctcagcctcgtgggctcggcgggctgcagcgagaagcacctgctggacaagcccttctacaacgacttcgagcgtggcgcggtggattcatacgacgtgactgtggacgaggaactgggcgagatccagctggtcagaatcgagaagcgcaagtactggctgaatgacgactggtacctgaagtacatcacgctgaagacgccccacggggactacatcgagttcccctgctaccgctggatcaccggcgatgtcgaggttgtcctgagggatggacgcgcaaagttggcccgagatgaccaaattcacattctcaagcaacaccgacgtaaagaactggaaacacggcaaaaacaatatcgatggatggagtggaaccctggcttccccttgagcatcgatgccaaatgccacaaggatttaccccgtgatatccagtttgatagtgaaaaaggagtggactttgttctgaattactccaaagcgatggagaacctgttcatcaaccgcttcatgcacatgttccagtcttcttggaatgacttcgccgactttgagaaaatctttgtcaagatcagcaacactatttctgagcgggtcatgaatcactggcaggaagacctgatgtttggctaccagttcctgaatggctgcaaccctgtgttgatccggcgctgcacagagctgcccgagaagctcccggtgaccacggagatggtagagtgcagcctggagcggcagctcagcttggagcaggaggtccagcaagggaacattttcatcgtggactttgagctgctggatggcatcgatgccaacaaaacagacccctgcacactccagttcctggccgctcccatctgcttgctgtataagaacctggccaacaagattgtccccattgccatccagctcaaccaaatcccgggagatgagaaccctattttcctcccttcggatgcaaaatacgactggcttttggccaaaatctgggtgcgttccagtgacttccacgtccaccagaccatcacccaccttctgcgaacacatctggtgtctgaggtttttggcattgcaatgtaccgccagctgcctgctgtgcaccccattttcaagctgctggtggcacacgtgagattcaccattgcaatcaacaccaaggcccgtgagcagctcatctgcgagtgtggcctctttgacaaggccaacgccacagggggcggtgggcacgtgcagatggtgcagagggccatgaaggacctgacctatgcctccctgtgctttcccgaggccatcaaggcccggggcatggagagcaaagaagacatcccctactacttctaccgggacgacgggctcctggtgtgggaagccatcaggacgttcacggccgaggtggtagacatctactacgagggcgaccaggtggtggaggaggacccggagctgcaggacttcgtgaacgatgtctacgtgtacggcatgcggggccgcaagtcctcaggcttccccaagtcggtcaagagccgggagcagctgtcggagtacctgaccgtggtgatcttcaccgcctccgcccagcacgccgcggtcaacttcggccagctgttcctgggcatgtacccagaagagcattttatcgagaagcctgtgaaggaagccatggcccgattccgcaagaacctcgaggccattgtcagcgtgattgctgagcgcaacaagaagaagcagctgccatattactacttgtccccagaccggattccgaacagtgtggccatctgagcacactgccagtctcactgtgggaaggccagctgccccagccagatggactccagcctgcctggcaggctgtctggccaggcctcttggcagtcacatctcttcctccgaggccagtacctttccatttattctttgatcttcagggaactgcatagattgatcaaagtgtaaacaccatagggacccattctacacagagcaggactgcacagcgtcctgtccacacccagctcagcatttccacaccaagcagc

SEQ ID NO: 89749 - DNA, 1854 bp, Artificial Sequence
  derived and/or modified sequence
atgcccagctacaccgtgaccgtggccaccggcagccagtggttcgccggcaccgacgactacatctacctgagcctggtgggcagcgccggctgcagcgagaagcacctgctggacaagcccttctacaacgacttcgagagaggcgccgtggacagctacgacgtgaccgtggacgaggagctgggcgagatccagctggtgagaatcgagaagagaaagtactggctgaacgacgactggtacctgaagtacatcaccctgaagaccccccacggcgactacatcgagttcccctgctacagatggatcaccggcgacgtggaggtggtgctgagagacggcagagccaagctggccagagacgaccagatccacatcctgaagcagcacagaagaaaggagctggagaccagacagaagcagtacagatggatggagtggaaccccggcttccccctgagcatcgacgccaagtgccacaaggacctgcccagagacatccagttcgacagcgagaagggcgtggacttcgtgctgaactacagcaaggccatggagaacctgttcatcaacagattcatgcacatgttccagagcagctggaacgacttcgccgacttcgagaagatcttcgtgaagatcagcaacaccatcagcgagagagtgatgaaccactggcaggaggacctgatgttcggctaccagttcctgaacggctgcaaccccgtgctgatcagaagatgcaccgagctgcccgagaagctgcccgtgaccaccgagatggtggagtgcagcctggagagacagctgagcctggagcaggaggtgcagcagggcaacatcttcatcgtggacttcgagctgctggacggcatcgacgccaacaagaccgacccctgcaccctgcagttcctggccgcccccatctgcctgctgtacaagaacctggccaacaagatcgtgcccatcgccatccagctgaaccagatccccggcgacgagaaccccatcttcctgcccagcgacgccaagtacgactggctgctggccaagatctgggtgagaagcagcgacttccacgtgcaccagaccatcacccacctgctgagaacccacctggtgagcgaggtgttcggcatcgccatgtacagacagctgcccgccgtgcaccccatcttcaagctgctggtggcccacgtgagattcaccatcgccatcaacaccaaggccagagagcagctgatctgcgagtgcggcctgttcgacaaggccaacgccaccggcggcggcggccacgtgcagatggtgcagagagccatgaaggacctgacctacgccagcctgtgcttccccgaggccatcaaggccagaggcatggagagcaaggaggacatcccctactacttctacagagacgacggcctgctggtgtgggaggccatcagaaccttcaccgccgaggtggtggacatctactacgagggcgaccaggtggtggaggaggaccccgagctgcaggacttcgtgaacgacgtgtacgtgtacggcatgagaggcagaaagagcagcggcttccccaagagcgtgaagagcagagagcagctgagcgagtacctgaccgtggtgatcttcaccgccagcgcccagcacgccgccgtgaacttcggccagctgttcctgggcatgtaccccgaggagcacttcatcgagaagcccgtgaaggaggccatggccagattcagaaagaacctggaggccatcgtgagcgtgatcgccgagagaaacaagaagaagcagctgccctactactacctgagccccgacagaatccccaacagcgtggccatctag

SEQ ID NO: 89750 - protein, 618 aa, Artificial Sequence
  derived and/or modified sequence
MHKTASQRLFPGPSYQNIKSIMEDSTILSDWTNSNKQKMKYDFSCELYRMSTYSTFPAGVPVSERSLARAGFYYTGVNDKVKCFCCGLMLDNWKLGDSPIQKHKQLYPSCSFIQNLVSASLGSTSKNTSPMRNSFAHSLSPTLEHSSLFSGSYSSLSPNPLNSRAVEDISSSRTNPYSYAMSTEEARFLTYHMWPLTFLSPSELARAGFYYIGPGDRVACFACGGKLSNWEPKDDAMSEHRRHFPNCPFLENSLETLRFSISNLSMQTHAARMRTFMYWPSSVPVQPEQLASAGFYYVGRNDDVKCFCCDGGLRCWESGDDPWVEHAKWFPRCEFLIRMKGQEFVDEIQGRYPHLLEQLLSTSDTTGEENADPPIIHFGPGESSSEDAVMMNTPVVKSALEMGFNRDLVKQTVQSKILTTGENYKTVNDIVSALLNAEDEKREEEKEKQAEEMASDDLSLIRKNRMALFQQLTCVLPILDNLLKANVINKQEHDIIKQKTQIPLQARELIDTILVKGNAAANIFKNCLKEIDSTLYKNLFVDKNMKYIPTEDVSGLSLEEQLRRLQEERTCKVCMDKEVSVVFIPCGHLVVCQECAPSLRKCPICRGIIKGTVRTFLS

SEQ ID NO: 89751 - protein, 597 aa, Artificial Sequence
  derived and/or modified sequence
MEDSTILSDWTNSNKQKMKYDFSCELYRMSTYSTFPAGVPVSERSLARAGFYYTGVNDKVKCFCCGLMLDNWKLGDSPIQKHKQLYPSCSFIQNLVSASLGSTSKNTSPMRNSFAHSLSPTLEHSSLFSGSYSSLSPNPLNSRAVEDISSSRTNPYSYAMSTEEARFLTYHMWPLTFLSPSELARAGFYYIGPGDRVACFACGGKLSNWEPKDDAMSEHRRHFPNCPFLENSLETLRFSISNLSMQTHAARMRTFMYWPSSVPVQPEQLASAGFYYVGRNDDVKCFCCDGGLRCWESGDDPWVEHAKWFPRCEFLIRMKGQEFVDEIQGRYPHLLEQLLSTSDTTGEENADPPIIHFGPGESSSEDAVMMNTPVVKSALEMGFNRDLVKQTVQSKILTTGENYKTVNDIVSALLNAEDEKREEEKEKQAEEMASDDLSLIRKNRMALFQQLTCVLPILDNLLKANVINKQEHDIIKQKTQIPLQARELIDTILVKGNAAANIFKNCLKEIDSTLYKNLFVDKNMKYIPTEDVSGLSLEEQLRRLQEERTCKVCMDKEVSVVFIPCGHLVVCQECAPSLRKCPICRGIIKGTVRTFLS

SEQ ID NO: 89752 - protein, 534 aa, Artificial Sequence [sequence omitted]

SEQ ID NO: 89753 - DNA, 1857 bp, Artificial Sequence
  derived and/or modified sequence
atgcacaagaccgccagccagagactgttccccggccccagctaccagaacatcaagagcatcatggaggacagcaccatcctgagcgactggaccaacagcaacaagcagaagatgaagtacgacttcagctgcgagctgtacagaatgagcacctacagcaccttccccgccggcgtgcccgtgagcgagagaagcctggccagagccggcttctactacaccggcgtgaacgacaaggtgaagtgcttctgctgcggcctgatgctggacaactggaagctgggcgacagccccatccagaagcacaagcagctgtaccccagctgcagcttcatccagaacctggtgagcgccagcctgggcagcaccagcaagaacaccagccccatgagaaacagcttcgcccacagcctgagccccaccctggagcacagcagcctgttcagcggcagctacagcagcctgagccccaaccccctgaacagcagagccgtggaggacatcagcagcagcagaaccaacccctacagctacgccatgagcaccgaggaggccagattcctgacctaccacatgtggcccctgaccttcctgagccccagcgagctggccagagccggcttctactacatcggccccggcgacagagtggcctgcttcgcctgcggcggcaagctgagcaactgggagcccaaggacgacgccatgagcgagcacagaagacacttccccaactgccccttcctggagaacagcctggagaccctgagattcagcatcagcaacctgagcatgcagacccacgccgccagaatgagaaccttcatgtactggcccagcagcgtgcccgtgcagcccgagcagctggccagcgccggcttctactacgtgggcagaaacgacgacgtgaagtgcttctgctgcgacggcggcctgagatgctgggagagcggcgacgacccctgggtggagcacgccaagtggttccccagatgcgagttcctgatcagaatgaagggccaggagttcgtggacgagatccagggcagatacccccacctgctggagcagctgctgagcaccagcgacaccaccggcgaggagaacgccgacccccccatcatccacttcggccccggcgagagcagcagcgaggacgccgtgatgatgaacacccccgtggtgaagagcgccctggagatgggcttcaacagagacctggtgaagcagaccgtgcagagcaagatcctgaccaccggcgagaactacaagaccgtgaacgacatcgtgagcgccctgctgaacgccgaggacgagaagagagaggaggagaaggagaagcaggccgaggagatggccagcgacgacctgagcctgatcagaaagaacagaatggccctgttccagcagctgacctgcgtgctgcccatcctggacaacctgctgaaggccaacgtgatcaacaagcaggagcacgacatcatcaagcagaagacccagatccccctgcaggccagagagctgatcgacaccatcctggtgaagggcaacgccgccgccaacatcttcaagaactgcctgaaggagatcgacagcaccctgtacaagaacctgttcgtggacaagaacatgaagtacatccccaccgaggacgtgagcggcctgagcctggaggagcagctgagaagactgcaggaggagagaacctgcaaggtgtgcatggacaaggaggtgagcgtggtgttcatcccctgcggccacctggtggtgtgccaggagtgcgcccccagcctgagaaagtgccccatctgcagaggcatcatcaagggcaccgtgagaaccttcctgagctag

SEQ ID NO: 89754 - DNA, 1857 bp, Artificial Sequence
  derived and/or modified sequence
atgcacaagactgctagccaacggctgttccccgggccaagctaccagaatattaagagcatcatggaagactcaacaatactctcagattggaccaactccaataaacagaagatgaagtacgatttctcatgtgagctttatcgaatgtcaacttattcaacgtttcctgccggcgtccctgtttctgagaggtctctggctcgggccggcttctactatactggggttaatgataaggtcaagtgcttctgctgcggcctcatgcttgataactggaaacttggtgattcgccaatacagaagcacaaacagctctatcctagctgctccttcatacagaatctcgtcagtgcctccctgggttcaacgagtaaaaacacctcgcctatgcggaattccttcgcccactctctctcccccacactggagcacagctcattattctcggggtcatactcaagcctatcccccaacccgctcaacagcagagctgtcgaggacatttcatctagccgtaccaatccctattcttacgctatgagcactgaggaggcgcggtttcttacctaccacatgtggcctcttacctttctgtccccttcagagctggcccgcgccgggttttactacattggcccaggagaccgcgtggcttgttttgcctgtggcgggaaactgtccaactgggaaccaaaggacgacgccatgtctgaacatcgtcgccactttcctaactgcccatttctggaaaatagcctggagacactcaggttcagcatttctaacctgtcaatgcagacacatgccgctagaatgcggaccttcatgtactggccctcatctgtgcccgtgcaacccgagcaactcgcttccgccgggttttattacgtcggccggaatgacgacgtgaaatgtttctgctgcgatgggggtctaaggtgctgggaaagcggagacgatccatgggtcgagcatgctaaatggttcccgcggtgcgaatttttgattcggatgaagggtcaggagtttgtcgacgaaatacaaggacgataccctcacttactcgagcagctgctgtccacctctgataccacgggtgaggaaaatgccgacccacccatcatccattttggcccaggggaatcgtcctccgaggacgcggtgatgatgaatactcctgtggtcaagagcgctctcgaaatgggatttaatagggacctggttaaacagacagtgcagtctaagattcttactacaggcgaaaactataagacggtgaatgacattgtgtccgcgttactgaatgctgaggacgaaaagcgcgaggaagaaaaggagaaacaagctgaggaaatggcaagtgatgacttgtctctcatcagaaagaatagaatggccttgttccagcagctgacatgtgtgctgccgatcttggacaacctgcttaaagctaacgtgatcaacaagcaagagcacgatatcattaagcagaagacccagatacctctgcaggcgcgtgagcttatcgataccatcttggtgaaaggcaatgccgccgctaatatatttaaaaattgtctcaaggaaatcgacagtacactctataaaaatttgttcgtcgacaagaacatgaaatacatacccaccgaggatgtgtctggtctgtcattggaggagcagttgcgccggctgcaagaggagcgcacctgcaaagtgtgtatggacaaagaggtcagcgtagtcttcattccgtgtggacacctcgtggtatgtcaggaatgcgcaccttccttgcgcaagtgcccaatctgtcgcgggattattaaggggaccgttagaaccttcctgtcttag

SEQ ID NO: 89755 - DNA, 1857 bp, Artificial Sequence
  derived and/or modified sequence
atgcacaagacagccagccagaggctcttccctggccccagctaccagaacatcaagagcatcatggaggacagcaccatcctgagtgactggaccaacagcaacaagcagaagatgaagtatgacttcagctgtgagctgtacaggatgagcacctacagcaccttccctgctggggtgcctgtgtctgagaggagcctggcccgggccggcttctactacacaggagtgaatgacaaggtgaagtgcttctgctgcggcctgatgctggacaactggaagctgggggacagccccatccagaagcacaagcagctgtaccccagctgcagcttcatccagaacctggtgtctgccagcctgggcagcaccagcaagaacaccagccccatgaggaacagctttgcccacagcctgagccccaccctggagcacagcagcctcttcagcggcagctacagcagcctgagccccaaccccctgaacagcagagctgtggaggacatcagcagcagcaggaccaacccctacagctatgccatgagcacagaggaggcccgcttcctgacctaccacatgtggcccctgaccttcctgagccccagcgagctggcccgggccggcttctactacatcggccctggggacagagtggcctgctttgcctgtggcggcaagctgagcaactgggagcccaaggatgatgccatgtctgagcacagaagacacttccccaactgccccttcctggagaacagcctggagaccctgcgcttcagcatcagcaacctgtccatgcagacccacgccgccaggatgaggaccttcatgtactggcccagctctgtgcctgtgcagcctgagcagctggccagcgctggcttctactacgtgggcagaaatgatgatgtgaagtgcttctgctgtgatggcggcctgcgctgctgggagagcggagatgacccctgggtggagcacgccaagtggttcccccgctgtgagttcctgatccgcatgaagggccaggagtttgtggatgagatccagggccgctacccccacctgctggagcagctgctgagcaccagtgacaccaccggggaggagaatgctgacccccccatcatccacttcggccctggagagagcagcagtgaagatgctgtgatgatgaacacccctgtggtgaagagcgccctggagatgggcttcaacagagacctggtgaagcagacagtgcagagcaagatcctgaccaccggggagaactacaagacagtgaatgacatcgtgtctgccctgctgaatgcagaagatgagaagcgggaggaggagaaggagaagcaggccgaggagatggccagtgatgacctgagcctcatcaggaagaacaggatggccctcttccagcagctgacctgtgtgctgcccatcctggacaacctgctgaaggccaacgtcatcaacaagcaggagcatgacatcatcaagcagaagacccagatccccctgcaggcccgggagctgattgacaccatcctggtgaagggaaatgctgctgccaacatcttcaagaactgcctgaaggagattgacagcaccctgtacaagaacctgtttgtggacaagaacatgaagtacatccccacagaagatgtgtctggcctgagcctggaggagcagctgcggcggctgcaggaggagaggacctgcaaggtgtgcatggacaaggaggtgtctgtggtgttcatcccctgtggccacctggtggtgtgccaggagtgtgcccccagcctgaggaaatgtcccatctgccggggcatcatcaagggcaccgtgaggaccttcctgtcctag

SEQ ID NO: 89756 - DNA, 1857 bp, Artificial Sequence
  derived and/or modified sequence
atgcacaagaccgccagccagcggctgttccccggccccagctaccagaatattaagtctataatggaggacagtactatcctgtccgactggacaaactctaacaagcagaagatgaaatatgacttctcttgtgagctgtacaggatgagcacctactcaacattccccgcaggcgtgcctgtgtcggaaaggtctctcgccagagccggcttttactataccggtgtaaacgataaagtgaagtgtttctgctgcgggctgatgttggataactggaagctcggcgactctcccattcagaagcacaagcagctgtacccctcctgctcatttatccaaaaccttgtgtctgcgtcactgggctcgacctcgaaaaataccagtcccatgcgtaactcgttcgcccactcactatctcctactttggagcatagctcccttttttccggtagttactcctcactgagccccaatccgctcaattctcgggctgtggaggacatcagcagctcccgcaccaacccgtactcttacgcaatgagcacagaggaggcaagatttctgacgtatcatatgtggcctttgactttcttaagccctagcgagctggcacgggcaggcttttactatattggtccaggggacagggttgcgtgctttgcttgtggagggaagctgtctaactgggagccaaaggacgacgcgatgagtgagcatcggcgccacttccctaactgcccctttctcgagaatagtttagaaactctgaggtttagtataagcaatctctcaatgcagactcacgctgccagaatgaggacatttatgtattggccctccagtgtaccagtacagccggagcagcttgcatccgccggattttattatgtgggtcggaatgacgacgtgaagtgcttctgttgcgacggcggactgcgatgctgggagtccggggacgatccctgggtcgagcacgccaaatggttcccccgatgtgagttcctgattcggatgaagggccaggagttcgtggacgagatccagggccggtacccccatctgctcgaacagcttctttcgacttccgacacgaccggggaggaaaatgccgatccccccatcattcactttggccccggagaatcctccagcgaagatgccgtcatgatgaacacacccgtcgttaagagcgcgttggagatgggtttcaatcgtgacctggtgaaacaaactgtgcagagtaagatcttaacaaccggagaaaactataaaactgtcaatgacatcgtgagtgccctactgaatgctgaggacgaaaagcgcgaagaagaaaaggaaaagcaggcagaggagatggcctctgatgacctgtcgctgattcggaaaaatcgcatggctctgttccagcaactgacctgcgtgctgccgatactggataaccttctcaaggctaatgtgataaacaaacaggagcacgacatcatcaaacagaagacccagattccactgcaggcccgagaacttattgacacgatcctcgtgaagggcaatgccgctgccaacatttttaagaactgtctgaaagagatcgacagcaccctctacaaaaacttatttgtggataagaacatgaaatatattccaactgaggacgtgtctggtctgtcactggaagagcagctcagacggctgcaggaggagaggacctgtaaagtctgcatggataaggaggtttcagtcgtctttatcccctgtggccacctggtggtgtgccaggaatgcgctccatctctgagaaagtgcccaatctgcagaggaataattaaagggaccgtgagaacttttctgtcttag

SEQ ID NO: 89757 - DNA, 1857 bp, Artificial Sequence
  derived and/or modified sequence
atgcataagacagcttctcagcgactatttccgggtccttcctatcagaacattaagtcaatcatggaggactcaaccattctttcagattggaccaattcaaacaagcagaagatgaagtatgacttctcgtgcgaactgtaccggatgtctacatatagtacattccccgctggcgttccggtatctgagaggtctctcgccagagccggattctactatactggggtgaatgacaaagtgaaatgtttctgttgcgggcttatgctagacaattggaaacttggagactctcccatccagaaacacaaacagctatatcccagttgttcctttatccagaacttggttagtgcatcattgggaagcacctctaaaaatacatcgcccatgcgaaactcattcgctcactccctgagtcccaccctggagcactcctccttgttctccggaagttacagcagcctcagccccaatccgctcaactcgagggctgtggaggacatttcttcatccagaactaacccctacagttacgcaatgtccacagaggaagcaagattccttacatatcatatgtggcccctgacatttctgagccctagcgagttagccagagcgggtttctattacattggtccaggggatcgtgtggcctgctttgcttgcggaggcaagttgtctaattgggaacccaaggatgacgctatgtccgagcacaggcggcacttccctaattgccctttcctggagaacagcttagaaactctgagatttagcatcagtaacctgtcaatgcagactcacgctgccaggatgcggacatttatgtactggccctcatctgtgcctgtacagcccgaacagctggcttctgctggattctattacgtcggcaggaatgacgacgtgaagtgcttctgctgtgacggcggtctaagatgctgggaatccggagacgacccttgggtggaacacgcgaaatggtttccacggtgcgaattcctgatccggatgaagggccaggaatttgtcgacgaaattcagggcaggtacccccatcttctggaacagctgctgtccacctccgacaccacaggcgaggagaacgccgacccgcctatcatccactttgggccaggggagtcttcctccgaggacgccgtcatgatgaatacacccgtggtgaaatccgccctggagatgggcttcaatcgagatctggtaaagcagactgtacagagcaaaatattgactacgggtgagaattataaaacagtgaatgacatagtaagcgcccttctcaatgccgaagatgaaaagcgagaagaagagaaggagaagcaagccgaagagatggcgtctgacgatcttagtttaatcaggaagaaccgcatggcgctgttccagcagttgacttgtgtcttacccatactagataatctgctgaaggctaacgtgatcaataaacaggagcacgacattatcaagcaaaagactcagataccgttacaggccagggagcttattgacactattttggttaaaggcaacgcagccgctaacatcttcaagaactgcctgaaagaaatagacagcacactctataagaacctatttgtggacaaaaatatgaagtacatccccactgaagatgtgagcggcctcagccttgaggaacagctgagaaggctgcaggaggaaagaacttgtaaggtgtgtatggacaaggaagtttcggtggtctttataccatgtggccacctggtagtttgccaggaatgcgccccttcactgagaaagtgcccaatatgtcgtgggattattaaaggaacggtccgaactttcctgtcttag

SEQ ID NO: 89758 - DNA, 1794 bp, Artificial Sequence
  derived and/or modified sequence
atggaagacagcaccatattgtccgattggacaaactccaacaagcagaagatgaaatacgatttcagctgtgaattgtaccggatgagtacatactcaacgttccccgccggtgtcccagtttccgaacggtctctcgctcgcgccggattctactacactggcgttaatgataaggtgaagtgtttctgttgtggccttatgctcgataactggaaattgggggatagccccatccagaaacataagcagctgtatccaagctgtagctttattcagaaccttgtcagtgctagcttgggatccacttctaaaaacaccagtcctatgcgtaattcattcgcccattccttatcccctactctggaacattcttctctattctccgggtcatacagctccctgtcacccaatccactaaacagcagggctgtggaagatatttcctcttccagaactaatccttattcatatgccatgtctacagaagaggctagatttctgacgtaccacatgtggcctttgaccttcctcagcccttcagagcttgcccgcgcaggcttttactatattggtcctggagatcgcgtcgcctgttttgcgtgcggaggtaagctgagtaactgggagcccaaggacgatgccatgtctgagcatcgccgtcactttcctaattgccctttcctggagaattcgctggagacactacgctttagtatcagcaatctatctatgcagacccatgccgcaagaatgcgaactttcatgtactggcctagtagtgtgcctgtacagcctgaacaactcgcctctgccggcttctactatgtgggaagaaacgacgacgtaaaatgcttctgttgcgatggtggtctgcgctgctgggagtcaggagacgacccatgggttgaacatgctaaatggtttccccggtgcgaattcctgattaggatgaagggccaagagtttgttgatgagatccagggccgttaccctcaccttcttgaacagctgctgtccacctcagataccactggagaggagaacgcggaccccccaataatccactttggcccaggcgaaagcagctcagaggacgcagtgatgatgaataccccagttgtgaagtccgccctagaaatgggattcaacagggaccttgtcaaacagactgttcaatcaaagattttgactacaggagagaattacaaaacggtaaacgatatcgtgtcagctttactcaacgctgaagacgagaaacgagaggaagagaaagaaaaacaggccgaggagatggcctctgacgacttaagcctcattagaaaaaatcgcatggccttgtttcagcagctcacatgtgtactgcccatcctagataatctgctgaaggctaatgttattaacaagcaggaacacgatataatcaaacaaaaaacacagatcccactgcaggcccgcgaactgatcgacaccattctggtgaaagggaacgccgcagctaacatcttcaaaaactgcctgaaagagattgatagcaccctgtacaaaaacctttttgtggataaaaatatgaaatacattccaacggaggatgtatccggattgtcactcgaggaacagctgaggcgcttgcaggaagagagaacctgtaaggtgtgcatggacaaggaagtgtctgtggtgtttatcccctgtggccaccttgtggtgtgccaggagtgcgccccatctctcaggaaatgtcctatctgtagagggatcattaaagggactgtgcgtacatttctgtcctag

SEQ ID NO: 89759 - DNA, 1605 bp, Artificial Sequence
  derived and/or modified sequence
atgcacaagaccgcaagccagcgcctgttcccggggccctcctatcaaaacatcaaatccataatggaggacagcacaatcctttctgattggacgaactccaataaacagaagatgaagtacgactttagttgtgaattatataggatgagtacctactcaactttccccgctggagttcccgtctcggagcgttctttagccagagccggattttactacactggggttaatgataaggtgaagtgtttttgttgcgggcttatgctggataactggaaacttggggacagccctatacagaagcacaagcagctgtacccttcttgctccttcatccagaacctcgtttcagctagcctcggcagcaccagcaagaacaccagcccaatgagaaactccttcgcccatagtctgagtcctactttggaacactcttccctgttttcaggctcttactcctccttatcccctaatcccctcaatagccgagctgtggaagatatttcaagtagcagaaccaacccctattcttatgccatgtccacagaggaggctcggttcctcacataccatatgtggccccttacttttttgtcaccctcagaactcgccagagccggtttctattacatcggcccaggcgatagggtggcctgtttcgcttgcggagggaaactgtccaactgggagcctaaagacgatgccatgtccgagcatagacgtcacttccccaattgtcccttcttagagaactcactcgaaaccctgcgattctcaatcagtaatctgagcatgcagactcatgccgcacggatgaggacattcatgtattggcctagcagcgtccccgtgcagccggagcagctcgcctcggcaggattctattacgtgggtaggaatgacgatgtgaaatgcttttgctgcgatgggggtttgaggtgctgggagagcggcgatgatccttgggtagagcacgccaagtggtttcccaggtgtgagttcttgattaggatgaaaggccaggagttcgtagacgaaatacagggaagatatccgcatctgctcgaacagttgctcagtacttccgacacaactggagaggagaacgcagatccccctatcattcatttcgggcctggagaatcaagttcggaagatgctgtgatgatgaatacccccgtcgttaaaagcgccttggaaatgggcttcaatagagacctggtcaagcagaccgtgcagtccaaaatattaacgacgggagaaaactacaagaccgttaacgacatcgtatccgccctgcttaacgctgaggacgagaaacgcgaggaggagaaggaaaaacaggccgaggaaatggcaagcgacgatttgtccttgatcagaaagaaccgaatggctctcttccagcagcttacttgtgtactccctatcctggacaatttactgaaagcaaatgtaatcaacaagcaggaacatgacatcattaaacagaagactcagattcccctccaggctagggaactcatcgatacaatccttgtgaagggcaacgccgcggcaaacatttttaaaaattgccttaaagtgaagcagcgcttttag

SEQ ID NO: 89760 - DNA, 1794 bp, Artificial Sequence
  derived and/or modified sequence
atggaggacagcaccatcctgagtgactggaccaacagcaacaagcagaagatgaagtatgacttcagctgtgagctgtacaggatgagcacctacagcaccttccctgctggggtgcctgtgtctgagaggagcctggcccgggccggcttctactacacaggagtgaatgacaaggtgaagtgcttctgctgcggcctgatgctggacaactggaagctgggggacagccccatccagaagcacaagcagctgtaccccagctgcagcttcatccagaacctggtgtctgccagcctgggcagcaccagcaagaacaccagccccatgagaaattcctttgcccacagcctgagccccaccctggagcacagcagcctcttcagcggcagctacagcagcctgagccccaaccccctgaacagcagagctgtggaggacatcagcagcagcaggaccaacccctacagctatgccatgagcacagaggaggcccgcttcctgacctaccacatgtggcccctgaccttcctgagccccagcgagctggcccgggccggcttctactacatcggccctggggacagagtggcctgctttgcctgtggcggcaagctgagcaactgggagcccaaggatgatgccatgtctgagcaccggcggcacttccccaactgccccttcctggagaacagcctggagaccctgcgcttcagcatcagcaacctgtccatgcagacccatgctgccaggatgaggaccttcatgtactggcccagctctgtgcctgtgcagcctgagcagctggccagcgctggcttctactacgtgggcagaaatgatgatgtgaagtgcttctgctgtgatggcggcctgcgctgctgggagagcggagatgacccctgggtggagcacgccaagtggttcccccgctgtgagttcctgatccgcatgaagggccaggagtttgtggatgagatccagggccgctacccccacctgctggagcagctgctgagcaccagtgacaccactggagaggagaatgctgacccccccatcatccactttggacctggagagagcagcagtgaagatgctgtgatgatgaacacccctgtggtgaagagcgccctggagatgggcttcaacagagacctggtgaagcagacagtgcagagcaagatcctgaccactggagagaactacaagacagtgaatgacatcgtgtctgccctgctgaatgcagaagatgagaagcgggaggaggagaaggagaagcaggccgaggagatggccagtgatgacctgagcctcatcaggaagaacaggatggccctcttccagcagctgacctgtgtgctgcccatcctggacaacctgctgaaggccaacgtcatcaacaagcaggagcatgacatcatcaagcagaagacccagatccccctgcaggcccgggagctgattgacaccatcctggtgaagggaaatgctgctgccaacatcttcaagaactgcctgaaggagattgacagcaccctgtacaagaacctgtttgtggacaagaacatgaagtacatccccacagaagatgtgtctggcctgagcctggaggagcagctgcggcggctgcaggaggagaggacctgcaaggtgtgcatggacaaggaggtgtctgtggtgttcatcccctgtggccacctggtggtgtgccaggagtgtgcccccagcctgaggaagtgccccatctgccggggcatcatcaagggcaccgtgaggaccttcctgtcctag

SEQ ID NO: 89761 - DNA, 1605 bp, Artificial Sequence
  derived and/or modified sequence
atgcacaagacagccagccagaggctcttccctggccccagctaccagaacatcaagagcatcatggaggacagcaccatcctgagtgactggaccaacagcaacaagcagaagatgaagtatgacttcagctgtgagctgtacaggatgagcacctacagcaccttccctgctggggtgcctgtgtctgagaggagcctggcccgggccggcttctactacacaggagtgaatgacaaggtgaagtgcttctgctgcggcctgatgctggacaactggaagctgggggacagccccatccagaagcacaagcagctgtaccccagctgcagcttcatccagaacctggtgtctgccagcctgggcagcaccagcaagaacaccagccccatgaggaacagctttgcccacagcctgagccccaccctggagcacagcagcctcttcagcggcagctacagcagcctgagccccaaccccctgaacagcagagctgtggaggacatcagcagcagcaggaccaacccctacagctatgccatgagcacagaggaggcccgcttcctgacctaccacatgtggcccctgaccttcctgagccccagcgagctggcccgggccggcttctactacatcggccctggggacagagtggcctgctttgcctgtggcggcaagctgagcaactgggagcccaaggatgatgccatgtctgagcacagaagacacttccccaactgccccttcctggagaacagcctggagaccctgcgcttcagcatcagcaacctgtccatgcagacccacgccgccaggatgaggaccttcatgtactggcccagctctgtgcctgtgcagcctgagcagctggccagcgctggcttctactacgtgggcagaaatgatgatgtgaagtgcttctgctgtgatggcggcctgcgctgctgggagagcggagatgacccctgggtggagcacgccaagtggttcccccgctgtgagttcctgatccgcatgaagggccaggagtttgtggatgagatccagggccgctacccccacctgctggagcagctgctgagcaccagtgacaccaccggggaggagaatgctgacccccccatcatccacttcggccctggagagagcagcagtgaagatgctgtgatgatgaacacccctgtggtgaagagcgccctggagatgggcttcaacagagacctggtgaagcagacagtgcagagcaagatcctgaccaccggggagaactacaagacagtgaatgacatcgtgtctgccctgctgaatgcagaagatgagaagcgggaggaggagaaggagaagcaggccgaggagatggccagtgatgacctgagcctcatcaggaagaacaggatggccctcttccagcagctgacctgtgtgctgcccatcctggacaacctgctgaaggccaacgtcatcaacaagcaggagcatgacatcatcaagcagaagacccagatccccctgcaggcccgggagctgattgacaccatcctggtgaagggaaatgctgctgccaacatcttcaagaactgcctgaaggtgaagcagcgcttctag

SEQ ID NO: 89762 - DNA, 1794 bp, Artificial Sequence
  derived and/or modified sequence
atggaggacagcaccatcctgagcgactggaccaacagcaacaagcaaaagatgaagtacgatttttcctgcgagctgtaccgaatgtcgacgtattctactttcccagccggcgtgccagtgagcgaacggagtttagcccgagctgggttttactatacaggggtcaatgataaggtcaagtgcttttgctgcggcctgatgttggacaattggaagttgggcgactcacccattcagaagcacaagcaactgtacccatcatgcagctttatccagaatctggtctccgcttctttgggctccacttctaaaaacacatctcccatgcgcaattcattcgcgcattccctgtcacctacgctggaacattcaagtctgtttagtggcagttattcctctctatctcctaacccgctgaattcaagagcagttgaggatatttccagttccagaactaatccctactcctatgcaatgtccacggaggaggcacggttcctgacgtatcacatgtggccactgactttcttgagtccatcagaactggctagggctgggttttactatatcggccctggtgatcgagtggcttgttttgcctgtgggggcaaactatcgaattgggaaccgaaagacgacgccatgtcggagcatcggcgccattttcctaattgccctttcctggaaaacagtttggagactctgcggttctccatttccaatctatctatgcagactcacgcggcaaggatgcgaacttttatgtattggccctcctcagtccccgtgcagccagaacagcttgcatcagccggcttctactacgtgggccggaatgatgatgtgaagtgtttctgctgcgacgggggcctgcgctgttgggaatccggggatgatccttgggtcgagcacgccaagtggttcccacgctgtgaatttttgattcggatgaagggtcaggaatttgtggacgaaattcagggacgatatccccatctcctggagcagttgctttctacttccgatactactggcgaggagaatgccgaccctcctatcatacactttggacctggcgagagtagctcagaggatgcagtaatgatgaacacacctgttgtgaagagcgcattggagatgggctttaatcgtgatctcgtgaaacaaacagtgcagtcgaagatcttgacaacaggcgagaactacaagaccgtaaatgacattgtgtccgccttactgaacgccgaggatgagaaacgtgaagaagaaaaggaaaagcaagccgaagaaatggcctctgatgatctcagtttgatcagaaagaatcggatggccttgttccagcagctcacttgcgtcctgcccatcctagataatttgttaaaggctaatgtcatcaacaagcaagagcacgacatcatcaagcagaaaacccagatcccactgcaggcccgggagctgatcgacacaatactggtcaagggcaacgccgcggctaacattttcaagaattgtcttaaggaaattgattctactctctataaaaacctgttcgtggacaagaacatgaagtatatccctaccgaagatgtctcgggcttgtctctcgaagagcaactcagaagactccaagaggagagaacatgcaaagtctgtatggacaaagaagtcagcgtagtctttatcccctgcggccatttagtggtctgccaagagtgcgccccatctctgagaaagtgtcccatctgtagaggcatcataaaagggacagtcagaacgtttctcagttag

SEQ ID NO: 89763 - DNA, 1605 bp, Artificial Sequence
  derived and/or modified sequence
atgcacaagaccgccagccagcggctgttccccggccccagctaccagaacataaagtcgattatggaggattcaacaatcctaagcgactggacaaactccaacaaacagaagatgaagtacgatttttcatgcgaactgtatagaatgtcaacctattcaaccttccctgctggcgtgccggtgtctgagagaagcctggctcgcgcgggattttactataccggtgttaatgacaaagttaaatgtttctgttgtggcttgatgctggacaattggaaattgggtgatagtccaatccaaaagcataaacaactctacccttcatgcagctttatccagaatctagtttccgccagcctcgggtccacatctaaaaatacaagcccgatgaggaactcctttgcccactcgctgagccccacgttagaacactcaagtctgttcagcggctcatactccagtttgtctccaaaccccctaaacagcagggccgtggaagacataagttcatcccggactaatccttattcctacgccatgtcgactgaggaagcccgttttctgacataccacatgtggccactgacatttcttagcccttctgaactggcacgggccggcttttattacattggtcccggggacagagtggcctgctttgcatgtgggggcaaactgagtaattgggagcccaaggatgatgcaatgtctgagcaccggcgccacttcccaaattgccccttccttgagaactccctggagactctgaggtttagcatttctaacctttcgatgcagactcatgctgccaggatgcggaccttcatgtattggccttccagtgttccggtgcagcccgaacagcttgcatcagctggcttctactatgtcggacgcaatgatgacgtgaagtgcttttgttgcgatggcgggctgcgctgctgggagtcaggggacgatccgtgggtcgagcacgctaagtggtttcctcgttgcgagttcctgattagaatgaaggggcaggagtttgttgatgaaatccaggggcgttacccacacctcctcgaacagctgctgtccacatccgacacaactggagaagaaaatgcagaccctccaataatccatttcggcccaggggaatcctcttcagaggatgccgtgatgatgaatactccagtcgttaagagcgcactggagatgggcttcaaccgagatctggtcaaacaaacggtccagtctaaaatcttgaccactggagagaattataagactgttaacgatattgtgtccgcattgcttaacgctgaggatgagaaacgagaagaggagaaggagaaacaggccgaggaaatggcgtccgatgacctgtccctgatcaggaaaaacaggatggctctttttcagcagctcacctgcgtgctgccgatccttgacaacctcctcaaggcaaatgtcattaacaagcaagagcatgacataataaagcaaaagacacagattccactgcaagctcgagaactgattgacactatactcgtcaaaggaaacgcagcagccaacatttttaagaattgcctgaaggtgaagcagcgattttag

SEQ ID NO: 89764 - DNA, 1794 bp, Artificial Sequence
  derived and/or modified sequence
atggaagacagtacaattctaagtgactggacaaatagcaacaaacaaaaaatgaagtacgatttctcgtgtgaactgtaccggatgtcgacctattccacttttcccgctggtgtgccagtgtctgaaagatctctggcacgcgcagggttttactatacaggggtgaatgataaagttaagtgcttttgctgtggtctgatgctggacaactggaaactgggggacagccctatccagaaacacaagcagctgtatcccagctgctctttcatacagaatttggtgtctgcgtccctagggtccacatctaagaatacctccccaatgagaaacagttttgcccattctctgtccccaactctcgaacactctagcctgttcagtggtagctatagtagcctgtctcccaatcctctcaattcgagggccgtggaggatatatcaagctcacggacaaatccatatagttacgccatgagcacagaagaggctcgcttcctaacttatcatatgtggccactgaccttcctctcccctagcgaactggccagagccggtttttattacatcggcccaggcgatcgagtggcttgttttgcctgtgggggaaaactttcaaattgggaacccaaagatgatgccatgagtgagcataggagacacttcccgaactgccccttcttggagaactccctggagaccctcagattcagcatatcaaacttatcaatgcagacacatgcggcaaggatgcgcacattcatgtactggccgtcaagtgtacctgttcaaccagaacagcttgcctctgcagggttttattatgtgggtaggaacgatgacgtgaaatgcttttgttgtgatgggggtttgaggtgctgggagtccggtgatgacccctgggttgagcacgcaaaatggtttcccaggtgtgagttcctgatcaggatgaaaggtcaggaatttgtggatgagatacagggccgttatccccacctactagagcagttattgagcacgagcgacacgacaggagaggagaatgctgatcctcccattatacacttcggcccaggagagagctcttcggaggacgctgtcatgatgaacacaccagtggtgaagagcgccctggaaatggggttcaatcgggatctagtcaaacagacagtgcaatcgaagattctgaccactggtgagaattacaaaacagtaaatgacatagtctccgctcttcttaacgccgaagatgaaaaacgcgaagaggaaaaagaaaagcaggccgaggagatggcctccgatgacctatccctgatccggaaaaatcgcatggcactgttccaacagctcacgtgcgtcttacccatactcgataacctgctgaaggccaacgtcattaataagcaagagcatgacatcatcaaacaaaagacccagattcctctccaggctcgggaactcattgatactatcctcgtgaaaggcaatgcagcagcaaacattttcaaaaattgccttaaagagattgatagtaccctctacaaaaatctcttcgtcgacaaaaatatgaagtatatccccaccgaagatgtatcaggcctgtcccttgaagaacagctgagacgcttgcaagaggagagaacatgtaaagtttgcatggacaaggaagtgtctgtcgtcttcattccatgtggtcatcttgtcgtgtgtcaggagtgcgctccaagcctgcggaagtgcccaatatgtagggggattatcaagggcaccgtgcgaacctttctgtcttag

SEQ ID NO: 89765 - DNA, 1605 bp, Artificial Sequence
  derived and/or modified sequence
atgcacaaaacagccagtcaacggctgtttcccggtccgtcctatcaaaatattaagagcatcatggaggatagtacaattctcagcgattggactaacagcaataagcagaagatgaaatatgatttttcttgtgaactctaccgcatgtccacatactcaaccttccccgctggagtgcccgtctctgagaggtccctagcaagggctggtttctattatactggggtgaatgacaaagtaaaatgcttttgctgtggattaatgttggacaattggaaactaggcgattcccctattcaaaagcataagcagctgtatcctagttgtagcttcattcagaatctcgtctccgcatctctcggatccacttcaaagaacacttctccgatgaggaactcattcgcacactcccttagccccacactggaacattcctctctgttctcaggttcctattcatccctgtctccgaatcctctaaatagtagagcggtagaagatattagttctagccggaccaacccgtatagctacgccatgagcacagaagaagccagatttcttacttatcatatgtggccattgacattcctttctccttccgaactcgccagggctggcttctattacattggccctggtgaccgggtagcctgttttgcatgcgggggtaagctctctaactgggaaccaaaggatgacgctatgtctgaacatcggcgacatttccccaactgcccttttcttgaaaacagcctggagacgttgcggttctctatttcgaatctgtccatgcagacccacgccgctcgaatgcggacattcatgtactggccatctagcgtgcctgtgcagcctgaacaactggcttccgcaggcttctattatgtcggtcggaatgacgatgtgaagtgtttttgctgcgatggaggcctgagatgctgggagagtggggatgacccgtgggtggagcacgcaaagtggtttccacgctgcgaattcctcattaggatgaagggccaggagtttgtggatgaaatccagggccgatacccacatttgttagagcagctgctctccactagcgacactaccggggaggagaatgccgacccccctattattcacttcggccctggcgagtcttcgtctgaggacgctgttatgatgaatacaccagttgtaaagtccgctctggaaatgggctttaatcgggatctggtcaagcaaacagtgcagtccaagatcctaactaccggcgagaactataagacagtgaacgacatcgtgtcagctcttcttaatgcagaggatgagaaacgggaagaggaaaaggagaagcaggccgaggagatggcaagtgatgacctgtctctgatccggaaaaaccgtatggccctgtttcagcagcttacctgtgtgctgcccatcctggacaatttgctgaaggctaatgtgattaacaaacaggaacacgacattatcaagcaaaaaacgcagatccctctgcaggctcgggaacttattgatactatcctggtcaagggcaacgctgctgccaacattttcaagaactgtcttaaggttaagcagcggttctag

SEQ ID NO: 89766 - DNA, 1854 bp, Artificial Sequence
  derived and/or modified sequence
atgcacaaaacagcgagtcagcggctctttccaggcccctcctatcagaacatcaagtctataatggaggattcaacaatcctctcggactggactaacagcaataaacagaagatgaaatatgacttctcctgtgagttgtacaggatgagtacatactctacatttcctgccggcgttccggtgtcagagcgatcccttgcgagagccggtttctactacaccggcgtgaacgataaagtcaagtgcttctgttgtgggctcatgctggacaactggaagctgggagattctcccatacaaaaacataagcaactatacccgtcgtgcagctttatccagaacctggtctcagcttcactgggtagtacctctaagaatactagcccaatgcgtaatagcttcgcacatagcctgtcaccgactctcgagcatagctctctgttctcaggatcttacagctcattgagtccgaatccccttaattcacgcgccgtggaagatatctcctccagccggactaatccgtattcttacgcgatgtccactgaggaggccaggtttctgacttatcatatgtggcccctgacctttctctcaccgagtgagctggctagggccggcttctactatattgggcctggagaccgcgtagcatgtttcgcctgtggtgggaaactcagcaattgggagccaaaggacgacgccatgtccgagcatagaagacattttcctaactgcccctttctagagaacagcctggagacactcaggttttcgatttccaatctgtccatgcagacacacgccgctaggatgagaacattcatgtattggccttcctccgtacctgtgcagccagagcagttggcaagcgctggcttttactatgtaggacgcaatgacgacgtcaagtgcttctgctgcgatggcggcctacggtgctgggaatccggcgacgatccgtgggtggaacatgccaaatggttccctcggtgtgaattcctcatccggatgaaagggcaagaatttgttgacgagattcaggggcgatatccgcaccttctagagcagcttctctcaaccagtgacaccaccggtgaggagaacgcagacccaccaattattcacttcggccccggcgagtcttccagcgaagatgcagtgatgatgaacacccctgtggttaagtcggctcttgagatgggattcaacagagatctggtgaagcaaaccgtgcagtcgaagatcttaactactggagaaaactacaaaacggtaaacgacatagtgagcgcgctgttgaatgctgaggatgagaagagggaagaagagaaggaaaaacaagccgaggaaatggccagtgacgatctttcactgattcgtaaaaatcgaatggccctgttccagcagctgacctgcgttctccccatcctggataatctgttaaaggctaatgtaatcaacaagcaggagcacgatatcatcaagcagaagacccaaatcccattgcaagccagagaactcattgacactatccttgtgaaaggtaatgccgctgcgaacattttcaagaattgcttaaaagaaattgactctactctgtacaagaatctgttcgtcgacaagaatatgaagtacatacctactgaggacgtgtccggactgagcctagaagagcagctcaggcgcctgcaagaggagagaacctgtaaggtatgcatggataaagaggtgtctgtggtcttcataccctgcggacaccttgtggtttgccaggaatgtgctccttctctgcgcaagtgccctatctgccgaggaattatcaaaggcaccgtgagaacctttctgtca

SEQ ID NO: 89767 - DNA, 1854 bp, Artificial Sequence
  derived and/or modified sequence
atgcacaagacagccagtcaaagactgtttcccgggccatcttatcagaacatcaagagcatcatggaggacagcactatcctgtccgactggactaacagcaacaaacaaaagatgaagtacgacttttcctgcgagctctatcggatgtccacttattctacttttcccgccggagtgcctgttagcgaacgaagtcttgcccgagccggattctattatactggcgtgaatgataaggtgaagtgcttttgctgcggtctgatgctcgacaactggaagctcggcgactccccaattcagaaacacaagcagctgtacccctcctgctcctttattcagaatttggtgtcagcaagcctgggaagcacgtctaagaatactagtcccatgagaaatagcttcgcccactcattgtcacctactctggaacacagctctctgtttagcgggtcttactcctccctgtctcccaatccactcaacagccgcgcagttgaggatatctcttccagccgcacaaatccctactcctacgccatgtctactgaggaagcacggttcctgacatatcacatgtggccattgacttttctttctcccagcgagctggcccgcgcgggcttctactatatcggcccgggagacagagtcgcctgcttcgcttgcggaggaaaactgtccaactgggaacctaaggacgacgctatgtcagaacatcgcaggcacttccccaattgcccatttctggaaaattccctggagaccctccgattcagtattagcaatctgagtatgcaaacacacgcagccaggatgcggacattcatgtactggccttccagtgttccggtacagccagaacagttggcttctgcaggcttttactacgtggggcgcaatgatgacgtgaagtgcttttgttgcgatggcggcctcaggtgttgggagtccggagacgatccttgggtcgaacacgctaagtggtttccccgctgtgagttcctgattcggatgaagggccaggaatttgtcgacgagatacagggtcgctacccacaccttctggaacagctgctttccactagcgataccactggtgaagagaacgccgacccacctattatacatttcggtccaggtgaaagctcttccgaagacgcagtgatgatgaatacacccgttgttaaaagcgccttggagatgggtttcaaccgcgatctggtcaagcagacggtgcagagcaaaattcttacaactggggagaactacaaaaccgtcaatgatatcgtgagtgcactgcttaacgccgaggacgagaagcgggaagaagaaaaggaaaaacaagccgaggagatggcttccgatgacctctccctcatcagaaaaaatcgaatggctctcttccagcaactgacctgtgtgctccctatactggacaacctcctgaaggcaaatgttattaacaagcaggaacatgacattattaagcaaaagactcaaattcccttgcaggcaagggagctgatagacacaatcctggtcaaggggaacgccgctgcaaatatttttaaaaactgcctgaaggaaatcgatagcacactgtataagaacctctttgtggataagaacatgaaatacatccctacagaagatgtgtctggactgtctcttgaggaacagttgcggcgcctgcaagaggagcgcacctgcaaggtctgcatggacaaggaagtgagtgttgtgtttataccgtgcgggcacctggtggtctgccaagaatgtgcaccctccctgagaaaatgtcctatatgtaggggcattatcaaagggacagtcaggacttttctttct

SEQ ID NO: 89768 - DNA, 1854 bp, Artificial Sequence
  derived and/or modified sequence
atgcataaaacagcttctcaacgactatttccaggacccagctatcagaacatcaagtccattatggaagacagcactatactctctgactggactaatagcaataaacagaagatgaagtacgatttttcatgtgaattatataggatgtcaacctacagcacatttcctgccggggtgcccgttagcgagaggagccttgctagagcagggttctattacactggtgtcaacgacaaagtcaaatgtttctgctgcgggctgatgttggacaactggaaactaggtgactctcccatccagaagcacaaacagctgtatccgagctgttctttcatccagaatctggtgagcgcatctcttggttctacttcgaagaatacttcccccatgcggaatagctttgcccacagcctgtcacctaccctggaacattcttcactgttctccggatcctactcctccctgtcgcccaaccccctgaactcccgggccgtggaagatatatcatcatctcggacaaatccatactcttacgctatgtccaccgaggaggcacgcttcctaacataccatatgtggccgctgactttcttgtcgccttctgaacttgctagagccggcttttactatatcggccccggggatcgcgtcgcttgtttcgcctgcggcggaaaattatctaactgggagcccaaagatgacgccatgtccgaacatcgaaggcacttcccgaactgtccattcctggaaaactccctggagaccttgcggttttccatcagcaatctctccatgcagacccacgcagcgcggatgcgcacttttatgtactggcccagctccgtcccggtacaacccgaacagctcgcatcggcgggcttctactacgtaggtagaaatgacgacgttaaatgtttctgctgtgacggcggtctacgctgctgggagtcaggtgatgatccttgggtggagcacgccaaatggtttcctcgctgtgagtttctgatcagaatgaaggggcaggagtttgtcgatgagattcaaggcagatatcctcatttactggaacagttgttgtccacctctgacaccaccggggaagagaacgctgatcccccaatcatccatttcggcccgggggagagttcgtccgaagatgctgtgatgatgaacacgcctgtggttaagagtgcgctggaaatgggttttaatagggacctggtcaagcagaccgtgcagagcaaaatcctaaccacgggcgagaattacaagactgtgaatgatatcgttagcgcactgctcaatgctgaagatgaaaaaagggaggaggagaaggagaagcaggccgaagagatggcttcagacgacctgtctctgatccgcaagaataggatggcccttttccagcagctgacttgtgtgctccctattctggacaacttgctcaaggcgaatgttattaacaagcaagagcatgacatcatcaaacagaaaacccagatccctctgcaagctagggaactgatcgacacgatcctcgtgaagggcaacgctgcggctaatatttttaagaattgcctgaaagagatcgactctacactctataagaatctgttcgtcgataagaacatgaagtacattccaaccgaagatgtgtctggtctgagcttagaagagcagttgcgaagactgcaggaggagcgtacatgcaaggtgtgtatggacaaagaagtctctgtagtttttatcccttgtggccacttggtcgtgtgccaggagtgtgcccctagtctgagaaagtgcccgatctgcagggggatcatcaaaggaactgttagaaccttcctttcc

SEQ ID NO: 89769 - DNA, 1854 bp, Artificial Sequence
  derived and/or modified sequence
atgcataaaactgcttcgcagcgactgttcccgggaccatcctaccagaatatcaagagcattatggaggattcgactatccttagtgactggactaattcgaacaaacaaaaaatgaagtacgactttagctgcgagctctaccgcatgtctacttactcgactttcccggctggcgtgccggtgtccgagcgctcattggcgagagcaggtttctactacaccggcgtgaatgataaggtgaagtgcttctgctgcggactgatgctggataattggaaactgggagactcgccgatccagaagcataagcaactctacccatcatgctcctttatccagaacctggttagcgcctcactgggctcaacctcgaagaacacgtcaccaatgagaaactccttcgctcacagcctcagcccgactcttgaacatagctcactgttctccggttcgtactcttcactgtccccgaatcctttgaactcccgcgccgtggaagatatctcatccagcagaaccaacccgtactcctatgcaatgtcgaccgaagaggcgcgcttcctcacctaccatatgtggcccctgactttcctctctccctccgaactggcgcgtgccggattttactacatcggacccggagacagagtggcgtgcttcgcctgcggcggaaaactgtccaattgggagcctaaggacgatgccatgagcgaacaccgcagacacttcccaaactgcccctttctggaaaattccttggaaactctccgcttctcgatcagcaacctgtcgatgcaaacccatgcagcacgaatgcgcaccttcatgtactggccatcctccgtcccggtgcaaccagaacaactggcaagcgcgggtttttattacgtcggaaggaatgacgatgtaaagtgtttctgctgtgatggtgggctccggtgttgggaaagcggggacgacccgtgggtggaacacgccaagtggttcccgcggtgcgaatttctgatcaggatgaagggccaagagtttgtggatgaaatccagggaagatacccgcacttgcttgaacagctcctctcgacttccgacaccaccggcgaagaaaatgctgatcctcctatcatccacttcggaccaggagaatcgtcgtccgaggacgccgtgatgatgaacactcctgtggtcaaatcggccctcgaaatggggttcaacagggatctggtgaagcagactgtccagtccaagattctcacgaccggagaaaactacaagactgtcaacgacattgtctcggcactgctgaacgccgaggacgagaaacgggaagaagaaaaagaaaagcaagccgaggagatggccagcgacgacctttcactgattcggaagaaccggatggctctgttccagcagcttacctgtgtgctcccgatcctggataacctcctcaaagctaatgttattaacaagcaggagcacgacattatcaagcagaaaacgcagatcccactgcaggcccgcgaactcatcgacaccatcctcgtgaagggaaacgccgcagcgaatatctttaagaactgccttaaagagatcgactcaaccctgtacaagaacctgttcgtcgacaagaatatgaagtacataccaaccgaagatgtgtcgggcctgagcctggaggagcaactgcggcgcctgcaagaggagcgcacctgcaaggtgtgcatggacaaggaggtgagcgtggtgttcatcccgtgtggacacttggtcgtctgtcaggagtgcgcgccgtcgctgcggaaatgccctatctgccgggggatcatcaaggggactgtgcggacgttcttgtca

SEQ ID NO: 89770 - DNA, 1854 bp, Artificial Sequence
  derived and/or modified sequence
atgcacaagaccgcatcccagcggctttttccgggaccaagctaccagaatatcaagtccatcatggaggactcaactattctttccgattggactaactccaataagcagaagatgaagtacgatttttcgtgtgaactgtaccgcatgtcaacctactcgacctttcctgcgggtgtcccggtgtcggagcgcagcctcgcacgagcagggttttactatactggcgtgaacgataaggtgaagtgtttttgctgtgggttgatgctcgataactggaagttgggagatagccctatccagaagcataagcaactttacccgagctgttcattcatccagaacctggtgtctgcatcgttgggttccacttccaagaatacctcgccgatgagaaattcgttcgcgcatagcctttcgcctactcttgaacatagttccttgttctccggctcgtactcctcgctctcccctaacccattgaactccagagcagtggaagatatatcgtcctccaggactaacccttactcctacgcgatgtccaccgaggaagcaagatttctgacgtatcatatgtggccccttacctttctttcgccttcggaactggccagagcaggtttttactacattggaccaggggatcgggtggcatgttttgcatgcggtggaaaactcagcaactgggaacctaaggacgatgctatgtcagaacatcggcgccactttccaaactgcccttttctggaaaactccctcgagactcttagattctccatttcgaacctttcaatgcagactcatgcagcccgtatgaggacttttatgtactggcctagctccgtgcctgtgcaaccggaacaattggcatccgcaggcttttactatgtgggtaggaacgatgatgtgaaatgtttctgttgtgatgggggactgcgctgctgggaatccggtgacgatccatgggtggagcacgccaagtggtttccaaggtgtgagttcctgattaggatgaaaggccaggaatttgtggatgaaatccagggcagataccctcacctcctggaacaactgctgtccacctccgataccaccggagaagagaacgcagacccacctatcattcatttcggaccaggagaatcctcgtcggaagatgcagtgatgatgaatacccctgtggtgaaatccgcactggagatgggattcaatcgggacctggtgaagcagactgttcaaagcaagattctcaccaccggcgagaattacaagacggtgaatgatattgtctccgcactgctcaacgcggaagatgaaaaaagggaggaagagaaggagaagcaggccgaggaaatggcgtcagacgacctgagcttgattagaaaaaaccgaatggccctttttcagcagctcacctgtgtgctcccaattcttgacaaccttctgaaggctaacgtgatcaacaagcaagaacatgacattatcaaacaaaagacccaaatacctcttcaagcgcgagagctgatcgatacgattctggtgaaggggaatgcagcagcaaacatcttcaaaaactgtctgaaagaaatcgattccactctgtacaagaatctgtttgtggataagaacatgaagtacattcccaccgaggacgtcagcggactgagcttggaggaacaacttcgtaggcttcaggaagagaggacttgcaaggtttgtatggacaaggaggtgtcagtggtgttcattccttgtgggcacctggtggtgtgtcaagagtgtgcaccgtcacttagaaagtgtcccatttgccgcggtatcattaagggaaccgtgcggacctttctctca

SEQ ID NO: 89771 - DNA, 1854 bp, Artificial Sequence
  derived and/or modified sequence
atgcataagaccgcatcgcaacggctgttccctggcccaagctaccaaaacataaagtccattatggaagattcgaccatcctttcagattggaccaattcaaacaaacagaagatgaagtacgatttctcatgcgagttgtacaggatgtccacttactcgaccttccctgcaggagtgccagtgagcgaaagatcgctggcgcgcgccgggttctactacactggcgtgaatgacaaggtgaagtgtttctgctgcgggctcatgctcgacaactggaagctgggagattcccccattcagaagcacaagcagctttacccctcttgcagctttattcagaaccttgtgagcgcatcgcttgggtcaaccagcaaaaacacttcccctatgcgtaactctttcgctcattcccttagcccgactctggagcattcatccctttttagcggatcctacagctcgcttagccctaatcccctgaacagccgcgcagttgaggatatttcctcctcgaggactaacccatatagctacgcaatgtccaccgaggaggcacgtttcctgacctaccacatgtggcctctgacgtttctttcaccatccgaactcgcaagagcggggttttactacattgggcctggtgatagagtggcatgttttgcatgcggaggtaagctgtcaaactgggaacctaaggatgacgccatgtcggagcaccgcaggcactttccaaactgtccttttctcgaaaactcgcttgagactctgcgctttagcatctcgaatctctcgatgcaaacccacgcagcgcgtatgcgcacctttatgtattggccatcgtcagtgccggtgcagcctgagcaactcgcatccgcaggattctactacgtcggacggaatgacgatgtcaagtgtttttgttgcgatggggggctccgctgttgggagtcgggagatgatccttgggtggaacatgctaagtggttccctcgttgtgaattccttattcggatgaaggggcaggaatttgtggatgagattcaaggtcgctacccacacctgctggaacagctgctctcgacctcggataccaccggagaggagaacgcagacccacccattattcattttggccctggcgaatcgagctccgaggatgcagtgatgatgaacacccctgtcgtgaagtcggcacttgaaatgggttttaacagagatctcgtgaagcaaactgtgcaatcaaagatcttgaccaccggagaaaactacaagactgtgaatgatatagtgtcggcactcctcaacgcagaggatgaaaagcgcgaggaagagaaagaaaagcaggcagaggaaatggcatcggacgatttgtccctgattcgcaagaatcgaatggcactctttcaacaacttacttgcgtcttgcctattctcgacaacctgcttaaagcaaatgtcattaacaagcaggaacatgatatcatcaagcaaaaaacccaaatcccactgcaggcacgtgaactgattgacactatcctggtcaagggtaacgcggctgcgaatatcttcaaaaactgtcttaaggaaattgattcaactctttacaagaatcttttcgtcgataagaatatgaagtatattcctaccgaagatgtgtccggacttagccttgaagagcaactccgcagactgcaggaggaaaggacgtgtaaggtgtgtatggataaggaagtgtcagtcgtgttcatcccatgcggtcacctggttgtgtgtcaggaatgtgcacccagcttgagaaagtgcccaatttgtagaggtatcatcaagggtaccgtgcgaacttttctgtcg

SEQ ID NO: 89772 - DNA, 1854 bp, Artificial Sequence
  derived and/or modified sequence
atgcacaaaacagcatctcagcggctttttcctgggccttcttaccagaacataaaaagtataatggaggatagtacaatcttatctgactggactaattccaataaacagaagatgaaatacgatttctcttgtgagctatatcgaatgtccacatactccacattcccggctggagttccagtgtccgaaaggagtctagctcgcgcagggttctattacacaggggtcaatgataaagtcaaatgtttctgttgtgggctcatgctcgataattggaaactaggagattcaccaattcagaaacacaaacagctctatcctagttgcagtttcatacaaaatctcgtgagtgcttccctcgggtccacttctaaaaacacatcacctatgcgcaactctttcgcacactctctatctcccacactggaacatagttctttattctccggatcatattcttctttgtctcccaatcctctgaactctagagctgtggaggatatatcctcatccaggactaatccttatagttatgcaatgtccacagaggaggctcggttcctgacatatcatatgtggccactcacttttctgagtcccagtgaactcgctagagcagggttctattacatcggacccggggatcgagttgcatgtttcgcctgcggagggaaactgtctaactgggaaccaaaagatgatgctatgtccgaacacaggcggcatttccccaattgtcctttccttgaaaactccctagaaactttgaggttctctatctctaacctcagtatgcagacgcatgcagccaggatgcggactttcatgtattggccttctagtgtacctgtacagcctgaacagctcgcatccgcaggattttattatgtcggacgaaacgatgatgtaaaatgtttttgctgtgatggaggactccggtgttgggaatctggggacgatccctgggtagaacacgccaaatggttccctaggtgtgaattcctaatccgaatgaaagggcaggaatttgttgacgaaatccaggggcggtacccccatcttctcgagcagttactgtctacaagtgatacaacaggggaagaaaatgccgatcctccaatcattcacttcggaccaggggagtcctcatccgaggatgcagttatgatgaatacacccgtggtcaaatccgccctggaaatggggtttaacagggacctggttaaacagactgtccagagtaaaattctgactactggagaaaattataaaacagtaaatgacatcgtgtctgctctcctgaatgctgaagatgaaaaacgggaagaggaaaaagaaaaacaggctgaagaaatggcctccgacgatctatccctaatccggaaaaatcgaatggctctgtttcagcagcttacttgtgtgctccccatacttgataaccttcttaaggctaacgtgataaataagcaggagcacgatataataaagcagaaaactcagattccactccaagcaagggaactgatagatactatcctagtaaaagggaacgctgctgcaaatatttttaagaattgcctaaaagaaatagattctactctgtataaaaacttatttgtagataaaaatatgaagtatattcccacagaagatgtctcagggctctctctggaggaacagcttcgacggctgcaggaagaacgaacttgtaaagtttgtatggataaagaagtctctgtggtcttcataccctgcggacatctcgtggtgtgccaggagtgtgccccttccttaaggaagtgtcctatctgccgcggaatcataaagggaactgtccggacattcctatcc

SEQ ID NO: 89773 - DNA, 1854 bp, Artificial Sequence
  derived and/or modified sequence
atgcacaaaactgcatctcagcgcctctttcccggcccaagctaccagaacatcaagagcatcatggaggactctactattctctctgactggacaaactcaaacaagcagaaaatgaagtacgacttcagctgcgagctgtatcgcatgtccacctatagtacctttccggccggggtccccgtgagtgagagaagtctggcaagggccgggttctactatacgggcgtcaacgataaagtgaagtgcttctgctgtgggctgatgctggataactggaaattaggggactcgcctatccaaaagcacaagcagctgtacccatcatgttcctttatccaaaatttggtctctgccagcctcggttccaccagcaagaacacatcgcccatgagaaactccttcgcccacagcctgagcccaactctcgagcactcttccctgtttagcggatcttatagctcgctgagtcccaacccactcaattcgagagccgtggaagacatatcgagctcccgaacaaatccctacagctacgcgatgagtacagaagaggcacggttcctcacctaccatatgtggcctctcactttcctttccccaagtgagttagcgcgcgccggcttctactatattggccccggggatagggtcgcatgcttcgcttgcgggggaaagctgagtaactgggaacctaaggatgacgctatgtctgagcacagacgccactttccgaactgtccctttttggagaacagtctcgagaccttacggttcagtatcagcaacctctctatgcagacacatgctgcaaggatgaggacgtttatgtattggccaagctccgtacctgtgcagcccgagcagctggcttctgctggcttctactatgtgggtcgaaacgacgacgtcaagtgcttctgttgtgacggaggactgcggtgttgggaatccggggatgatccttgggtggaacacgcaaagtggttccccagatgcgaattcttgattcgcatgaagggccaggaatttgtggacgaaatccagggtcgctacccgcacctgctggaacagttgctatccacgagtgacacgactggggaagaaaatgccgacccaccgataatccatttcggcccgggggagtcgtcaagcgaggatgctgtgatgatgaatactcccgtagtgaaaagcgccctggagatgggatttaaccgggacctggtcaagcagacggtccagagtaagatcctcacaactggcgagaattataaaacggtgaatgacatcgtgtctgcactgcttaacgcagaggatgaaaaacgtgaagaagagaaagagaagcaagctgaagaaatggcgtctgatgacctatccctcattaggaagaatcggatggcactgtttcagcagttaacttgcgttttacctatactggataatctcctgaaggccaatgttatcaataaacaagaacacgacatcatcaagcaaaagactcagattcccttgcaggcgagggaactgatagataccatcctggtcaaagggaatgctgccgcgaacattttcaaaaattgccttaaagagatcgacagcacattgtacaaaaatttattcgtcgataagaatatgaagtacatcccaactgaggacgttagcggcctgtcactggaagaacagctccgccggctccaagaagaacggacgtgtaaggtttgtatggacaaggaagtgtcagtagtttttatcccttgcggccacctcgtggtctgccaggaatgtgcccccagcctgcgaaagtgtccaatttgcaggggaatcataaagggaacggtgcgcactttcctgtcc

SEQ ID NO: 89774 - DNA, 1854 bp, Artificial Sequence
  derived and/or modified sequence
atgcacaaaaccgcctctcagcgactctttccaggcccaagctaccaaaatattaaatcaatcatggaagactccacaatcctgtctgattggaccaacagcaacaaacagaagatgaaatatgatttttcttgtgaactttacaggatgagcacatacagcacctttcctgctggggtcccagtgtctgaacgtagccttgcgcgagctggcttctactacactggcgtcaatgacaaggtgaaatgcttctgctgcggactgatgctcgacaattggaagctgggcgattcccccatccagaaacataagcaactgtatccctcttgctcttttatccagaacctggtgagcgcttcccttggttccacctcaaaaaataccagcccgatgcgaaattccttcgcgcattcactgagccctacactggagcactcctccctgttttctggaagttatagttcactaagcccgaatcccctaaactcccgagccgtcgaggacatcagttcatcccgcactaatccctattcctatgccatgagtacagaagaggcccggttcctaacttaccacatgtggccactgaccttcttgagccccagcgaactggctcgagccgggttctactatatcggccccggcgatagggtggcctgtttcgcatgcgggggcaagttatcaaactgggaaccaaaagacgacgccatgagtgagcaccgacggcactttcctaattgcccgttcttggagaattcactggaaaccctccgattctctattagcaacctaagcatgcagacccacgcggccagaatgcgcacctttatgtactggcccagcagcgtaccagtacagccagaacagctagcgtccgccggattctactatgtcggtcgaaacgatgatgtgaaatgcttctgctgcgatgggggcctgcggtgctgggagtccggtgacgacccttgggtggaacacgccaagtggtttcctaggtgcgagttcctcatacggatgaaagggcaagaattcgtggatgaaatccaaggccggtatccccacctgctggagcagctcctttcaacctcagacactacaggcgaagagaacgcagatcccccgatcattcattttggcccaggcgagagttcgtccgaagatgctgtcatgatgaatacgcccgttgtgaagtctgcacttgagatggggtttaacagagatctcgtaaaacagaccgtccaatccaaaattctgacaacgggcgagaattataagaccgtgaatgacatagtgagcgcactacttaatgctgaggatgagaaaagggaagaggagaaggagaagcaagccgaggagatggccagtgatgacctcagtcttatccggaagaatagaatggccctcttccagcagttgacatgtgtgcttccaattcttgataatctgctgaaagctaatgtgattaataaacaggaacatgatatcattaaacagaaaacacagatccctttgcaggcccgggaattgatagatacaattctagtaaaagggaacgccgcggctaacatctttaaaaactgtctgaaagagatcgactcgacactgtacaaaaacctgtttgtcgataagaatatgaaatatatcccgacagaggatgtgtctgggctcagcctggaggaacaactgcggagactccaggaggagaggacgtgcaaagtgtgcatggataaggaagtgagcgtggtgtttatcccctgcggccacctagttgtttgccaggagtgtgctccctcgctgaggaagtgccccatctgtagaggcatcatcaagggcactgtgcgcacctttctcagt

SEQ ID NO: 89775 - DNA, 1854 bp, Artificial Sequence
  derived and/or modified sequence
atgcataagacagcttcgcagaggctgtttccaggccctagctaccaaaacataaagtccatcatggaagattccacaatcctgagcgactggactaactctaacaagcagaaaatgaagtatgatttctcttgcgaactctatcgcatgtccacctacagcacttttcccgcaggcgtccccgtgagcgaacgctccttagcaagagcgggcttctattataccggcgttaacgacaaggttaagtgcttttgctgtggtctgatgctcgataactggaagctgggcgattccccaattcagaagcacaagcagttgtaccctagctgcagctttattcaaaacctggtgagtgcatccctgggaagcacctcaaaaaacacatcacctatgcggaactcattcgctcacagcttgtccccaaccctggagcatagtagcctcttctcagggtcatattcctctctttctcccaacccactgaacagcagagccgtcgaagacatctctagctcccgtaccaacccatactcctacgcgatgtcaactgaggaagcaaggttcctgacttaccatatgtggcccctgacattcctgagccccagcgaattggctcgtgcaggcttctactatatcggcccgggggaccgcgttgcttgttttgcctgcggagggaagttgtctaattgggagcccaaggacgacgctatgtcagagcaccggagacattttccgaactgcccctttcttgagaacagccttgagactctgaggttttccatttcaaaccttagcatgcaaacacacgctgcgaggatgcgcacctttatgtactggccttcgtcagtacctgtgcaacctgaacagctcgcttccgctggtttttactacgttgggcgaaatgatgatgttaaatgtttttgctgcgacggaggcctgcgctgttgggagagtggggacgatccatgggtggaacacgctaagtggttcccgagatgtgaatttttaatcaggatgaaaggccaagaatttgtggacgagatccagggaaggtacccccatcttctggaacaactgctgtccacaagtgacactaccggagaggagaacgctgatccaccaatcatacactttggcccaggagagtcaagctcagaagacgcagttatgatgaatacccctgtggtcaagagcgcactcgaaatggggtttaacagagacctggtgaagcaaacagtgcaaagcaagatactcacaaccggagaaaattataaaaccgtgaacgatatcgtgagcgcgctgttaaacgccgaggatgaaaagagagaagaagaaaaagaaaagcaggcagaagaaatggcaagcgatgacctgtcactcatcagaaagaatcgtatggccctgttccagcagctgacttgtgtcctccctatcctcgataacttgctgaaagctaatgtgatcaacaaacaggagcacgacatcatcaaacaaaaaacccagatccccctgcaggctagagaactcattgatacaatcttggtgaagggcaacgctgctgccaatatctttaagaactgtctaaaagaaatcgatagcaccctctacaagaatctttttgtcgacaaaaacatgaagtatatcccaacagaagacgtttctgggttgagcctggaggaacagctgcgcaggttgcaggaggaaaggacttgcaaggtgtgcatggataaagaagtttcagtcgtgtttataccatgtggacacctggttgtgtgccaggagtgtgctccaagcttgcgcaaatgccccatctgcagaggtatcatcaaaggcacggttcggactttcctttct

SEQ ID NO: 89776 - DNA, 1854 bp, Artificial Sequence
  derived and/or modified sequence
atgcataagaccgcaagccaacggttgttcccaggaccaagctaccagaatatcaagtcgatcatggaggattccaccattctctccgactggaccaactcgaacaagcagaaaatgaaatacgatttttcatgtgaactgtatcgcatgtccacttactctacttttcctgctggcgtccctgtgtccgagagatcactcgcgcgcgcagggttctactacaccggtgtgaatgacaaagtgaaatgtttttgttgtggactcatgctcgataactggaagctcggagattccccaatccaaaaacataagcagctgtacccatcctgtagctttattcagaaccttgtgagcgccagcctcggatcgacttcgaaaaacacgagccctatgagaaattcctttgctcattctctttcgcccactctcgagcactcctcgcttttctccggttcctacagctcgctgtcgcccaacccgcttaattcccgggcggtcgaggacatttcgtcgagccgtactaatccttacagctacgcaatgagcactgaggaggcaagatttttgacttaccatatgtggccactgaccttcctgtcgccttccgaattggcccgcgcaggtttttactacatcggtccaggagatagagtggcatgctttgcgtgcggaggcaagctgtcgaactgggaacctaaggatgatgcaatgtccgagcatcggcggcactttccaaattgtcctttcctcgagaattcgctcgaaacccttcggttctccatatcgaacctgagcatgcaaacccatgccgcccgcatgcgtaccttcatgtactggccctccagcgtgcccgtgcaacctgagcaactggcatcggcagggttttactacgttggacgtaatgatgacgtcaaatgtttctgctgtgacggagggcttcgatgctgggagtcgggggacgatccctgggtggaacatgcaaagtggtttcctcggtgcgaattccttattcgcatgaagggccaggaattcgtggatgaaattcaaggccgctacccacatctgcttgagcaactcctgtcgacctcggatacgaccggcgaagagaacgctgaccctccgatcattcacttcgggcctggcgagtccagcagcgaagatgcggtgatgatgaacacccctgttgtgaagtccgccctggaaatgggattcaatcgtgacctggtcaagcaaaccgtccagtcaaaaatccttaccaccggtgaaaactacaaaacggtgaatgatatcgtgtcggccctccttaatgcagaggacgagaagagggaagaagaaaaagaaaagcaagccgaagaaatggcctcggatgacctttcgttgatccgcaaaaatcggatggcgctttttcagcagctgacctgtgtgctccctatactcgacaacctcctgaaggccaacgtgattaacaagcaagaacacgacataatcaagcagaaaacccaaatcccccttcaggcaagggaattgattgataccatcctggtcaagggtaatgcggcagcgaacatattcaagaattgcctgaaggaaattgattccaccctctacaagaatctgttcgtggataagaacatgaaatacattcccacggaggacgtttccggactttcacttgaggaacaacttcggagactgcaggaagagagaacctgcaaggtttgtatggataaagaagtgtcggtggtctttatcccttgcggtcatctggtcgtgtgccaagaatgcgcaccctctctgcggaagtgtcctatttgtagaggcattatcaagggtactgtgcgcactttcctgagc

SEQ ID NO: 89777 - DNA, 1854 bp, Artificial Sequence
  derived and/or modified sequence
atgcacaaaacggcttcccaacggctgtttcctgggcctagttaccaaaacatcaagtccatcatggaggattctaccattctgtctgattggactaactccaacaagcagaagatgaagtacgacttctcctgcgagctctatcgtatgtcaacctattctacatttcctgccggagttccggtgtccgagcgtagcctggcccgtgctggtttctattacacaggcgtgaatgataaggtgaaatgcttctgttgtggccttatgctggacaactggaagctcggagacagtccaattcaaaaacacaagcaactttatccatcctgctcattcatccaaaacctggtgagcgcatctctggggagcacatccaagaatacgtcacccatgcgaaactcatttgcccacagtttatctcccactctcgaacattcgtctctgttctccggatcttattccagcttgtcccccaatcccctgaatagcagagccgtggaagatattagtagtagcagaacaaacccctacagctacgctatgagcactgaagaggcccgattcttgacctaccacatgtggcccttaacctttcttagtccgtccgagctggcccgcgccggtttctactatattggacctggagacagggtggcctgtttcgcctgtggggggaaactttcaaattgggaacccaaggatgatgcaatgtctgaacatcgccgccatttccccaactgcccctttcttgagaactccctcgagactctgcgattttccatttcgaatctgtcaatgcagacacacgccgcgaggatgcgaacttttatgtactggccttcttccgtgccagtccagcctgagcaactggctagtgccggattctactacgtaggacgcaatgacgacgtaaagtgtttctgctgcgacggggggctccggtgctgggagagcggagatgatccttgggtggaacacgccaagtggtttccgcgatgcgagtttttgatcagaatgaagggacaggaatttgtggatgagatccagggtcggtatccacaccttctcgagcagctcttatcgacatccgacaccaccggggaagagaacgccgatccacctatcattcattttggtccgggagaaagttcaagcgaggacgctgtgatgatgaatactccagttgtaaagtctgccctcgaaatgggctttaatagggaccttgttaagcagaccgtgcaatctaagattctcactaccggcgagaattacaagactgtgaatgacatcgtgtctgctttacttaatgccgaagatgagaaaagagaagaggaaaaggaaaaacaggcggaagagatggccagcgatgacctgtccctgataaggaagaacagaatggcacttttccagcagctaacttgtgtattacccattctggataacctcctgaaggcaaacgtgattaataagcaggagcacgacatcatcaagcagaaaacgcagatccctctccaggcccgcgagctgatcgataccattctggtgaaaggcaacgctgctgccaatatatttaaaaattgtctgaaggaaatcgatagtacactgtataagaatcttttcgttgacaagaatatgaagtatattcccacggaagacgtgtccggattgagccttgaagagcagttacgacggctgcaggaagagcgcacctgcaaggtttgcatggataaggaagtatccgtagtatttataccgtgcgggcatctggtggtctgccaggagtgtgcaccgtcactgcgaaaatgtcccatctgcagaggtatcattaagggaacagttagaacgtttttgagt

SEQ ID NO: 89778 - DNA, 1854 bp, Artificial Sequence
  derived and/or modified sequence
atgcataaaaccgcgagccagagacttttccctggcccgagctaccaaaatattaagtccattatggaggactccactattttgtctgattggacgaactctaacaagcagaagatgaagtatgatttttcatgcgagttatatagaatgagtacctattcaacctttccagctggggttcctgtgagcgagaggtctttggctcgcgccggattctattacacaggtgtcaacgataaggtcaagtgtttttgctgcggcctcatgctagataactggaagttgggagatagcccaattcagaagcataaacagttatacccatcatgctctttcattcaaaatctggttagcgcgtctttgggatcgacatcaaagaatacatctcctatgagaaactctttcgcacactcattatctcctacgttagaacattccagcttgttcagtggatcttattccagtctttcccccaatccattgaatagccgcgcagtggaggatatctccagcagtcgcaccaacccctattcctatgccatgagcacagaagaagccaggtttctcacttatcatatgtggccccttacattccttagtccttctgaactcgctcgggctgggttttattatattgggcctggcgatcgtgtggcttgctttgcctgcggtggaaagctttcaaattgggagcctaaggatgacgctatgtccgaacaccggaggcatttcccgaactgtccatttcttgagaattctttggaaactctaagattttcaatctctaatctgtcaatgcaaacccacgctgcccgtatgcgaacttttatgtactggccctcgagtgttcctgtgcagcctgaacagttggcaagtgctggattctactacgttggccgtaacgacgatgtgaaatgcttttgctgtgacggtggtcttcgatgctgggagagcggagatgatccatgggttgaacatgctaaatggttccctaggtgcgaattcttaatcaggatgaagggacaagagtttgtagatgagattcaaggcagatatcctcacctccttgaacaacttctctcaacatccgatacgaccggggaggaaaatgcagatcctccaattatccactttggacctggagaatcttcgtccgaggatgctgttatgatgaacaccccagtggttaagagcgcactagagatggggttcaatagggaccttgttaagcagacagtgcagagtaagatcttgaccactggggaaaattacaaaacggtgaatgacatcgtttctgctctactcaatgctgaggacgaaaagagagaggaagagaaggaaaaacaggcagaagagatggcgtcagatgacttgagtttgattagaaagaaccgtatggcgttatttcaacagcttacatgcgtccttccaatactcgataacctcctcaaagccaacgttattaataaacaggagcatgacattattaagcaaaaaactcaaatcccccttcaggcacgagagttgattgatactatcttggtaaagggaaatgcagcggcgaacatattcaaaaattgcttaaaggagattgacagtacactttacaagaacctatttgtggacaagaatatgaaatacattcccaccgaagacgtgagtggtcttagtcttgaagagcagttgaggagattgcaggaagagcgcacttgcaaggtgtgcatggataaggaagtgtctgttgtgtttatcccttgcggacacctggttgtatgccaggagtgtgcaccaagccttcggaaatgtcctatctgtcggggtattattaaaggtactgtaaggacatttttgtca

SEQ ID NO: 89779 - DNA, 1854 bp, Artificial Sequence
  derived and/or modified sequence
atgcataagaccgcatctcagaggcttttcccgggaccgtcatatcaaaacatcaagagcataatggaagattcgaccatcctctcagactggactaattccaacaagcagaaaatgaagtacgacttctcctgcgagctgtacagaatgtcgacctactccactttccccgccggagtgccggtttcagaacgttccctggcacgcgcgggattttactatactggggtgaatgacaaggtgaaatgcttctgttgcggcctgatgctggataattggaagctcggcgattcgccaatccagaaacacaagcagctctacccctcgtgctccttcatccagaacttggtgtcagcgagcctcggctccacctcaaaaaacacctcaccgatgaggaacagtttcgcgcatagcttgtcgcccactcttgaacactcgtccctcttctcggggagctattcatcgctgagccctaaccctctgaattctcgcgccgtggaggacatcagctcgagccggactaatccctactcctacgcgatgtcgacggaagaagcacggttcctgacctaccacatgtggccgcttacttttctgtcccctagcgagctggctcgcgcaggattttactacattggaccaggtgaccgcgtggcttgcttcgcctgtggcgggaagctgagcaattgggagccgaaagacgatgcaatgtccgaacatcgccgccatttcccgaactgccctttcttggaaaattcgctggaaactctgcgcttttccatctccaacctgtcaatgcagacccacgccgctcgcatgcgaaccttcatgtactggccatcgagcgtccccgtccagccggaacaactggcctccgctggcttctactacgtcggacggaacgacgacgtgaagtgcttctgctgcgacggagggctgagatgctgggagtcgggagacgatccatgggtagagcacgctaagtggttcccgcgctgcgagtttcttatcagaatgaaaggtcaagaatttgtggacgaaatccagggtagataccctcacctcctcgaacagcttctgtcgacttcggacaccacgggagaggagaacgccgacccaccgatcatccatttcggacctggtgagtcctcttcagaggatgccgtgatgatgaacactccagttgtaaaaagtgcgcttgagatgggattcaatcgcgaccttgtaaaacagacggtccaaagcaagatcctgactacgggcgagaactacaagaccgtcaacgatattgtctctgccctgctcaacgcggaagatgaaaagcgtgaagaagagaaggaaaagcaagcggaagagatggcttcggatgatctctccctgatacggaaaaacaggatggccctgttccagcagttgacctgcgtgcttcctattctcgataatctcctgaaggcaaatgtgatcaacaaacaagaacacgatatcatcaagcaaaagactcaaatcccgttgcaggcccgggaattgatcgacactatcctggtgaaaggcaacgcggccgccaatatctttaagaattgtctgaaggagattgactcaaccctgtacaagaacctgtttgtggacaaaaacatgaagtacatcccaactgaggacgtgagcggcctctccttggaagagcagctcagacgccttcaggaagagcggacctgtaaagtgtgtatggacaaggaagtctcggtcgtgttcattccatgcggccacctcgtggtgtgccaagaatgcgccccgagcctccggaagtgcccaatctgtcgtggaatcatcaagggaaccgtccgaaccttcctgagc

SEQ ID NO: 89780 - DNA, 1854 bp, Artificial Sequence
  derived and/or modified sequence
atgcacaaaactgcatcgcagcgcctgttccctggaccgtcctaccagaacatcaagtctatcatggaggactccacaatactcagcgactggacgaattcgaataaacagaagatgaaatatgacttctcctgcgagctgtaccggatgtctacctatagcacgtttccagccggagttcccgtgtctgagcggagtctggctagggcagggttttactataccggagtcaacgacaaagtgaaatgcttctgttgcggacttatgctggataattggaagctcggcgatagtccaattcagaagcacaagcagctatatccttcttgctcctttatccagaacctggtcagcgcgtctcttggcagcacttctaagaataccagtcctatgagaaacagcttcgcccactccctgtccccaacgttggaacattcttcccttttctcaggcagctactcatccttgtcaccgaatccattgaacagccgtgctgtcgaggacatctcttcctccaggactaacccttacagctacgcaatgagtaccgaagaggctagatttctgacttaccacatgtggccgctcacattcctttctccctctgaactggcccgcgccggattttattacatcggtcccggcgatagagtggcttgttttgcctgcggaggcaagctgtctaactgggagcccaaggatgatgcaatgagcgaacacagaagacactttcctaactgccccttcctggagaacagtctggagacattgcggttttccatttcgaatcttagtatgcaaactcacgcagcccggatgagaacctttatgtactggcctagcagtgtccccgtgcagcctgaacagttggcctccgcagggttctactacgtgggaagaaacgacgatgtgaagtgtttctgctgtgacggtggacttcgctgctgggaaagtggagacgacccctgggttgaacacgctaaatggtttccaaggtgcgagtttctaattcgaatgaagggccaagagtttgtggatgagatccagggcagatacccccatttacttgagcaactgctctcaactagcgatactactggcgaagaaaacgccgaccctcccatcattcattttggccctggcgaaagttcctctgaagacgctgttatgatgaacaccccagtggtgaagtctgctctggagatgggattcaatcgcgacctcgtgaagcagactgttcaaagtaaaatcctgacgactggtgagaactacaagactgttaacgatatcgtctctgcattgcttaatgccgaggatgagaaacgggaggaagaaaaggagaagcaggctgaggagatggcctccgatgacctgtctttgatcaggaagaaccggatggccctgtttcaacagctaacttgtgtgctccctattctggataatctgttgaaggccaacgtgatcaataagcaggagcatgatattattaaacagaaaactcagataccattgcaggcgcgagagcttatcgatactatccttgtgaagggcaatgccgccgctaatatctttaagaactgcctgaaggaaatcgatagcaccctatacaaaaatctctttgtggataaaaatatgaaatatatccctactgaggatgtcagcgggctcagcctggaggaacagttgcggcggctgcaggaggagcgcacctgtaaagtgtgcatggacaaggaagttagtgtcgtcttcattccgtgcggccatctggtggtgtgccaggagtgtgccccgagcctgcgcaagtgcccaatttgtcgcggcattatcaagggaaccgttcgaacctttctcagc

SEQ ID NO: 89781 - DNA, 1854 bp, Artificial Sequence
  derived and/or modified sequence
atgcataagacggcgtctcaacgactcttccccggtccgtcatatcaaaacatcaaatccattatggaggatagcaccattctgtctgattggactaattcgaacaaacaaaagatgaagtacgactttagctgcgaactgtacaggatgtcaacgtactccacttttcccgcaggtgtgcctgtgtccgaacgaagcctggcacgtgcagggttctactacactggtgtgaatgataaagtgaagtgtttttgttgcggactcatgctggacaactggaagctcggtgattctccaattcagaaacacaaacagctgtacccctcgtgctccttcatccagaatttggtgtccgcatcgcttggatcgacttcaaagaacaccagcccaatgcgcaactcctttgcccactccctgtccccgactcttgaacattcgagcctgttctcagggagctattcatcgctgagcccaaatccactcaattccagggccgtggaggacatttcgtcatcgaggactaacccatattcatacgcaatgtcgacggaagaggctaggttcctgacttaccatatgtggcctcttaccttcctcagcccatcagaactggcccgggcaggcttttactacattggcccaggggatcgcgtggcttgttttgcctgcggaggaaaactttcgaactgggaaccaaaggatgatgctatgagcgaacaccgccgacattttccaaactgtccttttctcgaaaactctcttgaaactcttcggttttcaatttcaaacctttcgatgcaaacccatgccgcaagaatgcgcaccttcatgtactggccgtcctcggtgcccgtccagcctgaacaactggcatccgccggtttttactacgtcgggcgcaatgacgatgtgaagtgtttctgctgtgacggaggacttcggtgttgggaaagcggagacgatccgtgggtggagcacgcaaaatggttcccacgttgtgaatttcttattaggatgaagggtcaagagtttgtcgacgaaatacagggtcgctacccacatcttcttgagcagcttctttcgacttcagacactaccggcgaagagaatgcagatcctcccatcatacattttggacctggagagtcaagctctgaggatgcagtgatgatgaatactcccgtggtgaagtccgcacttgagatgggatttaacagagatctggtgaagcagacggtgcaatcaaagatcttgaccaccggcgaaaactacaagactgttaacgacattgttagcgccctcctgaatgcggaggatgagaagagagaagaagagaaggaaaagcaggccgaagagatggcgtctgacgatctctcactgattagaaaaaaccggatggcgctttttcaacaattgacctgcgtgctgcctattctggataacctcctgaaggccaacgtcataaacaagcaagaacacgacatcataaaacaaaagacccaaattccactgcaagctagagagttgatcgataccattcttgttaagggaaatgcagccgcaaacatcttcaagaattgtcttaaggaaatcgattctaccctttacaaaaacctttttgtggacaagaacatgaagtacatcccaaccgaggacgtgagcggcctttctctggaggaacaactccggagactgcaagaagaacgaacctgcaaggtgtgtatggataaagaagtctccgtggtctttatcccatgtggacatcttgtggtttgccaggagtgtgcaccgtcacttcgtaagtgtccaatttgtagaggcatcatcaagggtacggttcggacttttctgtct

SEQ ID NO: 89782 - DNA, 1854 bp, Artificial Sequence
  derived and/or modified sequence
atgcataagaccgccagccaacgcctctttccgggaccgtcctaccagaatatcaagagtatcatggaggactcaaccattcttagcgactggaccaactcgaataagcagaagatgaagtacgacttctcatgcgagttgtacagaatgtcgacgtactccacgttcccagcaggagtgccggtgtcggaaaggtctttggcacgagccggattttactacactggcgttaatgacaaagtcaagtgcttctgttgcggacttatgctcgataattggaaattgggcgattcacctatccaaaaacataagcagctgtatccgtcatgcagtttcatccaaaacctggtgagcgcctcgctcggctccacttccaagaacacttctccgatgcgcaatagctttgcccactccctgtcgccgactctggaacattcctccctgttctccggatcgtactcaagcctctcaccaaacccactcaactcaagagcggtggaagatatttccagctcacgcaccaatccttactcgtatgccatgtccactgaggaggcccggttcctcacctaccatatgtggccgcttaccttcctctcgccgtccgagctggccagagctggcttctactacatcggcccgggcgaccgcgtcgcctgtttcgcatgtggaggaaagctgagcaactgggagccgaaggacgacgccatgtccgagcaccggcgacactttccgaattgtcccttcctggagaactcactcgaaacgctccggttctcaatctcgaatctgtcaatgcagactcatgcggcgagaatgcggaccttcatgtactggccgtcaagcgtgcctgtgcagccggaacagctggccagcgcgggtttctattacgtggggagaaacgacgatgtgaagtgcttttgctgtgacggtgggttgcgctgctgggaatcgggggatgacccgtgggtcgagcacgctaagtggttcccgaggtgcgagttcttgattcgaatgaaaggacaagaatttgtcgatgaaatccaggggcgctacccacacctcctcgaacagctcctgtccactagcgatactactggggaagaaaatgcagaccctccgatcattcatttcggacctggagagagctcgtccgaagatgccgtgatgatgaataccccggtcgttaagtcggcgctggagatgggcttcaatcgggacctcgtgaaacagacggtgcagagcaagatcctcactactggggagaattacaaaactgtgaacgatatagtatcggctttgctgaatgcagaagatgagaagcgggaggaggagaaagaaaagcaggcggaagaaatggcatccgacgatctgtccctcattagaaagaaccggatggccctgttccagcagctgacctgtgtactgccaatcctggacaacttgctgaaggccaacgtgatcaacaagcaagagcacgatatcatcaagcagaaaactcaaatcccgctccaggcacgggaattgatcgacaccatccttgtgaagggaaatgccgcggctaacatctttaagaattgcctgaaggaaatcgacagcactctttacaagaacctcttcgtggacaagaatatgaaatacatcccaactgaggacgtgtccggactttctctcgaggaacaactgcggcgcctccaggaagaaagaacttgcaaggtgtgcatggacaaggaagtcagcgtggtgttcatcccttgcggtcacctcgtggtgtgccaggagtgtgcgcccagcctcaggaaatgcccgatttgccgcggaatcatcaaggggactgttcggaccttcctttca

SEQ ID NO: 89783 - DNA, 1854 bp, Artificial Sequence
  derived and/or modified sequence
atgcacaagacggccagccaacgcctttttccgggacctagctatcaaaacatcaagagcatcatggaggacagcaccatactgtccgattggaccaactctaacaaacaaaagatgaagtacgatttcagctgcgagttgtaccgaatgtccacgtacagcacgtttccagcgggtgtgccggtgtcagagcggagcctggcgagagctggcttttactatacaggcgttaatgacaaggttaagtgcttctgctgtggtctgatgctggacaattggaaactgggggattcgcctatccagaagcataagcaactgtatccttcttgttcctttatacagaaccttgtgagcgcatctctcggaagcacgagcaagaacacgagcccgatgcgcaactctttcgcccacagcttgtcaccaaccctggagcatagctccctgttctctggtagttatagcagccttagcccgaacccactgaattctagagccgtcgaagacattagcagtagccgcacgaatccttatagctacgcaatgagcacggaagaggcgcgcttcctgacgtatcatatgtggccactgacctttctctcgccgagcgagctggcgcgcgctggcttctactacattggcccgggtgaccgcgtggcgtgcttcgcatgcggcggtaagctgtctaattgggaacctaaagatgacgcaatgagtgaacaccgtcgtcatttccccaactgtccctttttggagaacagtttggagactctgcgctttagcatcagcaacttgagtatgcagacccatgccgcacgtatgcgcacttttatgtactggccaagcagcgtgcctgtgcagcctgagcaattggcgtccgccggtttttattacgttggccgcaacgatgacgtgaagtgtttctgttgcgatggcggcctccggtgttgggagagtggagatgacccgtgggtggagcacgccaagtggttcccacgctgtgagtttctgatccgcatgaaagggcaagaatttgtagatgagattcagggtcgctacccacatctgctggagcaactgctgtccacctctgataccacgggtgaggaaaacgcagatcctcctatcatccactttgggcccggcgagtcctcaagcgaggacgcggtcatgatgaacacccctgtggttaagtccgcgctggaaatggggtttaatcgtgatctggtgaaacagactgtccagtctaagatcctaaccaccggggagaactataagactgtgaacgacattgttagcgccctactgaacgccgaagacgaaaaacgcgaggaggaaaaggagaagcaggcagaggaaatggcatctgacgacttgtcactgatcaggaagaatcgcatggctctcttccaacagctcacgtgtgtgctgcccattctggataacctactaaaagcgaacgtgattaacaaacaggaacacgatatcatcaagcagaagacgcagatcccgctgcaggcaagggagctgattgatacaatcctggtcaaaggtaatgccgctgcgaatatctttaaaaactgcctgaaggaaattgatagcacgttatacaaaaacctgttcgtcgacaaaaacatgaagtatatacctaccgaagacgtctccggactctcattggaggaacagctgcgcaggctgcaagaggaacgaacctgcaaggtgtgcatggacaaggaagtgagcgtcgtttttatcccatgcgggcacctggttgtttgtcaagaatgcgcgccatctttgcgcaaatgccctatctgcaggggcatcatcaaaggtactgtgcgcaccttcctttcc

SEQ ID NO: 89784 - DNA, 1854 bp, Artificial Sequence
  derived and/or modified sequence
atgcataaaaccgcctcccaaagactgttcccaggaccgagctaccaaaacattaagtcgattatggaggatagcaccatcctctccgattggactaactccaacaagcagaagatgaagtacgacttttcatgtgaactctaccggatgtccacttactccacttttcctgcaggtgtcccagtctcggaacggtcactggcaagagcaggattctactacaccggagtgaatgacaaagtgaaatgtttttgttgcggcctgatgttggataactggaagctgggagattcccctatacaaaagcataagcaactttacccgtcgtgttcgtttatccagaacctggtgtcggcatcgctgggttcaacttcgaagaacactagccctatgcgcaattcgtttgcacattccctgtcgccaacgttggaacattcatctctcttctcgggttcatactcgtctctctcgcctaatcctctgaatagccgtgcggtggaagatatttcctcctccaggaccaacccttattcatacgccatgagcaccgaagaggcacgattccttacttatcatatgtggcctctgacctttctgtcgccaagcgaacttgcacgcgcaggcttctactatatcggtccgggtgatagagtggcgtgctttgcatgcggaggcaaactcagcaactgggagcctaaagatgatgccatgtccgagcatcggagacattttccaaactgtcctttccttgaaaattcgctggaaactttgcggttttccattagcaatctcagcatgcaaacgcacgcagcaaggatgcgcaccttcatgtactggccctcgtcagtgccagtccagcctgagcagcttgcatcagcgggcttctactacgtcggacggaacgatgacgtgaaatgcttctgttgtgatggagggcttagatgctgggaatcgggagatgatccttgggttgagcacgccaaatggttccctaggtgcgaattccttataagaatgaagggacaagagttcgtcgatgagattcaggggaggtacccacatcttctcgaacaactgttgtcgaccagcgacaccaccggtgaggaaaatgctgatcccccaatcatccacttcggtcctggcgagtcgtcgtcggaggatgcagtgatgatgaatactcctgtcgtgaaatcagcattggagatgggctttaatcgagatttggttaagcagacggtccaatcaaagattttgaccacgggtgagaattacaaaaccgtgaatgacattgtgagcgcgctcctgaacgccgaggacgaaaagcgcgaagaggaaaaggagaagcaggcagaagaaatggcaagcgatgacctttcgcttattcgcaagaacagaatggccctgtttcagcagctcacctgtgtcctgccaattcttgacaatcttctgaaggcaaacgtgattaacaagcaagagcatgacatcattaaacaaaagacccagatccctctccaagccagagagctcatcgacactattcttgtcaagggtaacgcagcggccaacattttcaagaactgtctgaaggagattgactcgaccctttacaagaacctgttcgtcgataagaacatgaagtacataccgaccgaagatgtaagcggactttcacttgaagagcaacttcggagacttcaggaggaaagaacttgtaaggtgtgcatggataaagaggtgtcagtggtgtttattccatgtggacatcttgtggtgtgtcaagagtgcgcgcctagcctcaggaaatgccctatctgtaggggtatcattaagggcacggtgcggaccttcctttcg

SEQ ID NO: 89785 - DNA, 1854 bp, Artificial Sequence
  derived and/or modified sequence
atgcataagacggcctctcaacggctgttccctggtccttcataccagaacatcaagtcgataatggaagattccaccattctgtcagattggaccaactccaacaagcagaaaatgaagtacgatttttcgtgcgagctctacagaatgtcgacctactcaacttttccagcaggggttcctgtctctgaacggtcactggcgcgtgcaggattctactacactggcgtgaatgataaggttaaatgtttctgttgcggccttatgcttgacaactggaagctgggggactccccaattcaaaagcataaacagctttacccttcctgtagctttattcagaatttggtgtcggcatcgcttggaagcactagcaagaacactagcccaatgaggaatagctttgcacactcgctgtcccccacgctcgaacactcgtctctgttcagcggctcctacagtagtctcagcccgaatcctttgaactcccgggcggtggaggacatttcttcgtcccgtacgaacccatactcttacgccatgagcaccgaggaagcaaggtttcttacgtaccatatgtggcccctgacctttctttccccaagcgaactcgcaagagctggtttctactacataggtcctggagatagggtggcgtgcttcgcatgtggggggaaactctcaaactgggaaccaaaggatgatgcaatgtcagaacacaggcgtcattttcctaattgcccttttcttgagaattcgcttgagacgcttagattctccattagcaacctctctatgcagacccatgcagccagaatgagaaccttcatgtactggcccagctcggttcccgtccagccggaacagctggcctccgcaggtttttactatgttggacgaaacgacgacgtcaagtgtttttgctgtgatggaggtcttaggtgctgggaatcgggagatgatccctgggtggaacatgcgaagtggttcccacggtgtgaattcctcatcagaatgaaagggcaggagttcgtcgacgagatccagggaagatatccccacttgctggagcaacttctgtcgacctccgacaccaccggagaagaaaatgccgatcccccgataatccactttggacctggtgaatcatcatccgaagatgctgtcatgatgaacaccccagtagtgaagtccgcactggagatgggttttaaccgcgatttggtgaagcagactgtgcaaagcaagattctgactactggagaaaactacaaaactgtgaacgatattgtgagcgccctcttgaacgcagaggacgagaaacgggaggaagagaaggaaaagcaagctgaggaaatggcatccgacgatttgtcgcttattagaaagaatcgtatggcactgtttcaacaactgacttgtgtgcttcctatcttggacaaccttttgaaagcaaatgtgataaacaagcaggaacacgacattatcaaacaaaagacccagatccctctgcaagcaagggagcttattgatactatcctggtgaaaggcaacgcagctgccaacattttcaagaattgtcttaaggagatagacagcactctgtataagaatctttttgtggacaaaaacatgaaatacatcccgactgaggatgtgtcaggactgtcattggaagaacaattgcgtcgcctccaagaagaacggacctgcaaggtatgtatggataaggaggtcagcgtggtgtttattccttgcggtcaccttgtggtctgtcaagaatgtgccccgagcctccgaaagtgccctatttgtcgcggaattatcaaggggaccgtgcggacttttctgagc

SEQ ID NO: 89786 - DNA, 1854 bp, Artificial Sequence
  derived and/or modified sequence
atgcacaagactgcgagccagaggctctttccaggaccatcttaccagaacatcaagtccatcatggaagacagtaccattctcagcgactggaccaattcaaacaagcagaaaatgaagtatgattttagctgcgaactttacagaatgagtacctattccacattcccggccggcgtgcccgtgtcagagagatcactggcacgagccggattttactataccggcgtaaacgataaggttaaatgtttttgttgcggacttatgttggataattggaaactgggcgattctcccattcagaagcataaacagctatacccttcttgcagctttattcaaaacctggtcagtgcttcactggggtccacaagcaaaaataccagtcctatgcgaaactctttcgcccacagcctgagtcctactttagaacatagctcgctgttcagcggttcctattcgtccctcagtcctaatcctctgaactcccgagctgttgaggacatctcgtccagccgaacaaacccctattcctacgcaatgtctaccgaggaggccagattcttgacctaccacatgtggcctcttaccttcctctctccttcagagctcgccagggccggcttttactacattggccccggcgatcgagtcgcctgcttcgcctgcgggggaaagctttcaaattgggaacccaaagacgacgccatgagtgagcatagacgacatttcccgaactgtccctttctcgaaaattctttggagaccctacgattctccatctccaatttgagtatgcagacgcacgcagccagaatgaggaccttcatgtactggccttcgtcagtccctgtccagcccgagcagctagccagtgctgggttttactatgtgggtcgaaacgatgatgtgaagtgcttctgctgtgacggagggctcaggtgctgggagagtggagacgatccctgggtcgaacacgcaaaatggtttcccaggtgtgaatttctaatacgaatgaagggacaggagttcgtagatgaaattcaggggcgatatccacatctgttagagcagttactgtccacctctgatacaactggcgaggagaacgcggacccgcccataatccatttcggtcctggagaatcaagttccgaggatgcagtaatgatgaacacacccgtggtcaaaagcgccctggaaatgggtttcaaccgagatttagtgaaacagaccgtgcagtctaaaatcctgaccaccggtgaaaattataagacggttaatgatatcgttagcgcacttttaaatgcggaggacgagaaacgtgaagaggaaaaggaaaagcaagcagaagagatggctagtgacgacctgtctttgattcgaaaaaacaggatggctctctttcagcagttgacttgtgtgctgcccattctcgataacctgttaaaggccaacgttattaataaacaggagcacgatatcattaagcagaaaactcagattcctttgcaggcccgagaacttatcgataccatcctcgttaaaggtaatgctgcggctaatatatttaaaaactgcctcaaggagatagattctacgctttacaaaaacttgttcgtggacaaaaacatgaaatatatacctacagaagatgtgtcgggactttcgttggaagagcagctaagacgcttgcaggaggagcgcacctgtaaggtgtgtatggataaggaggtcagcgtcgtgttcattccctgcgggcacctagtcgtctgccaggaatgcgctccctccctccgaaagtgcccaatttgtagggggatcatcaaagggacagttcgtacatttttatct

SEQ ID NO: 89787 - DNA, 1854 bp, Artificial Sequence
  derived and/or modified sequence
atgcataaaacagcttcgcagcggttgttccccggtccgtcgtaccagaatattaaatccatcatggaggacagcacgatcttgagcgattggactaatagcaataaacagaaaatgaagtacgactttagctgcgagttgtaccgaatgtcaacgtactctacattccccgctggtgtgccagtgagcgagaggtcccttgctagagcagggttttactatacgggcgtgaatgataaggtcaagtgcttctgctgcggacttatgctggataattggaaactaggtgattctcctattcagaagcacaagcagttgtatccctcctgttcatttattcagaatctcgtgagtgctagcctcggcagcacctctaaaaacacctctccaatgaggaatagcttcgctcattcgctgtctcctacgcttgagcactcttcattgttctctgggagttactcatctttgtccccaaacccactaaattcaagagctgttgaggatataagctccagccgtactaacccttactcttatgccatgagcactgaagaggccagatttctcacataccatatgtggcctctgaccttcctaagtccctccgaattagcccgggcaggtttttattatataggacccggggaccgggtggcttgctttgcttgcgggggcaaactaagcaattgggaacctaaggacgatgccatgagtgagcataggaggcattttcccaattgtccattcctggaaaactcgctagagacattacgattttctatctctaatctgtccatgcaaactcatgctgcccgcatgcgcacattcatgtactggcccagcagcgtccctgtccaacctgagcagcttgcctcagctgggttttattatgtgggtagaaacgacgatgttaaatgcttctgttgcgacggcggtctcaggtgctgggaatctggcgatgacccatgggtggagcacgcaaagtggtttccgcggtgcgagttccttatcaggatgaaaggccaggaatttgtggacgagatccagggacgttacccgcatctgttggagcaactcctgtctacctctgacactacaggagaggaaaacgcagacccacccattatccattttggtcctggggaaagcagctccgaagatgcagtgatgatgaatacaccagtggttaagtctgctctcgagatgggcttcaatcgagacctggtgaaacagaccgtgcagtccaaaattttaacaaccggtgagaattacaaaactgttaacgatatcgtgtcagccctactcaacgcagaggatgaaaagagagaagaagagaaagaaaagcaggccgaggagatggcaagtgatgacctctccctgatcaggaaaaataggatggctctcttccagcagttaacctgcgttttgcctatcctcgacaatttactgaaggcgaatgtcatcaacaagcaggaacatgacataataaagcagaagactcaaattcctctccaggcaagggagctgattgacactatacttgtaaagggaaatgcggctgccaatatctttaagaactgcttgaaggagatcgatagtacactgtacaaaaatttgtttgtggacaagaacatgaagtatattcctaccgaagacgtttctggcttgtctctggaagaacagcttcgacgattgcaggaagagaggacatgcaaagtatgtatggacaaagaggtgtctgtagtgttcattccctgcgggcacctcgttgtgtgccaggaatgcgccccttccctgcgaaagtgcccaatctgccgaggcataattaagggaaccgtgaggaccttcttgagc

SEQ ID NO: 89788 - DNA, 1854 bp, Artificial Sequence
  derived and/or modified sequence
atgcacaagaccgcgagccaaaggctttttccaggcccttcatatcaaaacattaagagcataatggaagattccactattctgtccgactggaccaactctaacaagcagaagatgaaatacgatttttcatgcgaattgtaccggatgtccacttacagcacctttcctgcaggcgtccctgtgtcggagagatccctcgcgcgagcagggttttactacactggggtcaacgataaggtcaagtgtttttgttgtgggcttatgcttgataactggaagctgggcgactcacccattcaaaagcataaacagctttaccctagctgttcatttatccaaaaccttgtctccgcatccctgggatctacttccaagaacacttcaccaatgcgcaactccttcgcccattccctgtcccccaccctggagcattcatcacttttcagcgggtcctactcatcccttagcccgaatcccctgaattcaagggctgtcgaagatatatcctcgagccgaaccaacccatactcatacgccatgtcgaccgaagaagcacggtttcttacctaccacatgtggccactgacctttctgagcccttctgaacttgcacgcgcaggtttctattacataggacctggtgaccgggtggcctgttttgcatgtgggggtaagctctcgaactgggaacctaaagacgatgccatgtcggaacaccgtcgccattttcctaattgtccgttcctggaaaactcacttgaaaccctgcgattctccatatcaaatttgtctatgcaaactcatgccgcaaggatgcggacttttatgtactggccatcctccgtgccggtgcagcctgagcagcttgctagcgctggattttactacgtgggaagaaacgacgatgtgaagtgtttttgctgtgacggcggccttaggtgttgggagtcgggagatgacccttgggtagagcatgccaagtggttcccaaggtgcgagttcctgatcagaatgaaaggccaagagttcgtggatgaaattcagggtaggtacccccatttgctggagcaactgctttccacctccgatacgacgggagaagagaatgcagacccaccgatcatccacttcggcccaggagaaagttcatccgaagatgcggtgatgatgaatactcctgtggtgaaatcagcactcgaaatgggatttaaccgagatctggtgaaacagaccgtgcaatccaagattctgactaccggagaaaactacaagacggtgaacgatattgtctcagcacttctgaatgccgaagatgaaaagcgtgaagaggaaaaggaaaaacaagctgaagaaatggcgtcagatgatctgtcccttatccgtaagaacagaatggcactctttcaacaacttacgtgtgtcctgcctatcctcgacaatctccttaaagcaaacgttatcaataagcaggaacatgacataatcaaacaaaagacccagattcctctccaggcacgcgaactgattgatacgatcctcgtgaaagggaacgcggcagcgaacattttcaagaactgtcttaaggaaatagattccaccctgtacaaaaaccttttcgtggacaagaatatgaagtatattcccactgaagatgtgtctgggctctcacttgaagaacaactgcgcaggctgcaggaagaacggacttgcaaggtgtgcatggataaggaagtgtcggtggtgtttatcccgtgtggacacctggtggtgtgccaagaatgcgcaccctcccttcgtaagtgtcctatctgtagaggtattatcaagggtactgtgagaacctttcttagc

SEQ ID NO: 89789 - DNA, 1854 bp, Artificial Sequence
  derived and/or modified sequence
atgcacaagaccgcaagtcagcgtctttttccggggccctcctatcagaatatcaagagcataatggaggactccaccatcctgagtgactggaccaacagcaacaagcaaaaaatgaaatacgattttagctgtgaactgtaccgcatgtccacctattcaacgttcccagcgggcgttcctgtaagtgagaggagcttggcccgcgccggcttctattataccggagtgaacgacaaagtgaaatgtttttgttgtggcctgatgttggataattggaaactgggcgatagtcccattcagaagcataaacaactgtacccaagctgctcatttatccagaacctagtgagtgcctccctgggttccacaagcaaaaacactagccccatgcgtaactcattcgcccattcactctcccctacattggagcactcctcactcttcagtgggtcctacagctccctctcccctaatccactgaatagtagggccgtggaggacatcagtagtagccgaacaaacccttattcttatgcaatgagcaccgaggaggcaagattcctgacttatcacatgtggccattaacattcttgagcccatcggagctggcacgggccgggttctactacattggccctggagaccgcgtggcttgtttcgcctgtggtggcaagctgtccaattgggaacccaaggatgacgccatgtcagaacatcggcgccacttcccaaactgccccttcctggaaaacagtctcgaaacccttagattcagcatttccaatttgtccatgcagacacacgctgctcgcatgcggacttttatgtattggccttcctctgtgcccgtgcagccagagcagctggcctctgcaggcttctattacgtaggtcggaatgacgacgtgaagtgtttctgttgcgacggtggactgagatgttgggagtcaggagatgatccttgggtggagcatgcgaagtggtttcctagatgcgaatttttgattcggatgaagggccaggagttcgtcgacgagatccaaggtagatacccacacttgctggaacagctcctcagcacttcggatactacgggagaagagaatgccgacccccctataatacattttggtcctggggagtcatcctcggaggacgctgtaatgatgaacaccccagtggtgaagagcgccctcgaaatgggcttcaaccgagatttagtcaagcagacagttcagtctaagatcctgaccactggcgagaattataaaactgtgaatgatatcgtgtccgccctcctaaacgctgaagatgagaaacgggaggaggaaaaggagaagcaggctgaggagatggcatccgacgacctgagcctgatcagaaagaaccgtatggctctcttccagcagctgacctgcgtgctgcctatcctcgacaacctgctgaaggctaatgtcatcaataaacaggagcacgatataatcaaacagaagacccagatccccctccaggcacgcgagcttatcgacactattctcgtcaagggcaatgcagccgccaatatctttaaaaattgcttaaaggaaatagattccacactgtacaagaatctgttcgtcgacaaaaatatgaaatacattccgactgaagatgtatcaggcctgtccttggaagagcagctcaggaggcttcaggaagaaaggacctgtaaggtctgcatggacaaagaagtgagtgtagtgttcatcccctgtggccatcttgtagtatgtcaggagtgcgccccttcattgaggaaatgtcctatctgcagagggatcatcaagggcactgtccgcaccttcctgagt

SEQ ID NO: 89790 - DNA, 1854 bp, Artificial Sequence
  derived and/or modified sequence
atgcacaaaaccgcaagccaacggcttttccctggcccgtcataccaaaacattaagtctatcatggaagattctacgattctgtcggattggaccaattccaacaaacaaaagatgaagtatgacttctcgtgcgaactctacagaatgagcacgtactcgacctttccagcaggtgttcctgtctcggagcggtcactcgcacgcgccggattttactacactggggtgaatgataaggtgaaatgtttttgttgtgggcttatgcttgataattggaagttgggggattccccgatccaaaaacataaacaactttacccttcatgttcatttatccagaacctggtgtcggcgtccctgggcagcacctccaagaatacctcaccaatgagaaactcgttcgcccactccctgagccctaccctggagcattcatctttgttttcgggatcctattcatcgctgtcaccaaacccccttaattcgagagccgtggaggacatctcaagcagcagaaccaacccttactcatacgccatgtctaccgaagaggcaaggtttcttacctaccatatgtggcctttgacctttttgagcccttcggagcttgcacgagcaggattctactacattggcccaggagatcgggtcgcatgtttcgcgtgcggaggaaaactgtccaactgggaacctaaggatgacgcaatgagcgaacatagaaggcattttcctaattgtccattcctggaaaattcgctcgaaactcttcgcttctcaatttccaatctttcaatgcagactcatgcagcccgcatgagaacctttatgtactggccatcttcggtgcctgttcaacctgaacagctggcctcagcaggcttttactacgtgggccggaacgatgatgtgaagtgcttttgttgcgatggggggcttcgttgttgggaaagcggcgacgacccttgggtcgaacacgccaaatggtttccaaggtgtgaatttctgattagaatgaagggccaagagtttgtcgacgaaatacagggacgttatcctcacctcctcgaacaactgctgtcgacctcggatactaccggcgaagagaacgcggaccctccgatcattcatttcggaccgggagaaagctcatcggaagatgccgtgatgatgaatactcctgtagtgaagtccgcactggaaatggggtttaacagggaccttgtgaagcaaactgtccaatcgaagattctgaccactggtgagaattacaaaacggtcaacgatatagtgtccgctctgcttaacgcggaggacgagaagcgggaagaagaaaaagaaaagcaagcagaggaaatggcgtcggacgacctctcgctgattcgcaagaacaggatggcactctttcaacagctcacctgtgtgctgccaattcttgacaacctgctgaaagcaaacgttatcaataagcaggaacacgatatcattaaacaaaagacccagatccctctgcaagcaagagagcttattgatacgattctggtcaaaggtaacgcagcagcaaacatcttcaagaattgccttaaggaaatcgatagtactctttacaagaacctgtttgtggacaagaacatgaagtacatcccgactgaggacgtgtccgggctcagcctggaagagcaactgagaagattgcaggaagagaggacctgcaaagtctgtatggacaaagaagtatcagtcgtgttcattccatgtggacatctggtggtgtgccaagaatgtgcaccttcccttcgaaagtgccccatatgtcgcggtattatcaaggggactgtgcgaacctttctgtcg

SEQ ID NO: 89791 - DNA, 1854 bp, Artificial Sequence
  derived and/or modified sequence
atgcacaagaccgcctcccagcgtctctttccaggcccctcctaccaaaacatcaagtccatcatggaggactccacaatcctgtctgattggactaatagtaataaacaaaagatgaagtatgatttctcctgcgagctataccggatgtcgacgtacagcaccttccctgcaggtgtgcccgttagtgagcggtcgctcgcccgcgccggtttctactacactggcgtgaacgataaggtcaagtgtttctgttgtggcctcatgctcgataattggaagctgggtgatagccccattcagaagcacaagcagctttacccctcctgctcgttcatccagaacctcgtttccgcctctcttggatcaacgagtaagaacaccagccccatgcggaactcgttcgctcactctttgtcgcctaccctcgaacactcttccctgttctccggctcgtatagctcgctgtctccaaaccccctcaattcgcgtgctgtcgaggacatctcctccagccgtacgaatccttattcgtatgctatgagcaccgaagaggctcgcttcctgacataccacatgtggcctttgacctttctatcgccttccgagctggcacgcgccggcttctattatatcggccccggagatcgtgtcgcctgctttgcctgcggcggcaaactcagcaactgggagcctaaggatgatgccatgtccgagcatcgccggcattttcctaactgcccctttttggagaactcgctcgagacgctcaggtttagcatttccaacctttccatgcagacccacgcggccagaatgcggaccttcatgtactggccttccagcgtcccggtccagccagagcagctcgcctctgccggtttctactacgtcggacgtaacgatgatgtcaagtgcttctgctgcgatggcggcttacgctgttgggaatccggcgacgacccttgggtcgagcatgctaagtggttccctcgctgtgagttcctcatccgcatgaaagggcaggagtttgttgacgagatccagggccgttacccacacctgcttgagcagctgctttctacgtccgatacgaccggtgaggaaaacgcggacccgcccatcatccacttcggtcctggtgagtcctcatctgaggacgctgtcatgatgaacacccccgtcgtgaagagcgctctcgagatgggtttcaatagagatctggtcaagcaaaccgtgcagtccaagatcctgacaactggagagaactacaagaccgtcaacgacatcgtgagtgccctcctgaacgcggaggatgagaagcgtgaggaggagaaggagaagcaggcggaagagatggcgtccgacgacctctccctgatccgcaagaaccgcatggccctgttccaacagctgacgtgcgtattgcccattctggacaacctgctaaaagctaatgtcatcaacaagcaggaacacgacattatcaagcagaagacgcagattcccctccaagcgcgtgaacttatcgacacgatcttggtcaagggcaacgcggcggcgaacatcttcaagaactgcctcaaggaaatcgattccacgttgtacaagaatctcttcgtcgacaaaaacatgaagtacattcccactgaggacgtctctggcctgagcttggaggagcagctgagacgcctccaggaagagcgcacatgcaaggtgtgcatggacaaggaggtcagcgtcgttttcattccctgcggccacctggtcgtctgccaggagtgcgccccatctctccggaagtgcccaatctgtcgcggtatcattaagggcaccgtgcgcactttcctatcc

SEQ ID NO: 89792 - DNA, 1854 bp, Artificial Sequence
  derived and/or modified sequence
atgcacaaaactgcatctcagcgcctgtttcccggcccttcttatcagaatataaagagcatcatggaagattctaccatcttatctgattggactaattccaataagcaaaagatgaagtatgatttctcttgtgaactgtaccggatgagcacttacagcacatttcctgcaggcgtgcccgtgtcagagcgaagtctggcaagagctggcttctattatacaggggtgaatgacaaggttaagtgcttctgttgcggattgatgctagacaattggaaactgggggattccccaattcagaaacataaacagctttaccctagttgttcttttatccaaaatcttgtgagtgccagcctggggtccacctcaaagaatacttcccctatgagaaattcttttgctcattctctttctccaacactggagcacagctctctgtttagtgggagttactcgagcctatcacctaatcccctgaatagcagagccgtggaggatatatccagctctcgcaccaacccgtattcttacgccatgagcactgaggaggcgagattcttaacctatcacatgtggcccttgacttttctgagtccttctgaactggcccgcgcagggttttattacattggacccggtgatagagtcgcgtgcttcgcatgcggaggtaaactctccaactgggagcccaaggacgacgccatgagcgagcatcgcagacacttccctaactgccccttcttggaaaacagcctggagacccttaggttctcgatctccaacctgtccatgcagacacacgccgcacgcatgaggacctttatgtactggcctagttcagtgccggtccagccagagcagttagctagcgccgggttctactacgtgggacgtaacgatgacgtgaaatgtttctgttgcgacgggggtctgcgctgctgggagtctggcgacgatccctgggtggagcacgcaaagtggttcccaagatgtgaattcctgatccggatgaagggccaggagttcgtagacgagatccaggggcgatatccccacctgctggaacagctgttatccaccagcgacacgactggagaagagaacgcagacccccccatcatccacttcggaccaggagagagttccagcgaggatgccgtgatgatgaataccccggtcgtgaaatcagccctggagatgggattcaatcgcgatcttgtcaagcaaacagtccaatccaaaatattaaccaccggcgaaaattacaagactgtcaacgacatagtctcagctctgctaaacgccgaggacgaaaagcgcgaagaggaaaaagagaaacaggcagaggagatggcctccgacgacctatccctcatacgcaagaacagaatggcactttttcagcaattgacctgcgtcttgcctatattggataatctcctgaaggccaatgtaattaataaacaggaacacgatatcatcaagcagaagactcagatcccgctgcaagcaagagagctcatcgataccattctcgtgaagggaaacgctgctgctaatatcttcaagaattgcttgaaggagattgatagcaccctgtataaaaatttgttcgtggataagaatatgaaatatatcccaaccgaggatgttagcggcctcagcctggaagaacaactgaggcgcttgcaggaagagagaacatgcaaggtgtgtatggacaaagaagtgagcgtggtgtttatcccatgtgggcacctggtggtctgtcaggagtgtgcccctagtctcagaaaatgccccatctgtcgagggatcattaagggcacagtgaggacttttctgtct

SEQ ID NO: 89793 - DNA, 1854 bp, Artificial Sequence
  derived and/or modified sequence
atgcataaaactgcatcacaaagactttttccaggaccatcttatcaaaacattaaatcaattatggaagattcaactattttatcagactggacaaattcaaataaacaaaaaatgaaatacgacttcagttgtgaattatatagaatgtcaacttatagtacttttcctgcaggagttccagtatctgaaagatctttagctagagcaggattctattatacaggagtaaatgataaagtaaaatgtttttgttgtggtttaatgcttgacaattggaaacttggagattcaccaattcaaaagcataaacaattatacccttcatgttcttttattcaaaatcttgtttcagcatcattaggtagtacttcaaaaaatacctctccaatgagaaattcattcgcacattcacttagtcctacactagagcattcatctttattttcaggttcttacagtagtttaagtccaaatcctttaaatagtagagctgtagaagatattagttcatctagaactaatccttattcatatgctatgtctacagaagaagcaagatttcttacctatcatatgtggccattaacttttttatctccatcagaattagctagagcaggattttattatataggacctggagaccgtgttgcatgtttcgcatgtgggggtaaattaagtaattgggaaccaaaggacgatgctatgtcagaacacagacgtcactttcctaattgtccatttttagaaaattcactcgaaacattaagatttagtatttctaatttaagtatgcaaacacatgctgcaagaatgcgtacatttatgtattggccttcatcagttcctgttcagcctgaacaacttgctagtgctggattctattacgttggaagaaacgatgatgtaaagtgtttttgttgtgatggaggacttagatgttgggaatcaggtgatgatccatgggtagaacatgcaaaatggtttcctagatgtgaatttttaattagaatgaaaggacaggaattcgttgacgagattcaaggaagatatcctcatcttcttgagcaattattaagtacttcagatacaacaggagaagaaaacgctgatccacctattattcattttggaccaggtgaatcaagttcagaagatgcagttatgatgaatactccagtagtaaagtcagcacttgaaatgggatttaacagagatttggttaaacaaacagttcaaagtaaaattttaacaacaggagaaaattataaaacagtaaatgatatagttagcgcattattgaacgcagaagatgaaaaaagagaggaagaaaaagaaaaacaagctgaagaaatggcttcagatgatttatctcttataagaaaaaacagaatggctttattccaacaattaacatgcgttttaccaattttagataatttattaaaagctaatgtaattaataaacaagaacatgacataattaaacaaaaaactcaaattcctttacaagctagagaacttattgatacaatcttggttaagggaaatgctgctgcaaatatttttaaaaattgtttaaaggaaattgattcaacactatataaaaatttattcgttgataaaaatatgaagtatattcctacagaggatgtttcaggattatcgcttgaagaacaactcagaagattacaagaggaaagaacatgtaaagtttgtatggataaagaagtaagtgttgtttttataccatgtggacatttggtagtctgtcaagaatgtgcaccaagtcttagaaaatgtccaatttgtagaggtattataaaaggaacagtaagaacatttttatct

SEQ ID NO: 89794 - DNA, 1854 bp, Artificial Sequence
  derived and/or modified sequence
atgcacaagaccgcatcgcaaagactgttccccggccctagctaccagaatatcaaaagcatcatggaagattcgaccattttgtcggattggaccaattccaacaagcagaagatgaagtacgactttagctgcgaactgtacagaatgtcaacgtactccactttccctgccggagtgccggtgtcggagagatcgctggcccgcgccggattctactacaccggcgtgaacgacaaggtgaaatgcttctgctgtggactcatgcttgacaactggaagctgggtgactcgcctattcagaagcacaagcaactgtacccgtcctgcagcttcatccagaacctcgtctccgcctccctgggatcaacgtcgaagaataccagcccaatgcgaaacagcttcgcccactcgctgtctccgactctggaacattcctccttgttttctggatcctattcctcgctgtccccgaaccccttgaactctcgcgcagtggaagatatctcatcctcacggaccaatccatactcgtacgcgatgtccaccgaagaggcgcggttcttgacttaccatatgtggcctctcactttccttagcccttcggaactggccagagctgggttctattacattggaccgggggatcgcgtggcgtgcttcgcttgtggaggaaagctctctaattgggagcctaaggatgacgcaatgagcgaacacaggagacacttcccaaattgcccgttcctggagaactcgctggaaacgctgcgcttcagcatcagcaacctctcgatgcaaacccacgcggcgaggatgcggaccttcatgtactggccttcatcagtgccagtgcagccagagcagctcgcatccgcaggattctattacgtcgggcgcaacgacgacgtgaagtgcttctgctgcgatgggggtctgagatgctgggagtcgggcgacgatccttgggtcgaacacgccaagtggtttccgaggtgcgagttcttgatcaggatgaagggacaggagttcgtggatgagattcaaggcaggtacccacacctgcttgaacagctgctgtccacctcggacactaccggagaagaaaacgccgaccccccgattattcatttcggtccgggagagtcgtcatcggaggacgcagttatgatgaacactcctgtggttaaatcagcactggagatgggctttaaccgggacctcgtgaagcaaaccgtccagtccaagatcctcaccacgggcgaaaactataagactgttaacgacatagtctccgctctgctcaacgctgaggacgagaagagagaagaggaaaaggaaaagcaggcggaagagatggcatcggacgacctgagcctcatccgcaaaaaccgcatggccctcttccagcaattgacttgcgtcttgccaatcctggacaacctgctgaaagctaacgtcatcaacaagcaagaacacgacatcatcaagcagaaaacgcagatcccgttgcaagctcgcgaactcatcgacaccatcctcgtcaagggcaatgccgctgcaaatatcttcaagaactgcctcaaggaaatcgatagcaccctctacaagaatttgtttgtcgataagaacatgaagtatatcccgacggaggatgtgtccgggctgtccttggaggaacagctgcgccggctgcaagaagaacggacctgcaaagtttgcatggacaaagaggtgtccgtggtgttcatcccgtgcggacatctggtggtgtgtcaagaatgcgctccgtcgctgcgcaagtgtccgatttgtcggggaatcataaagggaaccgtgaggaccttcctctca

SEQ ID NO: 89795 - DNA, 1854 bp, Artificial Sequence
  derived and/or modified sequence
atgcataagactgccagccagcgactgtttccggggccaagctatcagaatatcaaatcaattatggaggacagcaccatcctgtcagattggaccaactccaacaagcagaaaatgaagtacgacttctcctgcgaactctatcgtatgtctacttactccaccttcccagccggggtgccagtcagcgagcggtcacttgccagggccggcttttattacactggagtgaatgataaagtcaaatgtttttgctgtggacttatgctagataattggaaactgggggacagtccgattcagaagcataagcagctgtatccatcttgttccttcatccagaatcttgtctctgccagtttaggatcaacgtccaaaaatactagtccaatgcgaaatagcttcgctcattcactctctccaactctggagcactccagtcttttcagcgggtcctatagctccctcagccctaatccactaaacagccgcgccgtcgaggatatatctagctcccggaccaacccctactcatatgccatgtctaccgaagaagcccggttcttgacttatcacatgtggccgctgacattcttatccccaagtgagctcgcccgggccgggttttactatatcggaccgggggatcgggtcgcatgttttgcctgcggtggcaaacttagcaactgggaaccaaaagatgacgcaatgagtgaacatcggagacatttccctaactgtcccttcttagaaaattctttagagaccctcagattttccatatctaatctgagcatgcagactcacgccgccaggatgagaacattcatgtattggccctcttctgttcccgtccagccagagcagctcgcctcagctggattttattacgttggccggaatgatgatgtgaagtgcttctgttgcgacggagggctgaggtgttgggagagcggagacgatccttgggtagaacacgcaaagtggtttcccaggtgcgagttcttaatacgcatgaagggccaggaattcgtggacgaaatccagggtcgctatccccacctcttggaacaattgttgtcgacctccgatactaccggagaggagaacgcagacccccccataattcattttggcccaggggagtcatcatccgaggacgcagttatgatgaacacccctgtggtgaagtcagcactcgagatgggatttaaccgcgatctggtgaaacaaaccgtccagagtaagatcctgaccacaggtgagaattataagaccgtcaacgacattgtgtcggccctactcaatgctgaggacgaaaaaagggaagaggagaaggagaaacaagctgaagaaatggcgagtgacgacttgtctcttatccgaaagaaccgtatggctcttttccagcagctcacttgtgttcttcctattctggacaaccttctcaaggctaacgtgattaacaaacaggagcacgatatcattaaacagaagacacagataccgttgcaggcccgcgagctgatcgacacaattcttgttaaagggaacgccgccgcgaatatttttaaaaattgtcttaaggagatagacagcaccctgtacaagaacctcttcgttgataaaaatatgaagtatattccaaccgaagatgtgtcgggactttcccttgaggagcaactaagaaggctgcaggaagagcgtacttgtaaagtatgtatggataaggaggtgtcagtcgtgttcatcccctgtgggcacctcgtggtctgccaggagtgtgcaccctccttacgaaagtgccccatctgtagaggaatcatcaaaggcactgtgcggacgttcctctcg

SEQ ID NO: 89796 - DNA, 1854 bp, Artificial Sequence
  derived and/or modified sequence
atgcacaagaccgccagccagcggctctttcccggcccatcatatcagaacatcaagtcgattatggaagatagcactattctgtcggattggactaactcgaacaaacaaaagatgaagtacgacttctcctgtgagctttaccgcatgtcgacgtactcgacctttccagcaggtgtgccggtcagcgaacgtagcctcgcaagggctgggttttactacaccggggttaacgataaggtgaagtgtttttgctgtgggttgatgctggataattggaaactcggcgattcaccgatacaaaagcataagcagttgtacccttcctgcagcttcatccaaaacctcgtgtcggcctcactgggcagcacctcgaaaaacacttcgcccatgcgtaattcgtttgcacattccctctcccccaccctcgaacattcctcgttgttcagcgggtcctatagctcccttagcccaaacccccttaatagcagagcagtcgaggacatttcctcctcccgcactaacccatactcctacgcaatgagtacggaagaagcgcgctttctgacctaccatatgtggcccttgaccttcctgtctccgtcagagctcgcccgggcaggattttactacattggtcctggcgatcgcgtggcatgcttcgcatgtggggggaagctctcaaattgggagcctaaggatgatgcaatgtccgaacatcgtagacactttcctaattgtccatttctggaaaacagcctggaaaccctgagatttagcatctcgaacctttccatgcagacccacgccgcccgcatgaggaccttcatgtattggccgtcctcagtgcccgtgcagccagaacaacttgcaagcgccggtttttactacgtcggacgtaatgatgatgtgaagtgtttctgttgtgacggcggtctgcgctgttgggaatcgggtgatgatccatgggtcgaacatgccaagtggtttccgcgctgtgaatttcttatccggatgaagggtcaggagttcgtggacgaaattcaaggacggtatccacatctcctggagcagctcctgtcgaccagcgatactaccggcgaagagaatgccgatccccctatcattcacttcggtccaggagagtcctcctcggaagatgcggtgatgatgaatacgcctgtggtgaagtcggcacttgagatggggtttaaccgagatctggtgaaacaaactgttcagtcaaagatattgaccactggagaaaactacaagaccgtgaacgatatcgtgtccgcactccttaatgcagaagatgaaaagagagaggaggagaaggaaaaacaagcagaggaaatggccagcgacgacctgtctctgataagaaagaatcgcatggcactgtttcagcagctcacctgcgtgcttcctatcttggataacctccttaaagctaacgtgattaacaagcaggaacacgacatcatcaaacaaaagactcaaatcccactccaggctagagaacttattgatactatacttgttaagggtaacgcagccgccaacatcttcaagaactgcttgaaagagattgattcgactctctacaagaacctcttcgtggataagaacatgaagtacatccccaccgaagatgtgtccggactgagccttgaagaacaactccgtaggctgcaagaggagcggacttgtaaggtgtgtatggacaaggaagtctccgtggtctttattccctgcggacatctcgtcgtctgtcaagagtgtgcaccttccttgcgcaaatgtcccatttgcagaggtatcataaaaggaaccgtgagaactttcctttcc

SEQ ID NO: 89797 - DNA, 1854 bp, Artificial Sequence
  derived and/or modified sequence
atgcataagacggccagccaacgcctctttccgggaccttcctaccaaaacattaagtctattatggaggattcgaccatcttgtcggattggactaattcgaacaaacaaaagatgaaatacgatttttcttgtgaactttaccggatgtccacctactcgaccttcccggcaggtgtcccagtgtcggaacgttcgttggcaagagctggtttctattacaccggcgtcaatgacaaagtgaagtgtttctgctgtggactcatgctggacaactggaaacttggcgatagccctattcagaagcacaagcagctgtacccctcatgttcctttatccaaaacctggtgtcggcatccctcggttccacctctaagaatacctcgccaatgcggaattcctttgcacactcgctgtcccctactctcgaacattcatccctgttctctggttcctacagctcactgtcaccaaatccactgaactcccgggcagttgaggacattagcagcagccggaccaatccctactcatacgcgatgtccactgaagaagccagatttcttacctaccatatgtggcctctgacttttctgtcgccctcggaactcgcgagagccggtttttactacatcggtccaggggatcgtgtcgcgtgttttgcatgcggaggtaagctgagcaactgggagccaaaggatgatgccatgtccgagcatcggcggcattttccaaattgtcccttccttgaaaactcacttgaaactctgcgattttcgatatcaaacctctcgatgcaaactcatgccgcgcgaatgagaacgttcatgtattggccttcatccgtgccggtccagccagaacagctggcctcggccgggttctactacgtgggaagaaacgacgacgtgaagtgcttttgctgtgatggcggtctgagatgttgggagagcggggatgatccctgggtggagcatgccaagtggtttccacgctgtgaattcttgatacgtatgaagggtcaagagtttgtggatgaaatacagggccgttaccctcaccttctcgaacaactgctttcgacttcggatactactggagaggaaaatgctgatcctccaatcatccattttggaccgggagaaagctcatcggaagatgcggtgatgatgaacacgccagttgtgaagtccgcactggaaatgggattcaacagggacttggtgaagcagactgtgcaatcgaagatccttaccaccggtgaaaactacaagacggtgaacgatattgtgtctgcgttgcttaacgcagaggatgaaaaacgggaagaagaaaaggagaagcaggcagaagagatggcttcagacgacctgtccctgattaggaaaaatcgaatggcactgttccaacagttgacctgtgtgctcccaatccttgataatctgctcaaggccaatgtgattaacaaacaggaacacgatatcattaaacaaaaaacccagattccgctgcaggcacgggaactcattgataccatactggtgaagggaaacgcagcagcaaatatcttcaagaactgcctcaaggagatcgacagcaccctgtacaaaaacttgtttgtggacaaaaacatgaaatacattcctaccgaagatgtttcaggactctcgctcgaagaacaactgagacggcttcaagaggaaaggacgtgcaaagtgtgcatggacaaggaagtctccgtcgtgttcatcccatgtgggcaccttgtggtgtgtcaggagtgcgcaccatcgttgcgcaagtgtcctatttgtaggggaatcattaaaggaactgtgaggaccttcctgtcg

SEQ ID NO: 89798 - DNA, 1854 bp, Artificial Sequence
  derived and/or modified sequence
atgcataagaccgcgtctcaacgcctgttcccgggcccttcctaccagaacatcaaatcaatcatggaggattcgaccatcctctccgattggacgaattcgaacaaacagaaaatgaagtatgacttcagctgcgaactgtaccggatgtccacttactccacgttcccagccggcgtgccggtgtcggagcgctcactcgcaagagccggcttttactatactggtgtgaacgataaggtgaagtgcttctgttgcggactgatgctggacaactggaagctcggagactcgccgatccagaagcataagcaactgtacccctcctgctccttcatccagaaccttgtgagcgcatcgctgggatcaacgtcgaagaatacttcccctatgcgcaactcgtttgcacattcactgtcaccgactctggagcattcttcccttttctcaggatcctacagctcgctttcgccgaatcctcttaattcgagagcggtcgaagatatctcatcctcaagaactaatccatactcctacgccatgtcgaccgaagaagcccgcttcctcacttaccatatgtggccgctgactttcctgtctccttcggaactcgcgagggcaggtttctactacatcggcccgggggaccgcgtggcatgcttcgcttgtggcggaaaactgagcaattgggagccgaaggatgacgccatgtcggaacatcggcggcattttccgaattgtccgttcctcgagaattccttggaaactttgcgcttctccatctcgaacctcagcatgcaaactcacgcggcgagaatgagaactttcatgtattggccaagcagcgtgccggtgcagcctgagcaactggcttcggcgggattctactacgtgggtcggaacgacgacgtgaagtgtttctgttgcgacggaggactccggtgttgggagagcggggacgatccatgggtcgaacatgctaagtggttcccgcgctgcgaatttcttatccgaatgaagggacaggagttcgtggacgagattcaggggagatacccgcatctgctggaacagctgctgtcgactagcgacaccactggcgaggaaaatgccgaccccccgatcattcacttcggacctggagagtcatcatcagaggacgccgtgatgatgaataccccagtcgtgaaatcagcgcttgaaatggggttcaaccgggatctcgtgaaacagactgtccaatcaaagatcctcactaccggagagaactacaagacggtcaacgacatagtctcagccctgctgaacgccgaagatgaaaagcgcgaagaggaaaaggagaagcaggcggaggaaatggcctccgatgatttgagcttgatccggaagaacagaatggctctcttccagcagttgacctgcgtgctcccgatcctggacaaccttctgaaggcgaacgtcatcaacaaacaggagcatgacattatcaagcagaaaacgcagatcccactgcaggcccgcgagctcatcgacaccatcctggtgaagggcaatgctgccgcaaacattttcaagaattgccttaaagagatcgacagcaccctctacaagaatctgttcgtcgataagaacatgaagtacatccctaccgaggacgtgagcggcctgtctttggaggaacagctgcggagacttcaggaggagcgcacgtgcaaggtctgcatggataaagaagtttcggtcgtgttcatcccctgcggacatctggtggtgtgtcaggaatgcgcaccgtcgttgcgcaaatgcccaatctgtcggggaatcatcaaggggaccgtgaggactttcctttca

SEQ ID NO: 89799 - DNA, 1854 bp, Artificial Sequence
  derived and/or modified sequence
atgcacaaaactgcgtcacagagactgttcccaggaccatcctaccagaacataaagtccattatggaggactcgaccattctgagcgactggacgaactccaacaagcaaaagatgaaatacgacttctcctgcgagctctacagaatgtcgacctactcgactttccccgctggagtgccagtgtccgaaaggtcattggcccgcgcggggttttactacactggagtgaacgacaaggttaaatgcttctgttgcggccttatgctggataactggaagctgggggactccccgattcaaaaacataagcaattgtaccccagctgctccttcatccagaacttggtgtccgcctccctcggaagcacctcaaagaacacctcaccgatgcgcaacagcttcgcccatagtctctcacccaccctggagcattccagcctgttctcaggctcgtactcgtcgctttccccgaatcctctcaactcacgcgccgtggaggacatcagctccagccgcacgaacccgtactcatatgccatgtccactgaggaggctagattcctcacttatcacatgtggcctctgaccttcctgtcgccgtcagaactggcacgtgcgggattctactacatcggtccaggcgaccgcgtggcctgctttgcctgtggcggaaagctctcaaactgggagcccaaggacgacgccatgtcagaacacagacgccacttcccgaattgcccatttctggagaactcactggagactttgaggttctccatctccaacctctccatgcaaacccacgcagcgagaatgcgcaccttcatgtactggccgtcgtcggtcccggtccagccggagcagcttgcttccgcgggattttactacgtcggaagaaatgacgacgtgaagtgcttctgctgtgacggcggcctccggtgctgggagtccggggatgatccctgggtcgagcacgccaaatggtttccacgctgcgaatttctgataagaatgaagggccaggaattcgtcgacgagatccaaggacggtacccacatctccttgaacagttgctttcgacttccgatactactggggaggagaacgcggaccctccaatcatccattttggtccgggagaatcgtcgtcggaagatgccgtgatgatgaacactccagtggtgaagtcagccctcgaaatgggcttcaatcgagatctggtcaagcaaactgtgcaatccaagatcctcactactggagagaattacaagaccgtgaatgacattgtgtccgcgttgctgaacgccgaggacgaaaagagagaagaagagaaggaaaagcaggccgaggagatggcgtcagacgacctcagcctgattcgcaaaaatcggatggcacttttccagcagctgacctgcgtgctccccatccttgacaacctgttgaaggctaatgtcatcaataagcaggaacacgatatcatcaagcaaaagactcaaatcccgctccaggcgcgcgaactgatcgatacgatccttgtgaagggaaacgcagccgcaaacatcttcaaaaactgtctgaaggaaatcgattcgacgctgtacaaaaacctcttcgtcgataagaacatgaagtatattccgaccgaagatgtgtcaggactgtccctggaagagcaattgcggcgccttcaagaagagcggacctgtaaggtgtgcatggacaaggaagtgtcagtggtgttcattccgtgcggacatctcgtcgtttgtcaggaatgcgccccttccctcaggaagtgtccaatctgccgcggaatcattaagggcacggtgagaaccttcctttcc

SEQ ID NO: 89800 - DNA, 1854 bp, Artificial Sequence
  derived and/or modified sequence
atgcataagaccgcttcgcaacggctttttccagggccttcttaccagaatatcaagagtattatggaggatagtacaatcctgtccgactggacgaactcaaacaaacagaagatgaagtacgacttctcctgcgaactctaccggatgtccacctattccacttttcccgccggggtgcctgtgtccgaaagatcgctggcccgggctggattttattatacaggcgttaacgataaagtgaaatgcttctgttgtgggttgatgctggacaattggaaactgggagactctcccattcaaaagcacaagcagctgtacccttcatgctcctttattcagaacttggtatcggcgtcattaggatcaacctctaaaaatacttctccaatgaggaacagcttcgcccatagcctaagtcccaccctggagcacagctctctctttagcggcagctactcatcgttaagccccaacccccttaatagtcgagcggttgaggacattagcagctcccggacgaatccatattcttatgcaatgagtacggaagaggcgagattcttaacctatcatatgtggccactgacgtttctatctcctagtgaactggccagagcagggttttactatattggtccaggggatcgtgtggcttgttttgcttgtggcggcaaactttcaaattgggagccgaaggatgacgctatgtccgagcaccggcgccacttccccaactgccccttcctggaaaactctctggaaactctgcgattctccatcagcaacttgtccatgcagacacatgcggcccgtatgagaacgtttatgtactggccgtcatcagtccccgttcagcctgaacagctggccagtgccggtttttattatgtgggacgcaatgatgatgtgaagtgtttttgttgtgatggtggcctacgctgctgggagagcggcgacgacccgtgggtggagcacgcaaaatggttcccaagatgtgagtttcttatccgaatgaaggggcaggaatttgtagatgaaatccagggccgttacccccatctgttggagcagctcctcagcacctccgacaccacgggcgaagagaacgcagacccaccaataattcatttcggaccaggcgagtctagctccgaggatgccgtgatgatgaatacccctgtcgttaagagcgccctggaaatgggttttaatcgcgatctggtgaaacagaccgtacagtccaaaatcttgaccacaggcgaaaactataagactgtcaacgatattgtgagcgcgctgctaaatgccgaagacgaaaagagggaggaggagaaggaaaaacaggcagaagagatggcctcggacgatctgtctttgatccgcaagaaccggatggctctgtttcagcagctgacttgcgtactgcctattctggacaacttactcaaagcaaatgttattaacaagcaggaacacgatattataaagcagaaaacccagattccactccaggcacgcgaattgattgacaccattttggtcaagggaaacgccgccgctaatattttcaaaaactgccttaaggagatcgattccactctttataagaacctattcgtcgataagaatatgaagtacattccgaccgaggatgttagtggtctgtctctcgaggaacagctgaggcgcctccaggaagaacgcacctgcaaagtgtgcatggataaagaagtctctgtggtgttcataccctgcggacacctggtcgtgtgccaagaatgtgcgcctagtttacggaagtgcccgatctgtcgagggattattaagggcacggtacgtacatttcttagt

SEQ ID NO: 89801 - DNA, 1854 bp, Artificial Sequence
  derived and/or modified sequence
atgcacaagactgcctcacaaaggctgtttccaggcccgagttaccagaatatcaaatcaataatggaggattccactattctgtccgattggaccaacagcaacaagcaaaagatgaagtacgacttcagctgtgaactataccggatgtccacatactctacatttcccgccggggtgcccgtgagtgaacgcagcttagcaagggccgggttctattatacaggcgtgaacgacaaagtgaaatgtttttgctgcggcctgatgcttgacaactggaagctgggggatagcccaattcagaagcacaagcagctctatccctcttgctcatttatccagaatctggttagtgcaagtctagggtctaccagcaagaataccagccccatgagaaattctttcgcacactccttgagtccaacattggagcattctagcctgtttagcgggagctactcatcactatcccctaatcctctaaactcccgggctgtggaggatattagctctagtcgtaccaatccatactcttacgcaatgtcaaccgaggaggcacgcttcctgacctaccatatgtggcctctgacatttcttagtccatccgagttggctcgggcaggattttactacataggtcctggtgacagggtggcatgtttcgcttgtgggggcaaactgagcaattgggagcccaaggacgacgctatgtctgaacaccggcgccattttccaaactgtcctttcttggagaactctctggagactctgcgcttctctatatcaaatctgagcatgcagacacatgctgctagaatgcgtactttcatgtattggccctcatctgttcctgtgcagcccgagcaactggcatcagctggcttctactatgtgggccggaatgatgatgtgaagtgcttctgctgcgatggaggcttaaggtgttgggagagtggcgacgacccctgggtcgaacatgccaagtggtttcctagatgtgagttcttaattaggatgaagggccaggaattcgtggatgaaatacagggccggtacccacatctgctcgagcagttactgtctacttctgatacaacaggggaggagaacgccgaccctcctattatacacttcgggcctggggaatcatccagtgaagacgcagtcatgatgaacacccccgtggtgaagagtgctttagagatgggctttaatcgggacctcgtgaagcaaacagtccagagcaagattctgactaccggcgagaactataagacagtgaacgacatagtgagcgccctgctcaacgccgaagacgaaaagagagaggaggagaaagagaaacaagccgaggaaatggcaagtgatgatctatctctgattcgcaagaaccgcatggcattattccagcaattaacttgtgtcctgcctattctggataacctgctgaaggcaaatgtgatcaataaacaggagcatgacatcattaagcagaagacacagattcctctgcaggctagagagcttatcgacactatactcgtgaaaggcaacgctgccgccaatatatttaagaattgcctaaaggaaatcgactcaaccctgtacaagaatctgttcgtagataaaaatatgaaatatattcctacagaggacgtttccggactgtcactggaagaacagctgcgccggctgcaggaggaacggacctgcaaggtgtgtatggataaggaggtgtcagtagtgtttattccctgcggccacctcgtagtttgccaggagtgcgctcccagcctgaggaaatgccctatttgccgaggaattatcaaaggcaccgttcggaccttcctcagt

SEQ ID NO: 89802 - DNA, 1854 bp, Artificial Sequence
  derived and/or modified sequence
atgcacaagaccgcctcccagaggctgttccctgggccgtcctaccagaacattaagagcatcatggaagattcgactattctctcggactggaccaatagcaacaagcagaaaatgaagtacgacttctcgtgtgagttgtacaggatgtccacttactccacttttccggctggcgtgcccgtcagcgagcggagcctggcgcgcgcgggcttctattacacgggagtcaatgacaaggtcaagtgcttttgctgcgggctgatgttggacaactggaagctcggggactcgccaatccagaagcacaagcagctctatccatcctgctcattcatccagaatcttgtgtcggcgtcgttgggttcgacgagcaagaatacgtcgccaatgcgcaactcattcgcacactcactgtcgccgacgctggagcactccagcctcttctccggatcatactcgtccttgagccccaacccgctcaactcgagagccgtggaagatatctcatcatccaggaccaatccctactcctacgcgatgagcaccgaagaggcccgttttctcacttaccatatgtggccattgactttcctgagcccttcagagctcgcgcgcgccggtttttactacatcggcccgggcgaccgcgttgcgtgcttcgcctgcggaggaaaactttcgaactgggaaccaaaggatgatgccatgtcggaacaccggcggcattttccaaattgcccattcctcgaaaattccttggagactctccgtttctcgatctcaaatctgagcatgcaaactcacgccgccagaatgcggaccttcatgtattggccgtcctcggtgcctgtgcaacccgaacaactcgcctccgcaggtttctactacgtggggcgcaacgacgacgtcaaatgtttctgctgcgatggaggactccggtgttgggaaagcggcgacgatccgtgggttgaacatgccaaatggttcccgagatgcgaatttctgattcgcatgaagggacaggagtttgtcgatgaaatccagggacggtacccgcacctgcttgaacaactgctctctacctcagataccaccggggaagagaacgcagacccacctataatccatttcggcccaggtgagagttcgagcgaggatgcggtgatgatgaacaccccggtcgttaagagcgccctggaaatgggattcaaccgcgatttggtgaaacagactgtgcaatcaaagatcctgacgaccggagaaaactacaagacggtgaatgatatcgtcagtgctttgctcaatgcagaggacgagaaacgcgaagaggaaaaggagaaacaggccgaagagatggcgtccgacgacctgtcgctgattcggaagaatcgcatggccttgtttcagcaactgacttgcgtgctgccaatccttgacaatcttctgaaagccaacgtgataaacaaacaagagcatgacattatcaagcagaaaactcagatcccgctccaggcccgcgagctgattgatactatcctggtgaagggaaatgcggcggcaaacatctttaagaactgcctgaaagagatcgatagcactctctacaagaatctgttcgtcgacaaaaacatgaaatacatcccgacggaggatgtgagcggcctgagcctggaggaacagctgcgccgccttcaagaagaacgcacctgcaaggtgtgcatggataaggaggtgtccgtggtgttcatcccgtgtggacacctcgtcgtgtgtcaggagtgtgctccgagcctcagaaagtgcccgatctgtcgggggatcataaagggtaccgtgcgcacttttctgagc

SEQ ID NO: 89803 - DNA, 1854 bp, Artificial Sequence
  derived and/or modified sequence
atgcacaagaccgcctcccagagactttttcctggaccctcctaccaaaacattaagtcgatcatggaagattcgactattctgtcggactggactaactccaataagcagaagatgaaatacgattttagctgtgaactctacaggatgtccacctactcgaccttccctgctggcgtgcccgtgtccgaaagatctttggcaagagcaggattttactacacgggcgtgaatgacaaggtgaagtgcttttgttgcggactcatgcttgacaattggaagctgggtgacagcccaatccagaagcataaacaactgtacccttcctgttcgtttatacaaaatctcgtgtcagcatccctgggaagcaccagcaagaatacctcgcctatgcggaactcctttgctcattcactgtcgcccacgctcgaacattcgtcccttttttcgggctcgtactcaagcctttcgcctaatcctcttaactcccgcgcagtcgaagatatctcctccagcaggaccaacccgtattcctacgcaatgtcaaccgaggaagcccgtttcctcacttaccatatgtggcccctgacctttctttcgccttcagaacttgcaagagcaggtttctactacattggaccgggggaccgcgtagcatgtttcgcctgtggaggaaagctgagcaactgggaacctaaagatgatgcaatgtctgaacataggcgccattttccaaactgtcctttccttgaaaatagcctggaaactcttaggttttccattagcaatttgtccatgcagacccatgcagcccgaatgaggactttcatgtactggcctagctcagtcccggtgcaaccagagcagcttgcgtcagctgggttctactacgtgggccgcaacgacgatgttaaatgtttctgttgtgatgggggtctgcgttgttgggaatcgggagacgacccatgggtggaacatgctaagtggttccctcgctgtgaattccttatacgtatgaaggggcaagaatttgtggatgagattcaaggtagataccctcacctgcttgaacagcttttgtccactagcgacactaccggggaagaaaatgcagacccacccataatccacttcggcccgggtgaatccagctcggaagatgcggtgatgatgaacactcccgtggttaaaagcgccctcgaaatgggatttaacagagatcttgtcaagcaaactgtgcaatccaagattctgaccactggagagaattacaagacggtgaacgatatcgtctccgcacttctcaatgcagaagatgagaagagggaagaggagaaggagaagcaggcggaagagatggcgtctgacgacctgagcctgattaggaaaaaccgtatggcacttttccagcagctgacttgcgttctgcctatccttgataaccttctcaaggccaatgtgatcaacaagcaagaacatgatatcataaagcaaaagacgcaaattccactgcaagcacgggaactgattgataccattctcgtcaaggggaatgcagcggcaaacattttcaaaaactgcctgaaggaaattgatagcactctgtacaagaatctctttgtggacaaaaacatgaagtacatcccaaccgaagatgtgtcaggtctttcacttgaagaacagctgcggagacttcaggaggaacgaacgtgtaaggtgtgcatggataaggaggtttcagtcgtgtttattccttgtggccatcttgtggtatgccaggagtgtgcgccatcgctgaggaaatgtcctatctgcaggggcattatcaagggtactgtcagaaccttcctgtcg

SEQ ID NO: 89804 - DNA, 1854 bp, Artificial Sequence
  derived and/or modified sequence
atgcacaagacggccagccagcggttgttcccgggaccatcgtaccaaaatattaaatccatcatggaagatagcactatactgtccgactggacgaatagtaataagcaaaaaatgaaatacgactttagttgtgagctatataggatgtccacctactctacgtttcccgcaggtgtgcccgtcagcgagcgatcgctggcacgtgccggcttctactacacaggggttaacgataaagtgaagtgcttttgctgtggcctcatgctggacaactggaagctgggcgattccccgattcagaagcataaacagctctacccctcctgttccttcatccagaacctggttagcgcgtcccttggcagcacatcaaagaacacatcccctatgcggaatagtttcgcacacagcctgtctccgactctcgagcatagttcactgtttagcggctcgtattcctccttaagcccgaatcccctgaactcgcgggccgtggaggatatctctagttcccgtaccaatccgtactcctatgctatgtctacagaggaggccaggttcttgacctatcacatgtggcccttgacctttttgagccctagtgaactggcgcgcgctggattctactacatcggcccaggagacagagttgcctgtttcgcatgtggcggaaagctttctaactgggagccgaaggacgacgccatgtcggagcatagacggcatttccctaattgccctttcctggagaactctcttgaaaccctgcgcttctccatttctaatctctcgatgcagactcatgctgcaaggatgaggaccttcatgtattggccctcgtccgtcccagttcaacccgagcagctcgcctccgccggcttctactacgtgggcaggaacgacgatgttaaatgcttttgctgcgacggtggcctccgatgctgggagagcggagacgatccctgggtcgagcacgctaagtggttcccccggtgcgagttcttgattcgaatgaaggggcaggaattcgtagatgagatccaaggacgctacccccacttgctggaacagctgctcagtacctcggacacgacgggagaggagaatgccgatccaccaatcatccacttcggccccggcgagagctccagtgaggacgcagtgatgatgaacacgcctgttgttaagagcgctttggagatgggcttcaatcgcgatctggtaaagcagaccgttcagtccaagatacttacgacaggcgagaattacaaaacggtgaatgatatcgtgtcggctttgttgaacgctgaggatgagaagagagaagaagaaaaagagaagcaggcggaggagatggccagcgatgatctctcgctgattcgcaagaatcgcatggccctcttccagcaactgacctgcgtgctgccaattctggataacctgttgaaggccaatgtgatcaataagcaggagcacgatattatcaagcagaagacgcagattcctctgcaggcacgcgaactgatcgatacgatattggtcaagggtaacgcagccgccaacatctttaagaattgcctgaaggaaatagacagtacactgtacaagaacctcttcgtggacaagaacatgaaatacatccccaccgaggatgtgagcgggcttagcttggaggagcagcttcgaagactccaggaagagcggacctgcaaggtgtgcatggacaaagaggtgtcagtggtttttatcccgtgcggccatttggtggtctgccaggagtgcgctccctccttgcgcaagtgtccgatctgcaggggcataattaaaggcacggttagaacgttccttagc

SEQ ID NO: 89805 - DNA, 1854 bp, Artificial Sequence
  derived and/or modified sequence
atgcacaagaccgcttctcagagactctttcctgggccttcttatcagaatatcaagagtatcatggaagattcaactatcctttccgattggacaaatagcaataaacaaaagatgaagtacgacttctcttgtgaactttacagaatgtcaacgtactcaacgttccccgctggagtgcccgtttcagaacgcagcctcgcccgagctgggttttattacaccggcgttaatgacaaggtgaagtgcttttgctgcggtcttatgctggacaactggaagctgggcgacagtccgattcaaaaacataaacagctgtaccctagctgtagttttattcagaacctcgtgagtgctagtctggggtctacatcaaaaaacacaagtcctatgaggaatagctttgcccacagtctgagccccacactggagcactctagtcttttcagcggaagctactctagcctctctcccaacccccttaactcccgtgctgtggaagatataagctctagtaggaccaacccatattcctatgcaatgagtacggaagaagcccggttcctgacataccatatgtggcccttgactttcctaagcccatctgaactcgcccgcgccgggttttactatatagggccaggggaccgagtggcatgctttgcatgtgggggtaagctgtccaactgggaacccaaagacgacgcgatgtcagagcataggagacacttccctaattgtcccttcctagaaaactcattggaaaccttgagatttagtatttctaatcttagtatgcagacccatgccgctagaatgaggaccttcatgtactggccaagttcagtgccggtccaaccagagcagctggctagtgccgggttttattacgtgggacgaaacgacgacgtgaagtgtttctgttgtgacggtgggctgcgatgctgggagagcggggatgacccttgggtggagcacgctaagtggttcccccggtgtgagttcctgatccgaatgaaggggcaggaatttgttgacgaaatccagggtagataccctcatctgttggaacagttgttgtcaacctctgatacaacaggagaagaaaacgcagatccacccataattcattttggacctggtgagtcatctagtgaggacgccgtgatgatgaacaccccggtcgtcaaaagtgctctggagatgggatttaatagggacctggtcaagcagacggttcagtccaagatcctgaccaccggcgaaaactacaaaactgtaaacgacatcgttagcgcactgctgaatgctgaagatgagaaaagagaagaggaaaaggagaagcaggccgaagagatggcaagcgatgatctgagtttaatccgaaagaacagaatggcactgttccagcaattgacttgtgtgctgccgatcttagataacctgctgaaagcgaacgtgattaacaaacaggaacatgatatcataaaacagaagacacagataccactgcaggcccgtgagcttatcgatactatactagtgaaagggaatgccgccgccaacatctttaaaaactgtctcaaggaaatcgatagtaccctttacaaaaacttattcgtggataagaacatgaagtacatccctacggaagatgtgagcgggctttcgttagaggagcaactgcgacggttgcaggaagaacgaacctgtaaagtgtgcatggacaaggaggtgagcgtggtgttcatcccttgcgggcatctagttgtgtgtcaggagtgcgcgccgagcctacgaaaatgcccaatctgcagggggattattaaaggcaccgtgagaacctttctcagt

SEQ ID NO: 89806 - DNA, 1854 bp, Artificial Sequence
  derived and/or modified sequence
atgcacaaaacagcctcacaacggttgttcccaggtccatcgtaccaaaatatcaagagtataatggaggattcaactatattgagcgactggactaacagtaataagcaaaaaatgaagtatgacttctcttgtgagttataccggatgagcacctattccaccttcccagctggagttccggtttccgagcgatccctggctcgagccgggttctattatacaggggtgaacgacaaggttaaatgcttttgttgcggtctgatgcttgataactggaagctcggggactcccccattcagaagcacaagcagctgtatccgtcctgcagtttcattcagaatctggtgagcgcttctctgggttccacctccaaaaatacgtctccgatgagaaacagttttgcccactctctttccccaacattagaacactctagcctgttcagtggtagttactctagcttgagtccaaacccactgaattccagggctgtggaagacatcagttcttcaaggaccaacccgtactcttatgcgatgagcaccgaggaagcccgtttccttacataccacatgtggcctctgaccttcctgagcccctctgagttagcccgcgccgggttctactatatcggccccggagatcgtgtagcttgcttcgcatgtggcgggaaactctctaactgggaacctaaagacgatgcaatgtcagagcacagaaggcattttccgaactgccccttcctggagaatagcctggaaacactgcgattttccatctccaacctgtctatgcagacccacgctgctcgtatgcgaaccttcatgtactggcccagcagcgtgcctgtgcagcctgagcagctggccagcgcaggcttttattatgtgggtcgcaatgatgatgtgaaatgcttctgttgtgatggaggactaaggtgctgggagagtggggacgatccatgggtcgagcacgccaaatggtttccccgctgtgagtttctgatccgcatgaaaggacaggaattcgtggatgaaatacagggtcgatacccacatctactggagcagcttctgtcaacttccgatacaaccggagaggaaaacgcagatccgcccattatccacttcggcccaggcgagtcatcatcagaggatgcagtaatgatgaatacaccggtggtcaagagtgccctggaaatgggttttaatcgagaccttgtaaagcaaacggtgcagagtaagatcctcacgacaggggaaaattacaagacggtgaacgacattgtctctgctctgctgaatgcagaagatgagaaaagggaagaagagaaggaaaaacaggcagaggaaatggcgtcagacgacttgagcctcataagaaaaaatcgcatggcactgtttcagcagctcacctgcgtgctcccaatcttggataacctgctaaaggccaacgtgatcaataagcaggagcacgacattattaagcagaaaacacaaatcccactgcaggcacgcgaactgattgatactatccttgtgaagggaaacgctgcagccaacatttttaagaactgcttaaaggagattgattcaacgttgtataagaatctttttgtggacaaaaacatgaagtacatcccaaccgaggacgtaagtggcctgtcattagaggaacagctgcgacgccttcaggaagaacgaacgtgcaaggtgtgcatggataaagaggtgtccgtcgtatttattccgtgtgggcaccttgtggtttgtcaggagtgcgctccgtctctgaggaagtgccctatttgtcggggtattatcaaggggacagtgagaacttttctctcc

SEQ ID NO: 89807 - DNA, 1854 bp, Artificial Sequence
  derived and/or modified sequence
atgcataaaacggcgtcgcaacgattatttccgggtccgtcgtatcaaaatataaaatcgataatggaagattcgacgatattatcggattggacgaattcgaataaacaaaaaatgaaatatgatttttcgtgtgaactatatcgtatgtcgacgtattcgacgtttccggcgggtgttccggtttcggaacgttcgctagcgcgtgcgggtttttattatacgggtgtaaatgataaagtaaaatgtttttgttgtggtctaatgttagataattggaaactaggtgattcgccgatacaaaaacataaacaactatatccgtcgtgttcgtttatacaaaatctagtttcggcgtcgttaggttcgacgtcgaaaaatacgtcgccgatgcgaaattcgtttgcgcattcgctatcgccgacgttagaacattcgtcgttattttcgggttcgtattcgtcgctatcgccgaatccgttaaattcgcgagcggtagaagatatatcgtcgtcgcgtacgaatccgtattcgtatgcgatgtcgacggaagaagcgcgatttctaacgtatcatatgtggccgctaacgtttttatcgccgtcggaattagcgcgtgcgggtttttattatataggtccgggtgatcgtgtagcgtgttttgcgtgtggtggtaaattatcgaattgggaaccgaaagatgatgcgatgtcggaacatcgtcgacattttccgaattgtccgtttttagaaaattcgttagaaacgttacgattttcgatatcgaatttatcgatgcaaacgcatgcggcgcgtatgcgtacgtttatgtattggccgtcgtcggttccggttcaaccggaacaattagcgtcggcgggtttttattatgtaggtcgtaatgatgatgtaaaatgtttttgttgtgatggtggtctacgatgttgggaatcgggtgatgatccgtgggttgaacatgcgaaatggtttccgcgttgtgaatttttaatacgaatgaaaggtcaagaatttgtagatgaaatacaaggtcgttatccgcatctactagaacaactattatcgacgtcggatacgacgggtgaagaaaatgcggatccgccgataatacattttggtccgggtgaatcgtcgtcggaagatgcggtaatgatgaatacgccggtagttaaatcggcgctagaaatgggttttaatcgtgatctagtaaaacaaacggtacaatcgaaaatattaacgacgggtgaaaattataaaacggttaatgatatagtatcggcgctattaaatgcggaagatgaaaaacgtgaagaagaaaaagaaaaacaagcggaagaaatggcgtcggatgatttatcgttaatacgaaaaaatcgtatggcgttatttcaacaattaacgtgtgttttaccgatactagataatttattaaaagcgaatgttataaataaacaagaacatgatataataaaacaaaaaacgcaaataccgttacaagcgcgagaactaatagatacgatactagttaaaggtaatgcggcggcgaatatatttaaaaattgtttaaaagaaatagattcgacgctatataaaaatttatttgtagataaaaatatgaaatatataccgacggaagatgtttcgggtttatcgttagaagaacaactacgacgattacaagaagaacgtacgtgtaaagtttgtatggataaagaagtttcggtagtttttataccgtgtggtcatctagtagtttgtcaagaatgtgcgccgtcgctacgtaaatgtccgatatgtcgtggtataataaaaggtacggtacgtacgtttctatcg

SEQ ID NO: 89808 - DNA, 1854 bp, Artificial Sequence
  derived and/or modified sequence
atgcacaaaacggcttcccagcggctgttccctgggccctcctatcagaatatcaaatccattatggaagacagcaccattcttagtgattggacaaatagcaacaaacagaagatgaagtacgattttagctgtgagctgtatcggatgagcacatacagcacctttcccgcaggagtgcccgtgagtgagcggtctctggctcgcgcgggcttctattacacgggcgttaatgacaaggttaagtgcttctgctgtggcctcatgctggataattggaagctaggagactcaccaattcaaaagcataagcaattgtacccatcatgttccttcatccagaatttggtgtccgcaagcctcggtagcacctccaagaacacctccccaatgaggaactctttcgcccattctttatctcccacacttgagcatagctccttgttcagtggcagttatagtagtttaagccccaatccgctgaactcaagggcggtggaagatatctcttccagccgtactaacccttattcatacgcaatgtctactgaggaggctcggttccttacctatcatatgtggcctctgacttttttgtcaccctcagagcttgcaagggctggattctattatataggcccgggggatcgcgtagcatgcttcgcttgtggcggcaaactctccaattgggagcccaaagacgatgccatgtccgagcatagaaggcacttccccaattgtccctttctggaaaactcattggaaactctgcgattctctatcagcaacctgagtatgcagacgcacgccgcgcggatgcggaccttcatgtattggccaagctctgtgcccgtgcaacctgagcagctggcatcggcagggttctattacgtggggagaaacgatgacgtgaagtgcttctgctgtgacggcggtttaaggtgctgggagtccggggatgatccctgggtagagcacgcaaagtggtttccacggtgtgagtttctaattcgtatgaaaggacaggagttcgtcgacgaaattcagggccggtacccacacctcctggaacagctgttgagtacctctgacaccacaggcgaggagaatgctgatccacctatcattcacttcggccctggcgaatcaagtagtgaagatgccgtaatgatgaacacaccagtggttaaatctgctcttgagatgggcttcaaccgggacctggttaagcagaccgtacagtccaaaattttgaccactggcgagaactataagacagttaatgacatcgtgtcagcccttcttaacgccgaggatgagaaaagggaggaggaaaaagagaagcaggcggaagaaatggcctccgacgatcttagcctgatcagaaagaaccggatggctttgttccagcagctcacgtgcgttttgcccatactcgataacctgcttaaggcgaatgtgattaataagcaggagcatgatatcatcaaacagaagacgcagatccccctgcaggctagagagctaattgacaccatcctggtaaagggaaacgcggcggctaatattttcaagaattgcctgaaggagatcgacagcaccttatacaaaaatttgttcgtcgataaaaacatgaaatacatcccaactgaggacgtgagcgggctgtccttggaggaacagcttcggcgtttgcaggaagagagaacttgtaaggtgtgcatggacaaggaggtttctgtcgtcttcataccatgcggccacttagtcgtctgccaggaatgtgccccatctctgagaaaatgtcctatatgtagaggtattatcaagggtaccgtcagaacttttctaagt

SEQ ID NO: 89809 - DNA, 1854 bp, Artificial Sequence
  derived and/or modified sequence
atgcacaagactgcctcacagcggctcttccctggaccatcgtaccagaacattaagtcaatcatggaggactccaccatcctgtcggactggactaattcgaacaagcaaaagatgaaatacgacttctcgtgcgagctgtaccgaatgtcgacctactccacctttccggctggagtgccagtgtcggagcgttctctggcccgggcgggattttactacactggagtgaacgacaaagtgaagtgtttctgctgcgggctgatgctggacaattggaaactcggagactccccgatccagaaacataagcaattgtacccgtcatgctccttcatccagaatctggtgtcggcctcgctgggaagcaccagcaagaacacttcccctatgaggaactccttcgcacactcactctccccgactctcgagcactcctcactgttcagcggtagctacagctcactgtcaccgaacccgctgaattcccgcgcggtagaggatatctccagctccaggacgaacccgtattcctacgccatgtcgaccgaagaggcgcgtttccttacttaccatatgtggccgctgactttcctgagcccgagcgaattggctcgggcaggattctactatatcggccctggtgaccgcgtggcctgcttcgcttgcggcggaaaactgtccaattgggagcctaaggatgacgcaatgtcagaacacaggcgccattttccgaattgcccatttctcgaaaacagcctcgaaaccctccgcttctccatcagcaatctctcgatgcagacccatgcggcccgcatgcgcaccttcatgtactggcctagctccgtgccggtgcagccggagcagctcgcctccgccggcttctactacgtgggccggaacgatgacgtcaagtgcttctgctgtgacggaggactccggtgttgggaatccggagacgacccgtgggtcgaacacgccaagtggtttcctcgctgcgagttcttgattcgcatgaagggccaagaattcgtggatgaaatccagggaaggtacccgcatctgttggagcagctgctgtcgactagcgacactacgggagaggaaaacgccgacccaccgatcatccactttggtccgggcgaatcgtccagcgaggacgcggtgatgatgaacacccctgtggtcaagtctgcgctggaaatgggttttaacagggatctggtgaaacagacggtgcagtcaaagatcctgacgaccggagagaactacaagactgtgaacgacatcgtgtcagcactcctgaacgcggaagatgagaaacgggaggaagaaaaggagaagcaggctgaggaaatggcttcggatgacctctcccttatccgcaagaaccgcatggcgctcttccaacagcttacgtgcgtccttcctatactggataaccttcttaaggcaaatgttatcaataagcaggaacacgacatcatcaagcaaaagactcagatcccgctgcaggcaagggaactgatcgatactattctggttaagggaaacgcagccgcgaatatcttcaagaattgcctgaaggagattgactcgacgttgtacaagaatctgttcgtggataagaatatgaaatacattccgactgaggacgtgtcaggacttagcttggaagagcagctccgccggctccaagaagaaagaacttgtaaggtgtgcatggacaaagaagtcagcgtggttttcatcccgtgcggacatctcgtggtctgccaggagtgtgcaccaagcctcagaaagtgtccaatctgccgcggaatcatcaaaggtactgtgcgcactttcttgtcg

SEQ ID NO: 89810 - DNA, 1854 bp, Artificial Sequence
  derived and/or modified sequence
atgcataaaacagcctcccagagactcttccccggcccctcataccagaacattaagagcatcatggaagacagtactatactgtctgattggaccaactcaaacaagcaaaaaatgaagtacgatttttcctgcgaactctataggatgagcacatacagcacctttcccgccggcgtcccagtgtctgaacggtctctggccagggccggcttttattacacgggagtgaatgacaaggtcaaatgcttttgctgtggactgatgctggacaattggaagctgggcgatagtcccattcaaaagcacaagcagttgtacccgagctgttcttttatccagaatctggtcagcgctagcctgggatctacttcaaaaaatacctcacccatgaggaattcctttgcccacagcctctcccccaccctggagcacagtagcctgttctcgggatcatactcttccctatcaccgaaccccctgaattcccgggccgtggaggatatttcctcatccaggaccaatccctactcctacgctatgtccaccgaggaggcacgtttcttgacttaccatatgtggcccttgaccttcttgagccctagcgagctggcccgcgcagggttttactacattggacctggcgaccgcgtggcctgcttcgcatgtggaggaaagctgtctaattgggaacctaaggatgatgccatgtcagaacaccgccggcattttcccaactgcccattccttgaaaacagtcttgagaccctgaggttcagcatctctaatctctccatgcagacacacgctgcgcgtatgcgcaccttcatgtattggccttcgagcgtccccgtccagccggaacagctggcctccgcaggtttctattacgtgggcaggaatgatgacgtgaaatgcttttgttgcgacggcggactgaggtgttgggagagcggtgatgatccatgggtcgaacacgcaaaatggttccctaggtgcgagtttctgatccggatgaaagggcaggagtttgtggacgaaatacaggggaggtaccctcacctccttgagcaattgttgtcaacctctgataccactggtgaggagaacgctgacccacctataatacactttggacctggagaatcttcctctgaggacgctgtaatgatgaatactcccgtggtaaagagtgccctggaaatgggattcaacagagatctcgtgaaacagactgtgcagagcaaaatattgaccactggagaaaattacaaaacggtgaatgacattgtatccgcgctactaaatgcggaggatgaaaagcgcgaagaggagaaggagaaacaggcagaggagatggcatcagatgatttatctttaatccgaaaaaatcgcatggccttatttcagcagcttacatgcgtcttgccgattttggacaatctgctcaaagccaacgtgattaacaagcaggagcatgacattattaaacagaaaacccagattcctttgcaggcacgcgaactgatagacacgattctggtgaaagggaacgcagccgcgaacatcttcaaaaactgccttaaagagattgatagtaccctttacaagaatttattcgtggacaagaacatgaaatatattcctactgaggacgtgagtggcctcagcctggaagaacagttgcgacgcttgcaggaggagcggacctgtaaggtgtgcatggacaaagaagtgagcgtagtcttcataccatgtggccaccttgtggtttgccaggaatgtgcaccgtccttgaggaaatgcccaatttgtagaggcatcattaaaggcactgtgcggacgttcctatct

SEQ ID NO: 89811 - DNA, 1854 bp, Artificial Sequence
  derived and/or modified sequence
atgcataaaacagcgtcccagagattattcccaggcccatcgtatcagaacatcaagtcaatcatggaggattcaactatcttgagtgactggaccaattcaaacaaacagaaaatgaagtatgacttctcttgcgagctttatcgtatgtctacctatagcactttccctgcgggcgtgccagtatcagagaggtctctggcccgcgcaggattctattacactggcgttaacgataaggttaaatgcttctgttgtggcctaatgcttgacaattggaagcttggggatagtcccattcagaaacataaacaactgtacccctcttgcagcttcattcagaaccttgtgtcagcttccttagggagcacatctaaaaacacctccccaatgagaaattcgtttgctcatagtctttcccccacattagaacactcaagtctgttttcaggatcatattcatctttaagcccaaaccctctcaacagcagggccgttgaagacatcagctcgtctcggactaacccctattcatacgccatgtctacggaagaagcccgcttcctgacataccatatgtggccgttgactttcctcagcccttctgagctcgccagagcaggcttctattatattggtcctggggacagagtcgcttgcttcgcatgcggtgggaaattgagcaactgggaacctaaggatgatgccatgtcagaacaccgaagacactttccaaattgccccttccttgaaaatagcctggagacacttcgtttctccatcagtaatttatcaatgcaaacccacgcagctagaatgagaacatttatgtattggccctcctctgttcccgtccagccggaacagctggccagtgcaggtttttactatgttggtaggaatgatgacgtgaagtgtttctgttgcgatgggggactgcggtgctgggagagcggggatgacccctgggtagagcatgcaaaatggttcccgcgctgtgagtttctgattcggatgaaagggcaggaattcgttgatgaaattcaaggccggtaccctcatttgttagaacagttgctttccacaagtgacaccaccggtgaggagaacgccgatccaccaatcatacattttggccccggtgaatctagcagcgaagatgccgtcatgatgaacactcccgtggtgaaatccgctcttgagatgggctttaatcgtgacctcgtgaaacaaacggtgcagtctaagatactcactacaggggaaaattataagactgtgaacgacatcgtttccgcactcctcaacgccgaagatgagaaacgcgaagaagaaaaagaaaagcaggccgaggagatggccagcgatgaccttagcctcattcgcaaaaaccgcatggccctgttccaacagctgacatgcgtgctgcccatcctggacaacctcctcaaggccaatgtaatcaataagcaggaacacgacatcatcaagcaaaagacccagatacccctgcaggccagagaactgattgatactatactcgttaaaggtaacgccgccgccaacatattcaagaactgtctcaaggagatagacagtaccctttacaaaaatttgttcgtggacaagaacatgaagtacatccccacggaggacgtgtccggcttgtcactcgaagagcagctgcgacggctgcaagaggaaagaacctgcaaagtttgtatggacaaggaagtgtcagtcgttttcataccgtgtggacatctcgttgtgtgtcaagagtgtgccccatctctcaggaagtgccctatctgtcggggaattataaaggggaccgtgcggacttttctctct

SEQ ID NO: 89812 - DNA, 1854 bp, Artificial Sequence
  derived and/or modified sequence
atgcataaaaccgccagccagagattgttccccggcccctcctatcagaacattaagtcgattatggaggactctaccattctgtccgattggacaaatagcaacaagcaaaaaatgaaatacgatttctcctgcgaattgtatagaatgtcaacctatagtaccttccccgcaggcgtgcctgtctccgaacgatctctagctagggcagggttctactatacaggagtcaacgataaggttaaatgtttttgctgcgggttgatgttagacaattggaaactaggtgactcacccattcagaaacacaagcagttatacccgagctgttcatttattcagaatctggtcagcgcatccctcgggtctactagtaagaacaccagccctatgaggaacagttttgctcactccctgagcccaaccttggaacattcctcgctgttctcaggcagttactcttccttaagccctaatcccttgaattctagggcggtcgaggatatctcaagctctcggaccaatccttatagctatgccatgagtacggaagaggcgcgtttcctgacgtatcacatgtggccactaacttttctctcgccgtcagaactcgctagggcaggtttctactatatcggacctggcgaccgagtggcatgtttcgcatgcgggggtaagttgtctaactgggagcccaaggatgatgctatgagcgaacaccgccgccacttccctaactgtcccttccttgagaatagcctggaaactctcaggttctccattagcaacttgtcgatgcagacccacgccgctcgcatgagaaccttcatgtactggccctcctctgtgcccgtgcagcctgagcaactcgccagcgcaggtttctattacgtcggaagaaacgatgatgtgaagtgtttctgctgtgacggtggcctccgctgttgggaatctggggatgacccttgggttgaacacgctaagtggttcccccggtgtgagttcctcatccgtatgaagggccaagagttcgtggacgagattcagggaaggtatccacatctgttagagcagttactgagcacttcagacaccacaggggaggagaatgctgaccctccaatcattcacttcgggcctggggagagtagctcagaagatgccgtgatgatgaacacacctgttgttaagtcagcgttagagatgggtttcaatagagacctcgtgaaacaaacggtgcagtcgaagatcctgacaacaggagagaactataaaactgtgaatgacattgtctcagccctactcaatgctgaagatgagaaaagggaggaggagaaagagaaacaggctgaagagatggccagcgacgatttatcattaattaggaagaaccgaatggcactatttcagcagttaacatgcgtcctgccaatcctggacaacctgttgaaggcgaacgtaatcaacaaacaggagcatgacatcataaagcagaaaacccaaattcctctgcaggcacgtgagttaattgataccatactcgtcaaggggaacgcagccgcaaatatttttaagaattgcctcaaggagatcgatagcacactgtataaaaatctgtttgtagataagaatatgaagtacatacccacagaagacgtcagcggactgagcttggaggaacagttacggcgactacaggaagagcggacatgcaaagtgtgcatggacaaggaagtgtctgtggtctttatcccctgcggacacctggtagtgtgccaggaatgcgctccatcgctgcgaaagtgcccgatctgtcgcgggatcatcaaagggacagtcagaacattccttagc

SEQ ID NO: 89813 - DNA, 1854 bp, Artificial Sequence
  derived and/or modified sequence
atgcacaaaactgcaagccagcgcctattcccagggccctcttaccagaacatcaagagcatcatggaagacagcactatcctgtcagactggacgaattctaataagcagaaaatgaagtatgacttttcgtgcgaactgtatcggatgagtacatattccactttccccgcaggtgtcccagtgtcggaaagatctctcgctcgtgcaggcttttattatactggagtaaacgacaaagtaaaatgcttctgctgcggcctcatgttggacaactggaagctgggggattctcctattcagaagcacaagcagctgtacccctcctgttcattcatacagaatctcgtttctgcttctttagggtctacatccaagaatacttcacccatgaggaactccttcgctcattctctgtcacctacgctggagcattcgtctttgttttcaggatcatattctagcctgagccctaacccacttaacagccgcgctgtggaggacataagctcatcacggaccaacccttattcttacgcaatgtcgactgaggaggctagattcttaacatatcatatgtggcctctgactttcctgtcgcctagtgagctggcccgcgccggattctactacatcggtcctggggaccgagttgcatgcttcgcttgcggagggaagctgagcaactgggaaccgaaggatgacgctatgagcgagcataggcggcacttcccaaattgtccgttcctggaaaacagcttggagacgctcagattttctatcagtaatctaagcatgcaaactcacgccgcccgcatgcggacatttatgtactggccaagctctgtgcctgttcagccagagcagctggcgagcgcagggttttattacgtgggccgtaatgatgacgtcaaatgcttctgttgtgacgggggtcttaggtgctgggagtccggggacgatccatgggttgaacacgcgaaatggtttccccgatgcgaattcctcatccgcatgaaaggccaggagttcgtagacgaaatccagggccggtacccacatctgctggaacagctgctgagtacctccgacactacaggcgaagaaaacgctgaccctcccattattcacttcgggccaggagaaagtagttccgaggacgccgtaatgatgaacactcctgtggtcaaatccgctttagagatgggcttcaatcgggatctggttaagcagacagtgcagtccaaaatcctgaccactggcgaaaattataagaccgtgaatgatatcgtgagcgctctgctcaatgccgaggatgaaaaacgcgaagaggaaaaggagaaacaggctgaggaaatggcaagtgacgatttgagtctgatccgcaagaaccggatggcactgtttcagcaactaacctgcgtgttaccaatcttggataatctgttgaaagcgaatgtgatcaataaacaggagcacgatataatcaaacagaaaactcagatccccctccaagcccgggagcttatcgatacaatcttagtcaaaggcaacgccgccgctaacatttttaaaaactgcttgaaggagatagactcaacactctacaaaaacctgttcgtagacaagaacatgaaatatattcctacagaagatgtgtctgggttgtctctagaagaacagctcaggcgactccaagaagaaaggacctgcaaggtatgtatggacaaagaggtatcggtggtgttcattccctgtggacatctcgtcgtgtgtcaggagtgtgctccatcattgcgcaaatgccctatatgccgagggatcatcaaaggaacggttaggactttcctgtca

SEQ ID NO: 89814 - DNA, 1854 bp, Artificial Sequence
  derived and/or modified sequence
atgcacaagacggccagtcagcgactctttccaggaccgagttaccaaaacataaaatccatcatggaggactctacaattcttagcgattggacaaattctaataagcagaagatgaagtatgacttctcctgtgagctataccgcatgtccacctatagtacgtttcccgcaggcgtaccggtgtcagaacgttccctcgcccgggctgggttctactacactggcgtgaatgataaggtgaagtgcttttgctgtggtctgatgcttgacaattggaaactgggagactcccctatccaaaagcataagcagctctacccctcatgttcctttatacagaacctggttagtgccagcctggggagcacctccaaaaatacgtcacccatgagaaactccttcgcccactccttatcaccgaccctggaacatagcagtttgtttagtggcagctatagcagtctgagtccaaacccactcaattcccgggccgtcgaggacatctccagctcaagaactaatccatacagctatgcaatgtcaactgaggaggcccgtttcctgacttatcatatgtggccactgacgtttctctccccctctgaactagcgagggctggattttattatattgggcctggagatagggtcgcttgttttgcctgcggcggcaagctgtcaaattgggagcccaaagacgacgccatgtcagaacatcgccggcatttccccaactgccccttcctggaaaattcgctagagactctgaggttcagtatcagcaacctatcgatgcagactcacgctgccaggatgcgaacctttatgtattggcctagctcggtaccggtgcagcctgagcagctggcatcagcaggcttctactatgtggggcgtaacgacgatgtcaagtgtttttgctgcgacggcggcctaagatgctgggaatctggggacgacccttgggtcgaacacgcaaagtggttcccgcggtgcgagttcttgatcagaatgaaaggacaggagtttgtcgatgagattcagggacgctacccccacttactggagcagctactctccacgtctgacactaccggagaagagaacgccgatccaccaataatccactttggccccggcgagtcttcaagcgaggatgcagtcatgatgaatactcctgtggtgaagagcgcactggaaatggggttcaaccgcgatttagtaaagcagacagtccagagcaaaatattgacaacaggcgaaaattacaaaacggtgaatgatattgtgtcagccctgctgaatgcagaggatgaaaagagagaggaagaaaaagagaaacaagcagaagaaatggcaagcgatgatctgtctctgataaggaagaacaggatggcactgtttcaacaacttacctgcgtcctgccgattttagataatttactgaaggctaatgtaattaataaacaggagcacgatattatcaaacaaaaaacacagatcccccttcaggcccgcgagttgatcgacaccatcttagtgaagggaaatgccgctgccaatattttcaagaattgcttgaaggagatagacagcaccctgtacaaaaacctcttcgttgataagaatatgaagtacataccaactgaagatgtctccggactttcgttagaggagcagcttcgccgcctgcaggaagaacgaacgtgcaaggtctgtatggataaagaagtgagtgtagtgttcatcccatgcggtcatcttgtggtgtgccaggaatgcgccccttctctgaggaagtgcccaatctgtcggggcattattaagggcactgtgaggacattcctgagt

SEQ ID NO: 89815 - DNA, 1854 bp, Artificial Sequence
  derived and/or modified sequence
atgcataaaacggcatcccagagactttttccaggtccgtcgtaccaaaacattaagagcattatggaagattccaccattttgtcagattggaccaacagcaacaagcagaaaatgaaatacgatttttcctgtgagctgtaccgcatgagcacctactcgacttttccagcaggagtccctgtcagcgaacggtcactggcaagggctggattttactatactggtgtgaacgataaggtgaaatgtttctgctgtggtctgatgctcgataattggaagctgggagattcgccgattcaaaagcacaagcaactttacccctcgtgctccttcattcagaacctggtgtcggcatcattgggaagcacctcaaagaacacctcaccaatgcgcaactcctttgcccattcgctgtcgcctacgctcgagcatagcagccttttctccggttcgtacagctcgctttcccctaaccccctcaactcccgagcagtggaggatattagcagctcgagaactaacccttactcttacgcgatgtcgactgaagaagcacgcttccttacttaccatatgtggcctctgactttcctgtcgccctccgaactggcgagagcaggcttctactacattggcccaggtgatagagtggcatgtttcgcatgtgggggtaagctcagcaactgggagccaaaggacgatgcgatgtccgaacatagacggcattttcccaactgtccctttttggaaaactccctcgaaaccctgcgattctccatctcaaatctctcgatgcaaactcatgcagcaaggatgagaacttttatgtactggccatcatcagtgccagtgcaacctgagcagctggcctcagcaggattttactacgtgggtcggaatgacgatgtcaagtgtttttgttgcgatggggggcttcgctgctgggaatcgggtgacgacccttgggtcgaacatgcaaaatggtttcctcgctgcgagtttctcatacggatgaagggtcaagaatttgtggatgagattcaaggaagatacccgcatctccttgagcagctccttagtacttcggatactactggagaagaaaacgcggatccacccattattcattttggaccaggggaatcttcgtcagaggacgcggtgatgatgaataccccggtggtgaaaagtgcattggagatgggctttaatcgagatctcgtcaaacaaaccgtgcagtccaaaatcctgactactggtgaaaactacaagaccgtcaacgatatcgtgtcggcactcctgaacgcagaggacgagaaacgagaagaggaaaaagagaagcaggccgaggaaatggccagcgacgatctcagcttgatccgaaagaacagaatggcactttttcaacaacttacttgtgtgctgcccatcctggacaaccttcttaaggcaaacgttatcaacaagcaggagcacgacattatcaaacagaaaacccagatccccctgcaggctcgagaattgatcgatacgattttggtgaagggcaatgcagcggcgaacatattcaagaattgccttaaggaaatagattcaaccctttacaagaatctcttcgtggataagaacatgaagtatattcccactgaggacgtgtcgggtcttagcctggaggaacagcttagacgacttcaagaagaacgcacttgtaaagtgtgtatggataaggaggtgtcggtcgtgttcattccatgtggacacctggtggtgtgtcaggagtgtgcaccctctcttcggaagtgtccaatttgtcgtggaatcattaagggaactgtgcgcacgtttctttcg

SEQ ID NO: 89816 - DNA, 1854 bp, Artificial Sequence
  derived and/or modified sequence
atgcacaagactgctagccagaggctgttcccggggccctcgtaccagaatatcaagtcgatcatggaggactcgaccatcttgtccgattggactaactccaacaaacagaagatgaaatacgacttctcatgtgagctttaccggatgtccacttactcgacctttccagcgggagtgcctgtgtcagagcgctcgctcgcgcgggcgggattttactacactggtgtgaacgataaggtgaagtgtttttgctgtggactgatgctcgataactggaagctcggagatagtccgattcagaaacataagcagctgtatccatcgtgttcgttcatccagaacctcgtctcagcgtccctgggctccacctcgaagaatacctcgcctatgcgaaactccttcgctcatagcctgtcgcctactttggagcattcatcgctgttctccggatcctactcgtcgctgtccccgaaccccctgaactcaagagccgtggaggacatcagctcgtcccggactaatccgtattcatacgcaatgtcaaccgaagaagcgcgctttctgacttaccatatgtggccgctgactttcttgagcccgtccgaactcgcacgcgccggcttttactacatcggaccaggagatcgggtcgcatgctttgcatgtggcggcaagctgtcaaactgggaaccaaaagacgacgcaatgtcagaacatcgcaggcactttccgaattgtccgttcttggagaactcgttggaaactctgcggttttctatttcaaacctgtcgatgcagacccacgccgcgagaatgaggacctttatgtactggccgtcgtccgtgccagtccagccagagcaacttgcaagcgccggattctactacgtgggacgcaacgatgacgtgaagtgcttctgttgcgacggtggcctgaggtgctgggagagcggagacgatccgtgggtggagcacgctaagtggttcccgcgctgcgagttcttgattcgcatgaaaggacaagaatttgtggacgaaatccaaggaagatacccgcatctgctggaacaactgctctcgacgtcagataccaccggagaggaaaacgccgatccaccaatcattcatttcgggccgggcgaatcgtccagcgaggacgccgtgatgatgaataccccggtggtgaaatcggctctcgagatgggatttaaccgggacctcgtcaagcaaaccgtccaatcgaaaatcctcaccactggagaaaactacaagactgtgaatgacatcgtctccgcgcttctcaacgccgaggatgaaaaacgcgaagaagaaaaggaaaagcaagctgaagagatggcgtcggacgatctgtcactgatccggaaaaaccgcatggcgctcttccagcagctgacctgcgtgctccccatattggacaacctgctcaaggccaacgtgattaacaaacaggaacatgatatcattaaacaaaagacccaaatcccactccaagcacgggaactgatcgacaccatccttgtcaagggaaacgcggctgccaacatctttaagaattgcctcaaggagatcgatagcactttgtacaagaacctcttcgtggacaagaacatgaaatacatcccgaccgaagatgtctcgggactgtcgcttgaggaacagctgaggcgactgcaggaagagaggacttgcaaggtgtgcatggacaaggaggttagcgtggtgttcatcccgtgtggacatttggtcgtctgccaagaatgcgcaccttccctgagaaagtgcccgatctgtcgaggaatcattaaaggcaccgtccgcactttcctgtct

SEQ ID NO: 89817 - DNA, 1854 bp, Artificial Sequence
  derived and/or modified sequence
atgcacaaaactgcatcgcaacggttgttcccgggaccaagttatcaaaatattaaaagtattatggaagattctacaattttgtcggattggacaaactcaaacaagcaaaagatgaagtatgatttttcatgtgaactgtatcgtatgagtacgtacagcacttttccagcaggagtcccggtctcggagcgatctcttgccagagctggtttctactatacgggggtaaacgataaagtcaagtgtttttgttgtggtctcatgctcgataattggaagttgggagattctccgatccaaaaacataaacaattgtatccttcttgcagttttattcagaacttagtatccgcttcattgggtagtacgtctaagaacacatcaccgatgcgaaattcattcgcacactcactgtcaccgactttggaacactcgtccttgttttcgggtagttatagtagcctctcgccaaatcccctaaatagccgagcagttgaagacattagcagttcacgaacaaatccatatagctacgctatgtctactgaggaagctaggtttttgacttaccatatgtggccacttacatttttaagtccatctgaacttgcccgtgcaggattttattatatcggacctggagatagagtcgcttgcttcgcctgcggaggtaaacttagtaattgggaaccgaaagatgacgcaatgagtgagcatagaagacatttcccaaattgtccgtttctagaaaattcactggagaccttgagattttcaatatcaaatttatcaatgcaaacccacgcggcacgtatgagaacttttatgtattggccaagttctgtcccagttcaacctgaacaacttgcctcagccggattttattacgttggacgaaatgatgatgttaagtgcttttgttgcgacggaggactaagatgttgggaatccggggatgatccatgggtcgagcacgcaaagtggtttccacgttgtgagtttcttatccgtatgaaaggacaggagttcgttgacgaaatacagggacgttatcctcatctactcgaacaattgctctcgacaagtgatacaacaggcgaggaaaatgctgatccaccgattattcactttggtccgggtgaatcatcttctgaagacgctgtcatgatgaacacaccagttgtgaaaagcgctttggagatgggcttcaatcgagacctcgtcaaacagacagttcaatcgaaaattttgacaacgggcgaaaactataagacggttaatgatattgtttccgctttgctgaatgcagaggacgaaaaacgtgaggaggagaaggaaaaacaagcagaggagatggcctccgacgatctctcgctaatccgcaaaaacagaatggcactttttcaacaattgacatgtgttcttccaatcctcgataacctcttgaaggctaatgttattaacaagcaggaacatgacataattaagcaaaaaacccagatccctcttcaggcaagagaactaattgacacgattttggttaaaggtaatgcagctgcaaatatatttaagaattgcctgaaggaaattgactcaactttatataaaaatctcttcgtggataagaatatgaaatacatcccaacagaagatgtctcgggcctaagtctagaggaacaattgagacgtctacaagaagaaagaacttgcaaagtctgtatggataaagaagtgtctgtagtatttattccatgtgggcacttggtagtatgccaagagtgcgcccctagtcttcgcaaatgtccgatttgcagaggtattattaaaggaaccgttagaacgttcttaagt

SEQ ID NO: 89818 - DNA, 1854 bp, Artificial Sequence
  derived and/or modified sequence
atgcataagactgcgtcacagcgcctctttccgggcccttcctatcagaacatcaaatcgatcatggaggatagcacgatcctgtccgactggaccaacagcaacaaacagaagatgaaatacgacttctcatgcgagctgtaccggatgtctacttactcgactttcccagctggtgtgccggtgtcggaacggtccctggcccgcgcaggattctactacaccggggtcaatgacaaggtcaagtgcttctgctgcggactgatgctggataattggaagctcggggactcgcctattcaaaagcacaagcagctgtacccgtcctgttccttcatccagaatctcgtgtcagcgagccttggatcgacgtcgaaaaacacttctccgatgcgaaactcgttcgctcattcgctgtccccgaccctggaacactcgtcattgttctccggctcctacagctccctgtcgccaaaccctctgaacagcagagccgtggaagatatctcatcatcccggactaacccgtactcgtacgccatgagcaccgaggaagcacgctttctgacctaccatatgtggccgctgactttcctgtcaccgtccgagctcgcccgagcaggcttctattacatcggacctggcgaccgggtggcttgtttcgcttgtggtgggaagctgtccaattgggagccgaaagatgatgccatgtccgagcaccgccggcactttccaaactgcccctttctggagaattcactggaaaccctgcgcttcagcatctcgaacctgagcatgcaaacccacgctgctcgcatgcggaccttcatgtactggccaagcagcgtgcctgtgcagccagagcaattggcatcagctggcttctactacgtgggacggaatgacgacgtgaagtgtttctgttgcgatggcgggttgcgatgttgggagtcgggagacgacccttgggtcgaacacgccaaatggttccctcgctgcgaatttctgatcaggatgaaaggccaagaattcgtggacgaaatacagggaaggtacccgcatctgctggaacagctgctctccactagcgatacgactggtgaagaaaacgccgacccgccaatcatccactttggacccggagagtcgtcatcagaggacgctgtgatgatgaataccccggtcgtgaagtcagcgctggaaatggggttcaaccgggacctggtgaaacagaccgtgcagagcaagatactgacgacgggtgagaactacaaaacggtcaatgatattgtgtccgcactgctgaatgccgaagatgagaagagagaagaagaaaaggaaaagcaggcggaggaaatggcctcagatgatttgtcacttatccggaagaacaggatggcattgtttcaacagcttacttgcgtgctcccaatcctcgacaacctgttgaaggcaaatgtcatcaataagcaagagcacgacatcatcaagcaaaagacccagatcccattgcaggcaagagaactgatcgacaccatcctggtgaaaggaaatgcggccgcgaacattttcaagaactgtctgaaagagattgactccaccctgtacaagaatctgtttgttgacaagaacatgaaatacatcccaaccgaagatgtgtcagggctttccctcgaggaacagctccggagactccaggaggaacggacttgcaaggtttgtatggacaaggaggtgtcggtggtgtttatcccgtgcggacatctggtcgtgtgccaggaatgcgccccttctctgaggaagtgtcccatctgtagaggaatcatcaagggaaccgtgcgcacctttctgtcc

SEQ ID NO: 89819 - DNA, 1854 bp, Artificial Sequence
  derived and/or modified sequence
atgcacaagaccgcaagccaaagactcttcccaggtccgagctaccagaacatcaaatctatcatggaggacagtaccatcctctccgactggaccaacagcaacaagcagaagatgaaatacgacttctcctgtgagctgtaccgaatgtcgacttactcgactttcccagccggagtgccagtcagcgagagatcattggcgcgagctgggttctattacaccggtgtgaacgataaggtgaagtgcttttgctgcggactcatgcttgacaactggaagctcggggattcgccgatccaaaagcataagcagctgtacccgtcatgcagcttcatacagaacctggtgagcgcctcgttgggctccaccagtaagaacacttccccaatgcggaatagcttcgcacattcgctgtccccaaccctcgagcactcaagcctgttttcaggatcgtactcttcactgtcgcctaatcctttgaatagccgtgcggtcgaggacatttcatcctcacgcaccaacccatactcgtacgctatgtcgaccgaagaagcgcggttcctgacgtaccacatgtggccgcttactttcctctcgccgtccgaacttgcccgcgcgggattctactatatcgggccaggagacagagtcgcttgctttgcctgcgggggcaagctgtccaattgggaaccgaaggacgacgcgatgtcagaacataggcgccatttccccaactgtccatttctggagaactcgctggaaaccctgcgcttcagcatctccaacctgtccatgcaaacgcacgcagcgcggatgcgcactttcatgtactggccgagttcggttccggtccaaccagaacagctggcttccgcaggattttactacgtgggaagaaacgacgacgtgaaatgtttctgctgcgacggcggcctccgctgctgggaatccggcgacgatccctgggtggagcacgcaaagtggtttcccagatgtgaatttctgattcggatgaaaggacaggaattcgttgacgaaattcaaggacggtacccccatctgctggaacagctgctctcgacgtccgacaccaccggggaggaaaacgctgaccctccgattattcacttcgggccaggcgagtcgagctcagaggatgccgtcatgatgaatacccccgtcgtcaagtcagcactggaaatgggctttaatcgggacctggtgaaacagactgtgcaatctaagatcctcaccacgggcgagaattacaaaaccgtcaatgatatcgtgtcagccctgctgaacgctgaagatgaaaagcgggaggaggagaaagaaaagcaagccgaagaaatggcatccgacgatctgtcgcttattcggaaaaatcggatggccctgttccaacagctcacctgcgtccttccgatcctcgataatcttttgaaggcgaacgtgatcaacaaacaggagcacgatatcataaagcaaaaaactcagatccccctccaggccagggaacttattgacactatcctggtgaagggcaacgccgccgcaaacatattcaagaattgcttgaaagaaatcgattcgaccctgtacaagaatctcttcgtggacaaaaacatgaaatacataccgactgaagatgtgtccggattgtcgctggaagagcagttgcgcagactgcaggaggaacgcacttgtaaggtgtgcatggataaggaagtgagcgtggtgtttattccgtgcggacacctggtggtctgccaggagtgcgccccgtcacttagaaagtgcccgatttgtcgaggaatcatcaagggtacggtaagaacgttcctcagc

SEQ ID NO: 89820 - DNA, 1854 bp, Artificial Sequence
  derived and/or modified sequence
atgcataagactgcatcacaaagactgtttcctggaccgtcgtaccaaaacataaagtcaattatggaggattccactattctgagcgattggactaattcgaataaacagaaaatgaagtatgatttttcatgcgagctttaccggatgagcacttacagcacttttcctgccggagtgcccgtctctgaaagatccctggccagagctgggttctactacaccggggtcaatgataaagtcaagtgtttttgttgcggtctgatgcttgacaattggaaacttggtgattcccctattcagaaacataagcagctctatccttcctgttcgtttattcaaaacctggtgtcggcaagcctgggatccacttctaagaacacctccccaatgcgtaactcgtttgcacactccctgagcccaactctggagcattcctcccttttttcagggtcatacagctccctctcgcccaatcctttgaactcacgtgccgtggaagatataagctcgtcgcgcaccaacccttacagctacgctatgtccactgaagaagcacgttttctcacctaccatatgtggcccctgacgtttctttcaccttcggaacttgctagggccggattctactatatagggcccggcgatagagtcgcttgcttcgcatgtgggggaaaactctcgaattgggagccgaaagacgacgcgatgtcggagcataggagacactttcccaattgtccattccttgaaaacagcctcgaaactctgagattttcgatctcgaatctgtccatgcagactcatgctgcgagaatgagaacctttatgtactggccatcgtcggtgcctgtgcaacccgaacaattggcatcggcaggattctattacgtgggacgcaacgacgatgttaagtgtttttgctgtgatggaggactgagatgctgggagtcaggtgatgacccctgggtcgaacacgccaagtggtttcctagatgtgaattcctgattcgcatgaaagggcaagagtttgtcgatgagattcaaggacggtacccacatctgctggagcaactgcttagcacctccgataccaccggtgaagaaaacgcagatcccccaatcattcatttcggaccaggggaaagctcatctgaagatgccgtcatgatgaacaccccggtggtgaaatcggcacttgagatgggttttaaccgtgatcttgtgaaacaaactgtccagtcaaagatccttaccaccggggagaactacaagaccgtgaacgatatcgtgagcgcattgctcaacgcagaggacgagaagcgcgaagaagagaaggagaaacaggcagaagaaatggcatcggatgacctctcccttatcagaaagaacaggatggcactttttcagcaactgacctgtgtcttgccaattctggacaaccttctgaaggcgaacgtcattaacaagcaggaacatgacattatcaagcagaaaactcaaattccactgcaggcgagagaacttatcgataccattctcgtgaagggaaatgcggcagcaaacattttcaaaaactgtctgaaggaaatcgattcgaccctgtacaagaacctctttgtggacaaaaacatgaagtacattcctactgaagatgtgtcaggcctcagccttgaagaacaactgcggagactccaagaggaacggacctgtaaggtgtgtatggacaaggaggtgtcggtggtgttcatcccctgtggccatcttgtggtgtgtcaggagtgtgcaccgtcccttcgcaagtgccctatttgtagagggatcataaaaggcaccgtcagaactttcctctct

SEQ ID NO: 89821 - DNA, 1854 bp, Artificial Sequence
  derived and/or modified sequence
atgcataaaactgcttctcagaggctgttcccaggacctagctatcaaaatatcaagagcatcatggaggatagtaccatactgagcgactggacgaactctaacaagcagaaaatgaaatatgatttctcatgtgagctgtataggatgtctacctacagcacattcccagccggcgtgccggtatctgagcgcagcctggcccgcgctggattttactacacaggagtgaacgataaggtgaaatgcttctgctgtggactcatgctggacaactggaagctgggcgattcccccatccagaagcacaagcagctctacccttcatgttccttcatccagaatcttgtgtccgcttctttgggcagcacttcaaagaacacaagtcccatgaggaacagttttgcacattccctctccccaacactggagcattcttccctgttctctggttcctactcctctctgagccccaatcctctgaattctagggccgtggaggacatctccagctccaggaccaacccttatagctacgctatgtccacagaagaagcgcggttcctgacataccatatgtggccactgacattcttgagtcccagtgagctggccagagctggtttctattacatcgggcccggtgaccgcgtcgcttgttttgcatgcggtgggaaattgtccaactgggagcctaaggatgatgccatgagtgaacaccgcaggcactttccaaattgccctttcctcgaaaactcactggagactctgcggttttccatctctaacctgagtatgcagacccatgccgctcggatgcggacattcatgtactggcccagctctgttcctgtgcagcccgagcaacttgcatccgctggcttttattatgtcggacggaacgacgatgtgaagtgcttttgctgcgatggagggctgagatgttgggagtctggcgatgacccttgggtggagcatgcaaaatggttcccccggtgtgagttccttatcagaatgaaggggcaggaatttgtggacgaaatccaaggccggtacccacatctgctggagcagctgctctcaacatcagatacaactggagaagagaatgcggaccctccaatcatccatttcggccccggtgagtctagctccgaggatgcagtgatgatgaacactccagtcgtcaagtctgccctggagatgggttttaatcgggatctggtaaagcagaccgtgcagtcaaaaatacttacaactggagagaactacaaaactgttaatgacattgttagcgctcttcttaacgccgaagacgagaagcgggaggaagagaaggagaaacaagcagaagaaatggccagtgacgatttgtcacttataagaaaaaatcggatggccttgttccaacagctgacatgcgtgcttcccatactggataatctcctgaaggccaacgttatcaataagcaagaacatgacattataaaacaaaagacccagatccccctgcaggcccgggaactcatcgataccattcttgtgaagggaaacgccgctgctaatatctttaagaactgcctcaaagagatcgattctaccctttacaaaaatctcttcgttgataaaaacatgaagtacatcccaaccgaggatgtgagcggcctttcactggaagaacagctgcgaaggctgcaggaagagcggacatgcaaggtctgtatggacaaagaagtttcagtcgtcttcattccctgtggacatctcgtagtgtgtcaggaatgcgcccccagtctgcgaaagtgccctatctgtcgcggaataattaagggcactgtccggactttcctgagc

SEQ ID NO: 89822 - DNA, 1854 bp, Artificial Sequence
  derived and/or modified sequence
atgcacaagactgcgtcacagaggctgttcccaggaccgtcctaccagaacatcaagtctattatggaggactccaccatcttgagcgactggacgaactcaaacaagcaaaagatgaaatatgacttctcctgcgaattgtaccggatgtcgacctactcaacgttccccgccggcgtcccggtgtccgaacgatcactcgcgcgcgcgggtttctactacaccggcgtcaacgataaggtgaaatgcttttgctgtggtctgatgctggacaattggaagctgggtgactcccccatccagaaacataagcagctctacccgtcgtgctcgttcatacagaatctcgtgtcagcatctctcgggtcaactagcaagaacacttcaccgatgcgcaactcctttgcccactccctttccccgaccctggaacattcgtcactgttttcgggctcgtactcctcactgagccctaaccctttgaactcccgcgccgtggaggacatctcaagcagcagaactaacccgtactcgtacgccatgtccactgaggaggcgcggttcttgacttatcacatgtggcctctgaccttcctgtcgccgagcgaactggcacgagcaggattttactacatcggaccgggggaccgcgtggcctgcttcgcatgcggcgggaaacttagtaattgggagccaaaggatgatgccatgtcggaacatagaaggcacttcccaaattgtccctttctggagaatagtctggaaaccctccggttcagcattagcaatctcagtatgcaaacccatgcggcgaggatgagaactttcatgtactggccgtcgagcgtgccggtccagccggaacagctcgcctctgctggattttactatgttggcagaaacgacgatgtcaagtgtttttgttgcgatgggggcctccgctgctgggaatcaggagacgacccatgggtggaacatgctaaatggtttcctagatgtgaattcctgattaggatgaaaggacaggaatttgtagatgagatccaggggcggtacccccacctcctggaacaactcctcagcacttccgatacgactggggaggagaatgcagatccaccgatcatacacttcggccctggagaatcgagctccgaagatgccgtgatgatgaacacgccagtggtgaaatccgccctggaaatggggttcaaccgcgacctggtgaaacagactgttcaatccaagatcctgacgaccggagaaaactacaagactgtcaatgacatcgtctctgcgctcctcaacgctgaggacgaaaagcgggaggaggagaaggaaaagcaagcggaggagatggcctcagacgatctttcgttgatacggaagaataggatggcactcttccaacagctcacctgtgtgctcccgatcctcgataatcttctcaaagccaacgtcatcaacaagcaagagcacgatatcattaaacagaaaacccagatcccgttgcaagcccgggaattgattgatactatcctcgtgaagggaaacgctgccgccaacatcttcaagaattgcttgaaggaaatcgactccactttgtataagaatctgttcgtggacaaaaacatgaaatacatcccaaccgaggacgtctctggactgtcgctggaggaacagcttcggcggctgcaggaggaaagaacttgcaaggtctgtatggataaggaagtgtcagtcgtattcatcccttgcggacaccttgtggtttgccaagagtgcgctccatcactgcgcaagtgccctatctgccgcggaatcatcaagggcaccgttcgcaccttcctctcg

SEQ ID NO: 89823 - DNA, 1854 bp, Artificial Sequence
  derived and/or modified sequence
atgcacaagactgcttctcagaggctgttcccagggccctcttatcagaacatcaaatccattatggaagactcgacaattctctcagactggacaaattctaataagcagaagatgaaatatgatttttcttgtgaattatatagaatgtccacatattctacttttccagctggagtgcccgtttctgagcggagtctcgcacgggcaggattttattatactggggtcaacgacaaggtgaaatgcttctgctgtggactaatgctcgacaattggaaactgggggatagtcctattcagaaacataaacagctgtatccttcctgctccttcatccagaacctcgtatccgcatctctcgggagtacatccaaaaatacatccccaatgagaaattcctttgctcacagtttatctccaacactagaacattcctcgcttttcagtgggtcatactcgtccctaagtcccaatcctctcaattctagggcagtagaggatatatcttctagtagaacaaatccttacagttacgccatgtcaacagaggaagctcggttcctgacttatcacatgtggcctctcacattcctttcaccctccgaactcgcccgcgccgggttttattatatagggcctggagatcgcgttgcctgcttcgcatgcgggggaaaactctctaactgggaacctaaagatgacgctatgtctgaacaccggcggcactttccaaattgcccatttttggaaaattcattagaaactcttcgattttcaatatcaaacctatcaatgcagacacacgccgcacgcatgcggacattcatgtattggcccagtagtgtgcccgtacaaccagagcagttggcgagtgctggattttattatgttgggaggaatgacgatgtaaaatgcttttgctgtgacggggggctgcgatgctgggaatctggggacgatccttgggtagagcatgcgaaatggtttccacggtgtgagttcctcattagaatgaagggacaggaatttgttgatgagatccaggggaggtatcctcacttacttgaacagctcctctctacatccgatacaacgggagaagaaaacgctgatcctcccatcatccatttcgggcctggggaatcctcatccgaagacgccgtcatgatgaacactcccgtggtgaagtcagctctggaaatggggtttaatcgcgatctcgtcaaacagacagtgcagtccaaaatcctgactacaggagaaaattataaaacagtcaacgatatagtttcagcccttctgaacgcagaagatgaaaagagggaagaagaaaaagaaaaacaggccgaggagatggcctctgatgatctatctctcataaggaaaaaccggatggcactattccagcagctcacttgcgtgctccctatcctcgataaccttcttaaagctaatgtcattaataaacaggaacacgatataataaaacagaaaacacagatcccactacaggctagggagctgatagatacaatcctagttaaaggaaacgctgcggccaacatctttaagaattgccttaaagaaatcgattcaacattgtataagaacctgtttgtggataagaacatgaaatatatccctactgaagatgtgtctggacttagtcttgaagaacagctgcggcggcttcaggaagagagaacatgcaaagtgtgtatggacaaagaggtctctgtagtatttattccttgtgggcacctagtggtatgtcaggagtgcgcaccatccctcaggaagtgtccaatttgcagagggattattaaaggaactgtgcggacttttctgtct

SEQ ID NO: 89824 - DNA, 1854 bp, Artificial Sequence
  derived and/or modified sequence
atgcacaagacagcgtctcaacgactgttcccaggtccaagttaccaaaacattaagtcgattatggaagactcgaccatcctgtctgattggacaaatagcaataaacagaaaatgaaatacgatttctcatgtgaactatatcgcatgtctacgtattcgacttttccggcaggtgtgcccgtgagcgagcgatcactggcgagggccggattctattatacgggggtgaatgacaaggtgaagtgtttctgttgtgggctgatgctggacaattggaaactgggcgattctccaatacagaagcataagcaattataccccagctgtagcttcatacagaatctggtgagtgccagcctgggttcaacatcaaagaacactagccccatgcgcaacagttttgctcattctctgtcacctactctggaacactccagcctgttttcaggctcttatagctccctcagccccaaccccctgaactcccgcgccgtggaagatatatcctcatcacgcactaacccgtactcgtacgctatgtcgaccgaagaggctcgttttttgacttaccatatgtggccgctgactttcctgagtccgagtgagctcgcacgtgcagggttctactacatagggcctggcgatagggtggcatgctttgcttgtgggggcaagctctctaattgggagcctaaagacgacgctatgtccgagcatcgccgccacttccctaactgtccctttctagaaaacagcttggagactcttcggttttctatcagcaacctgagtatgcaaacccacgccgcccgcatgcgaacttttatgtactggccctcctccgtccccgtacaacctgagcagctggcatccgcaggcttctactacgttggtcgcaacgatgatgtgaaatgtttttgctgcgacggtggactccggtgctgggagtcaggagatgacccctgggtcgaacacgccaagtggttccccaggtgcgaattcctgataaggatgaaggggcaggaattcgttgatgaaattcagggacggtacccacatctcctggagcagttgctttccacctcggacaccactggagaggaaaacgccgacccgccaatcattcacttcggtcccggtgagagtagcagtgaggatgctgtgatgatgaacacgccggtggtgaagtctgctttggagatgggtttcaatcgggacttggtaaagcaaacagttcaatcaaagatactgactacaggtgagaactataagactgttaacgatatcgtgtccgctttgttaaatgccgaagatgagaagcgtgaggaggagaaagaaaagcaggccgaagaaatggcgtcagacgacttaagcttgatcagaaaaaatagaatggccctattccagcaattgacgtgtgtccttccaattcttgataatctgctaaaggcaaatgtgatcaataagcaggaacatgatatcataaaacagaagactcagatccccctacaggcacgagaactgattgatactattctggtcaaagggaacgccgctgctaacatattcaagaattgtctgaaagaaatcgattcgacactgtacaaaaatctgtttgtggacaagaatatgaaatatatccctacagaggatgtgagcgggctaagtctggaagaacagcttcgcagactgcaggaagaaaggacatgtaaagtgtgcatggacaaggaagtctccgtggtctttatcccttgtggtcacttggttgtttgccaggagtgtgcaccaagcctccggaaatgccctatttgccgaggtatcatcaaaggtacagttcgcacttttttgagt

SEQ ID NO: 89825 - DNA, 1854 bp, Artificial Sequence
  derived and/or modified sequence
atgcataaaactgctagccaacgtctttttccgggtcctagctatcagaatattaagtcgataatggaggatagcactatactttctgactggacgaattcgaataaacaaaagatgaagtatgacttctcctgcgaactgtataggatgtcaacgtactcgacattccccgcgggcgtcccggtgagcgagcgctccttagcccgcgcaggtttctattacacaggcgtcaacgacaaggtgaaatgtttttgctgcgggttaatgctggacaactggaagcttggcgattcgccgattcagaagcataaacaactgtatccatcatgtagctttattcaaaacttagttagtgctagtctcggcagcacttccaaaaatacaagtccaatgcgtaactcgttcgcccatagtctgtcccctacactagaacactctagtttgttcagcggatcctattcctccctcagtcccaacccccttaactcgcgtgcagtcgaggatatatcgagcagccggaccaatccgtacagctatgccatgagtacggaggaagcccgtttccttacatatcatatgtggcccctgacgtttcttagtcctagtgaacttgcgcgggctgggttctactatatcggcccaggggacagggtggcttgctttgcgtgcggaggtaaactctcgaattgggagcccaaggacgacgctatgtcggaacatcggcgacactttccaaattgcccttttttagaaaactctctcgagacattgcgtttctcgatctctaatttgtcgatgcaaactcatgcggcccgtatgcgtaccttcatgtattggccgtcgagcgtaccagttcagccggagcagctcgcatccgctgggttctattacgttgggcgaaatgacgacgttaagtgtttctgctgcgatgggggcctaagatgttgggaatcaggcgacgatccctgggtggagcacgcgaagtggttcccacgctgtgagttcctcattaggatgaaggggcaggaattcgtggatgaaattcagggacgctacccccaccttcttgagcagttgctcagcacgagtgacacaactggtgaagagaacgcagatcccccgatcattcatttcgggcctggcgagagttctagtgaagacgctgtcatgatgaataccccagttgtaaagtccgctctcgagatgggtttcaaccgggacctcgtgaagcaaacagttcagtcaaagatcttgacgacaggggagaattataagacggtaaatgatatcgttagtgcccttctcaatgcagaagacgagaagagggaggaagaaaaagagaagcaggcggaagagatggcctctgacgacctcagtttgatccggaagaatcgtatggcacttttccaacagttgacatgtgtcttacccatcctggacaacctcctgaaagctaatgtgatcaataagcaggaacatgatattatcaagcagaagacccagatcccgctgcaagcccgtgaactaattgatactatcctcgtaaaagggaatgcagccgccaacattttcaaaaattgtctaaaggaaatagacagcacgctctataagaatctgttcgttgacaagaatatgaagtatatccctacggaggatgtctccggactttctcttgaggagcagcttcgacgacttcaagaagagcgcacatgtaaagtttgcatggacaaagaggtctcggtggtatttattccgtgtggtcatttggtggtatgccaggaatgtgccccgtctcttcgcaagtgtccaatttgccggggtatcatcaagggtacggtccggacctttttgagt

SEQ ID NO: 89826 - DNA, 1854 bp, Artificial Sequence
  derived and/or modified sequence
atgcataaaacggcatcccagcgcctgttcccaggaccgtcctaccaaaacataaagtcgatcatggaggacagcacgatcctctccgactggaccaactcgaacaaacagaagatgaagtacgatttttcgtgcgagctgtacaggatgtcaacctattcgactttcccggccggtgtcccggtgtccgagagatccctggcacgggcgggcttctactataccggagttaatgacaaggtcaaatgcttttgctgtggtctgatgctcgataattggaagctcggagacagccccatccaaaagcacaagcagctgtacccgtcctgctcgtttatccaaaatctggtgtcggcctccctgggtagcacctcgaagaacacctcaccaatgaggaatagctttgcccacagcctgtcaccgactcttgaacattcatcccttttctccggctcgtactcgagcttgagccctaacccccttaattcgagagctgtggaggacatttcgtcctcgcgcactaatccgtacagctacgcgatgtccaccgaggaagccaggtttctgacttaccacatgtggccgctgaccttcctgtcgccgagcgagctcgcccgcgccggcttctactacatcggcccgggagacagggtggcctgcttcgcctgcggcggaaagctgtccaattgggaaccaaaggacgacgcgatgagcgaacaccgccgacattttccaaactgtccgtttctcgagaactcgctggaaaccttgcgtttctccatttccaacctctcgatgcagacccacgccgcccgcatgcggactttcatgtattggccatcttcggtgccagtccagccggagcagttggcttcagcgggattctactacgtcggacgcaatgatgacgtgaagtgcttctgttgcgatgggggcctgcgctgctgggagtcgggagacgatccttgggtggagcacgcgaagtggtttccgcgctgcgagtttctgatcaggatgaaaggacaggaattcgtagatgaaattcagggaaggtacccacacctgctcgagcaactcttgtctaccagcgacactactggagaggagaacgccgatccaccgatcatccattttggaccgggggaaagctcctccgaggacgctgtcatgatgaatactcccgtcgtgaaatcggctctggaaatgggctttaatcgggaccttgtgaaacagacggtgcagagcaagatcctgaccaccggagaaaactacaagactgtgaacgacatcgtcagcgcgctgctcaatgcagaggacgagaagagagaggaagagaaggaaaagcaagctgaagaaatggcatccgatgatttgtctctgatccgcaagaatagaatggcactcttccagcagctcacgtgcgtccttccaatcctcgacaacctcctcaaagccaatgtgatcaataagcaggaacacgacatcatcaagcaaaagacccagatacccttgcaggctcgggagctgatcgacaccatcctcgtcaagggtaacgccgccgccaatatcttcaagaactgcttgaaggagatcgattcgacgttgtacaaaaatctctttgtggataagaacatgaagtacatcccgactgaggatgtgtcaggattgtcgttggaggagcaactgagacgcctccaggaagagcgcacgtgtaaagtctgcatggataaggaagtctccgtggtgttcatcccttgtggacatcttgtggtgtgtcaagagtgtgctccgtcgcttcgcaagtgccctatttgccggggtatcatcaaagggactgtgcggacttttctgtcg

SEQ ID NO: 89827 - DNA, 1854 bp, Artificial Sequence
  derived and/or modified sequence
atgcacaaaactgcctcgcagagactgttcccgggcccatcataccaaaacatcaaatcgatcatggaggacagcacgatcctctcagattggactaatagcaataagcaaaagatgaagtacgacttctcgtgtgagctctaccgcatgtccacctactcgacctttcctgccggcgtgccagtgtccgaacgctcccttgctagagcaggtttctattacaccggggttaacgacaaagtgaagtgcttttgctgtggcctgatgcttgacaattggaaacttggagattcgccgatacaaaaacataaacagttgtatccgagctgctcgttcatccaaaacctcgtgtccgcttctctgggctccacctccaagaacacttcacctatgcggaactcgttcgctcactcgctcagccccactctcgaacattcttcgctgttcagcggctcttactccagcctttcaccgaacccgctgaactcccgcgccgtcgaggacatctctagctcacggacgaatccttatagctacgcgatgtcgaccgaagaggcccgattcttgacctaccatatgtggccactgaccttcttgtctccatccgaactggcgagggccggtttttactacatcggaccaggggaccgggttgcctgcttcgcatgcggaggtaagctgtccaactgggaacccaaggacgacgctatgtcggagcaccgcagacacttcccgaattgccccttcctcgaaaattcgctcgaaaccctgcggttttcgatttcaaacctgtccatgcagactcatgctgcgagaatgagaaccttcatgtactggccaagctctgtgccagtccagcctgagcagcttgcgtccgccggtttctactacgtgggaagaaacgacgacgtgaagtgtttttgctgtgacgggggactgcggtgctgggagtccggagatgatccgtgggtggagcacgccaagtggtttccgcgctgtgagttcctcattcgcatgaagggacaagaattcgtggatgagatccagggacgctacccgcacctcctggaacaactgctgagcacctcggacacgactggagaagaaaacgccgatcctcccatcatccactttggccctggtgagagcagctccgaagatgccgtcatgatgaacactccggtggtgaaaagcgcccttgagatgggcttcaatcgggacctggttaagcagaccgtccagtcaaagatcctgactaccggcgagaactacaagactgtcaacgacatcgtgtccgcgctcctgaatgcagaagatgagaagcgcgaagaggagaaggaaaagcaggcggaagaaatggcgtctgacgatctgtcgctcatccgcaagaataggatggcgctgtttcaacagctcacctgcgtcttgccgattctggataacctgctcaaagcaaacgtgatcaacaagcaagaacatgacatcattaagcaaaagactcagatcccgcttcaggccagggaactgattgacacgatcctcgtgaagggaaacgccgcagctaacatctttaagaattgtcttaaagagatcgatagcactctgtacaaaaacttgtttgtggacaaaaacatgaagtacatcccgaccgaagatgtgtccgggctctctttggaggaacagttgcgccgactgcaagaagaacgaacgtgcaaggtgtgcatggacaaggaagttagcgtggtgttcatcccgtgcggtcatctcgtggtgtgccaggaatgtgcaccaagcctgcgcaagtgcccaatttgccggggaatcatcaaaggaactgtgcgtactttcctctcg

SEQ ID NO: 89828 - DNA, 1854 bp, Artificial Sequence
  derived and/or modified sequence
atgcataaaaccgcttcacaacggctgttccctggaccttcataccagaatatcaagtccataatggaagatagcaccatcttgtcggactggaccaactcaaacaagcagaagatgaaatacgattttagctgtgaactctaccgcatgtcgacttactcgacgtttccagcaggagtgcccgtgagcgaacggtcgctggccagagcaggtttctactacactggagtcaatgacaaggttaaatgcttctgttgtggtcttatgctcgataattggaaacttggagattcgcctattcagaagcacaagcagctctacccgtcttgctcctttatccaaaacttggtgtcagcatcactgggatccactagcaagaatacttcacctatgagaaacagctttgcccattccctctcccctaccctcgagcacagcagcctcttttcgggatcgtactcgtccctttccccgaatcctctgaattcgagagcggtggaagatatctcatcctccagaacgaacccctacagctacgcaatgagcactgaagaggcacggtttcttacttatcacatgtggcccctcaccttcctgagcccctccgaacttgcaagagcaggcttttactacatcggaccgggcgatagagtggcatgtttcgcttgtggaggtaagctgtcaaactgggagccaaaggatgacgccatgtccgaacatagacgccacttcccaaactgtccttttctggaaaactcgctggaaaccctgcgattctcgatttccaatctgtcgatgcagactcatgccgcgagaatgcgcacctttatgtactggccttcgtccgtgcctgtccaacctgaacagctggcatcagcagggttttactacgttggacggaacgacgatgtgaagtgcttctgttgcgatggcggtctgcggtgttgggaatccggtgatgatccttgggtggaacacgcaaagtggtttcctcgttgcgaattcttgatccggatgaagggacaggagtttgtggatgagattcaaggtagatatccgcatcttcttgaacagctgttgtcgaccagcgatactaccggcgaagaaaacgcggacccacctattatccatttcggccccggggagtcgtcgtcggaagatgcagtgatgatgaataccccggtggtgaagagcgccctcgagatgggtttcaacagagatcttgtgaagcaaaccgtgcaaagcaagatcttgaccaccggtgaaaactacaaaaccgtgaatgatattgtgtccgcgcttcttaacgccgaagatgaaaagcgcgaggaagaaaaagaaaagcaagcggaggaaatggcaagcgatgacctgtcgcttattcggaagaatcgaatggcactttttcagcaactgacctgtgtcctgcctattctggacaacctcctcaaggcgaatgtcattaacaaacaagagcacgacatcattaagcaaaagactcaaattccactccaagcgcgcgaactgattgatactatacttgtgaaggggaacgccgccgccaacatcttcaagaactgtctcaaggagattgattcaactctctacaaaaacctgttcgtggacaagaacatgaagtacataccaactgaggatgtgtccggactcagcttggaagagcaacttaggcgcctccaagaagagagaacgtgtaaggtgtgtatggataaggaagtctccgtggtgtttatcccgtgtggacatctcgtggtgtgtcaggaatgtgctccatcacttagaaaatgtcccatctgtagaggaatcattaagggaacggtcaggacctttctttcc

SEQ ID NO: 89829 - DNA, 1854 bp, Artificial Sequence
  derived and/or modified sequence
atgcacaaaaccgcttcccaacgcttgtttccgggaccgtcataccagaacatcaagtcgatcatggaagatagcactatcctgtcggactggaccaattcgaacaagcagaagatgaagtatgacttctcctgcgagctgtacagaatgtccacctactctacgttcccggccggagtgccggtgtccgaacggagcctggcccgggcagggttctactacactggggtgaacgacaaagtgaagtgcttctgctgcgggcttatgttggacaactggaagttgggtgattcgccgatccaaaagcacaagcagctctacccgtcgtgcagcttcatccagaatctggtgagcgcgtcactgggatcgacttctaaaaacacctcgccgatgcggaactccttcgcccattctctctcgccaaccctggaacattcttctctgttctcgggaagctactcaagcctgagcccgaatccgctgaattcacgggccgtcgaggatatatcgtcgtcacggactaatccttactcatacgcgatgtcgactgaggaggcaaggttcctgacttaccacatgtggccgctcacgttcttgtccccgtcggaactggcgcgggccggattctactacattggtccaggagacagagtggcctgtttcgcatgtggagggaagctgagtaattgggagccgaaggacgatgccatgagcgaacaccggagacattttcccaactgcccattcctggaaaactcgctcgaaaccctccgcttctcgatctcgaacctgtctatgcagactcatgcagcccgcatgcggactttcatgtactggccttcgtcagtgccagtgcagcctgaacagcttgcctccgctggattctattacgtgggaagaaatgacgatgtcaagtgcttttgctgtgacggagggctgaggtgctgggaatcaggtgatgatccatgggtggaacacgcaaagtggttcccgcgctgcgagtttttgatccgcatgaagggacaggagtttgtcgacgagatccaaggacgctatccacacctgctggagcagctgctgtcaacctcagacactaccggcgaggagaatgccgacccacctatcatccacttcgggcctggggagtcctcctccgaggacgccgtcatgatgaacaccccagtcgtcaaatccgcactggaaatgggattcaacagggatctggtgaagcagactgtgcaatcgaaaatcctgacgaccggagaaaactacaagactgtgaacgatatcgtgtcggccctcctcaacgccgaggacgaaaagcgcgaggaggagaaggagaagcaagctgaggaaatggcctcggatgatctgtccctgattcgaaagaatcggatggccttgttccagcaactcacttgcgtgcttcccatcctggacaacctgctgaaagccaatgttatcaacaaacaggaacatgacatcatcaagcagaaaacccaaatcccgctgcaggctcgagagctcatcgacactatcttggtgaagggaaacgcagcagcaaacattttcaaaaactgcttgaaagaaattgactcgacgctctacaagaacctgttcgtggacaaaaacatgaagtacattcctaccgaggacgtgagcggactgtcccttgaagagcagctcaggaggctgcaggaagagcgcacctgcaaggtgtgtatggacaaggaagttagcgtggtctttatcccgtgtggacatctggtggtgtgccaagagtgcgcgccgagcctgcggaagtgccctatttgtcgcggaatcattaagggaaccgtcagaactttcttgtcg

SEQ ID NO: 89830 - DNA, 1854 bp, Artificial Sequence
  derived and/or modified sequence
atgcacaagactgcatcccaacgcctgtttccgggtcccagctaccagaatatcaagagcatcatggaggactccactatccttagtgattggaccaacagtaataagcagaaaatgaagtacgatttctcatgtgaactttatcgtatgtcaacctactcgacttttccggccggggtccccgtctcggaaaggagcctcgcacgtgcaggattttactacaccggagtgaacgacaaggtgaagtgcttctgctgcggtctgatgctggacaactggaagctgggggactcgccaattcagaagcataaacaattgtacccgtcttgttcctttatccaaaatctggtatccgcttccctgggtagcacctcgaagaatacttcacctatgcgcaattccttcgcccactcattgtcgcccactctggaacacagcagcctgttctccggttcgtactcgtccctgtcgccaaacccgctgaactccagagcagtcgaggacatctcgtcatctcggactaacccttacagctacgcaatgtcaactgaagaagcccggttcctgacctaccacatgtggccgctcaccttcctgagcccatccgagttggctcgcgctggcttctactacatcggacccggcgacagggtggcttgctttgcctgcggaggtaagctctcgaactgggaaccaaaggacgacgccatgtccgaacaccgccggcactttccgaattgcccgttcctcgagaattcgctggaaacgctgaggttctcgatctcaaatctgtcaatgcaaacccatgctgcgcggatgagaaccttcatgtactggccctcatcagtgccggtgcaaccagaacagctcgcgtctgccggtttctactacgtcgggagaaacgatgatgtgaagtgtttttgttgcgacggtggccttcggtgttgggaatctggagacgatccatgggtcgaacatgccaaatggttccctagatgcgagttcctgatcagaatgaagggacaggaattcgtagatgagatccaggggcggtacccacatctgcttgagcagctcctctccacctcggatactacgggcgaggagaacgcagacccgcctatcattcacttcggaccgggagaatcctcatcggaggacgcggtgatgatgaacaccccggtggtgaagtccgccctggaaatggggttcaaccgggacctcgtcaaacaaacggtgcaatcaaagatcctgactactggagagaactataagaccgtcaacgacatcgtctccgctctcttgaacgcggaggacgaaaaacgcgaggaagaaaaggaaaagcaggccgaagaaatggcgtccgacgatctgtcacttatacgaaagaataggatggccttgtttcagcagctgacctgcgtgcttccgattctggataaccttctgaaagcgaacgtgatcaataaacaggagcatgatatcatcaagcagaaaactcaaatcccgctccaagcccgcgagctcattgacaccatcctggtgaaaggaaacgcagccgcgaacattttcaaaaactgtctgaaggagatcgacagcacgctttacaaaaatctgttcgtggacaaaaacatgaagtacatccctactgaagatgtctcgggactctccctcgaagaacagttgcgccggctccaggaggagaggacctgcaaggtgtgcatggataaggaagtgagcgttgtgttcataccatgcggacacttggttgtgtgccaggagtgcgcaccatccctgagaaagtgccctatctgccgcggcatcataaaaggaacggtccgtactttcctcagc

SEQ ID NO: 89831 - DNA, 1854 bp, Artificial Sequence
  derived and/or modified sequence
atgcataagacggcttctcagagactatttcccggtcccagctaccaaaatatcaagtccatcatggaggacagtaccatcctgtccgattggactaactccaacaaacagaagatgaaatacgacttctcgtgcgagttgtaccgcatgagcacctactctacatttccagccggagtccccgtgtccgaaaggtcgcttgcccgggccggcttctactacaccggggtgaatgataaagttaaatgcttctgctgtggcctcatgctcgacaattggaagctgggtgactcacccattcagaagcacaaacagctctatccttcatgcagcttcattcagaatctcgtctctgcaagtttgggatcaacctcaaaaaacacatcgcctatgcggaatagctttgctcatagcctgtccccaactctcgagcattcctcactcttctcgggttcgtactcctcgctgtcccctaacccactcaacagcagggccgtagaagatatcagctcctctaggaccaacccttattcatatgccatgtccacagaggaagctaggttcttaacataccacatgtggccactgacgtttctgtcccctagcgagttggcccgggccggcttttattatatcgggccaggagatagagtggcttgcttcgcgtgcggtgggaaactctcaaactgggaacccaaggacgatgccatgagtgaacatcgcaggcacttccccaactgtccgtttttggaaaacagtttagagactctccgctttagcatctctaacctgagcatgcagactcacgccgcccgtatgagaactttcatgtattggccttcgagtgttccagtacagcccgaacagctcgcttcagcaggattctactatgtgggacgcaatgacgatgtcaaatgcttctgctgcgacggcgggctgagatgctgggagtccggcgatgatccttgggtcgagcatgcaaagtggtttccacgatgcgaattcctgattagaatgaaaggtcaggagtttgttgacgagattcagggccggtaccctcacttgcttgagcagctgttgagcacgagcgacacaacaggagaggagaatgcggacccacccattatccacttcgggcccggcgagtcttctagtgaggatgctgtgatgatgaatactccagtagtgaagagcgccctggagatgggctttaacagggatctcgtgaagcagacggtgcagtcaaagattttgactaccggtgagaactacaagacggtgaatgatattgtgtcagcattgctgaatgctgaggacgagaagcgggaggaggaaaaggagaagcaggccgaagagatggcgtccgacgacctgagcctgataaggaaaaacaggatggctttgttccagcagctcacctgcgtcttacccattttggacaaccttcttaaggccaacgtgatcaacaagcaggagcacgatatcataaagcagaagacccagatacctttgcaagccagggagctcattgatacaatcctggtcaagggcaacgcggctgccaatattttcaagaactgtctgaaagaaattgacagcactctctataagaacctcttcgtggacaaaaatatgaaatatatccccactgaggacgttagcggcctgtctttagaagagcaactccgtaggttgcaggaggagcggacctgtaaagtctgcatggacaaggaagtgtcagtagtattcattccatgtggtcatctcgtcgtgtgccaggagtgcgccccttcattaagaaaatgtcctatctgccgaggcatcatcaaaggaactgtccggacatttctctct

SEQ ID NO: 89832 - DNA, 1854 bp, Artificial Sequence
  derived and/or modified sequence
atgcacaaaaccgcaagccagcgcctcttcccgggaccgtcctaccagaacatcaagtcaatcatggaggactccactatcctcagcgattggaccaacagcaacaagcagaagatgaagtacgatttctcctgcgagctgtacaggatgtccacgtactccaccttcccggccggagtcccagtgtcagaacggagcttggcccgcgccggattttactatacgggtgtgaatgataaggtgaagtgcttctgttgcggtctgatgctggacaattggaagttgggcgacagccctatccaaaagcacaagcagttgtacccttcctgctcgttcatccagaaccttgtctcggcctcattgggctctacctccaagaacactagcccgatgagaaactccttcgcacactctctctcgccgactctggagcacagctccttgttctccggatcatattcatccctgtccccgaacccactgaactcacgtgcggtggaagatatctctagctcccgcaccaacccatactcctacgctatgtcaactgaagaagccagattcttgacttaccatatgtggcctctgaccttcctttcgcctagcgagctggcgagagctggcttctattacattggcccaggagacagggtcgcatgcttcgcctgcggaggaaagctctcgaactgggaaccgaaggacgacgcgatgtcggaacatagaaggcattttccgaactgccctttcctggaaaattcgctggaaaccctgcgtttttcaatttctaacctctccatgcagacgcacgccgcacgcatgcggactttcatgtactggccgtcctccgtgccagtgcaaccggaacagcttgcctccgcaggcttttactacgtgggccggaatgacgacgtgaagtgtttctgctgcgacggcggactgcgctgttgggagtcaggagacgatccgtgggtcgagcatgctaaatggttcccgagatgcgaattcctcatcaggatgaaaggacaggagttcgtcgacgagatccaaggacggtacccccatctgctcgagcaactgctgagcactagcgacactaccggggaagaaaacgcggacccgcctattatccacttcggcccaggggaatcctcatcagaagatgcggtcatgatgaacaccccagtggtgaaaagcgcgctcgaaatgggtttcaatcgcgacctcgtgaaacagaccgtgcagtcgaaaatcctcacgacgggagagaactacaaaaccgtgaacgatatcgtgtcggcgttgttgaatgcggaggacgaaaagcgggaggaagaaaaggaaaaacaggccgaagaaatggcgtcggacgacctctcgctcatcagaaaaaacagaatggcactctttcaacagctgacgtgcgtgctgccgatccttgacaacctcctgaaggccaacgtgatcaataagcaggagcatgacatcattaagcaaaaaacccagatcccactccaagcacgcgagctcatcgacaccattctcgtcaagggaaacgctgccgcgaatatctttaagaattgcctcaaggaaattgactcaaccctgtacaaaaatctgttcgtcgataagaacatgaagtacatccctaccgaggacgtgtccgggctgagcctcgaggaacagctcagaagattgcaggaagagaggacctgcaaggtttgcatggataaggaggtttcggtcgtctttatcccatgcggccatctggtcgtgtgtcaggaatgcgccccgagtctcagaaagtgtccaatttgcaggggaatcatcaagggaactgtgaggacctttctctcc

SEQ ID NO: 89833 - DNA, 1854 bp, Artificial Sequence
  derived and/or modified sequence
atgcataagacggctagtcagcgactgttcccggggcccagttaccaaaatatcaagtctattatggaggacagcacaatcctgtccgactggaccaatagcaacaagcagaagatgaaatatgatttctcctgcgaattgtaccggatgtctacctattctactttccccgccggggttcccgtatcagaaagatccctggcaagagctgggttctactacacgggcgttaacgataaggtgaagtgcttttgctgcggactgatgctagataattggaagctgggcgatagtccaattcagaagcacaagcaactgtatccctcttgttcttttatacagaatctagtgagcgcctccctcgggtccaccagcaagaacactagcccaatgagaaatagctttgcgcacagtctgtccccaactctagaacacagcagcctgttttcgggctcgtattccagtctttcaccaaatcccctaaattcacgcgccgttgaagacatttctagctctagaaccaatccatactcatacgctatgtccactgaggaggcacgattcctgacctatcatatgtggccgctaacattcttaagtccaagtgagttagcccgggcggggttctattatatcgggccaggagatagggtggcgtgctttgcctgtggcgggaaactatcgaattgggagcccaaagatgacgctatgtctgagcacagacggcacttccctaattgtccctttctggaaaacagtctggagactctacgcttcagtatctccaacctgtccatgcaaacacacgccgcaagaatgcggacctttatgtactggccatccagtgtgcctgttcagcctgaacagctagcgagtgccggattctactacgtgggccgcaacgacgacgtaaaatgtttctgctgcgacggtggacttcgctgctgggaatctggtgacgacccatgggtggaacatgcaaaatggtttccacgttgtgagtttctcatacggatgaaagggcaggaattcgtagacgagattcagggtagatatccacatcttctggaacagttgctcagcacctcagacacaacgggcgaggaaaacgccgatccacctattatccactttgggcctggcgagtctagtagcgaggatgccgtcatgatgaacacccccgtggtgaagtctgccctggagatgggatttaatcgggatctcgtcaaacagacagtgcagtccaagattctgactactggcgagaattataagaccgtcaacgatatagtgagtgccctattaaacgccgaggacgagaagagagaggaagagaaagagaagcaggccgaggaaatggcgtcggatgatctgagtttgattcggaagaaccgcatggcactctttcaacagctgacgtgcgtcttgccaattctggacaatcttttgaaggccaatgttatcaacaagcaagagcatgacatcattaaacaaaaaacacaaatcccgttacaggcccgtgaattaatagacactattctggttaagggaaacgccgccgccaacatttttaaaaattgtctgaaggagatcgactcaactctgtacaagaatctatttgttgacaaaaatatgaaatatattcccactgaagacgtgagcggattgagtttagaggagcaattgaggcgcctgcaggaggagcgcacgtgcaaggtttgtatggacaaagaggtctccgtggtgttcatcccttgtggtcacttggtggtgtgtcaggagtgtgccccctcgctgcggaagtgccccatatgtcgcggcattattaagggtaccgtgcgcaccttcctctct

SEQ ID NO: 89834 - DNA, 1854 bp, Artificial Sequence
  derived and/or modified sequence
atgcataaaactgcctcacaacggctgttcccaggaccatcatatcagaacattaagtctatcatggaagacagcactatcctgtcagactggaccaactctaacaaacagaagatgaaatacgacttcagctgcgaactctataggatgtcgacatacagcacattccctgctggcgtccccgtgtctgagcgcagcctggcgagggccggtttttattacaccggtgtgaatgacaaagtcaagtgtttttgttgtggactgatgctggacaattggaagctgggcgacagtcctatccagaagcataaacagctctatccttcctgctcatttatccagaacctggtcagcgccagcttaggatccacatccaagaatacatcccctatgaggaatagctttgcacattctttatccccgacgcttgagcactcttcactgttcagcgggagttactcttcattgtccccgaatccactcaattctcgagccgtagaggatatcagtagttcgaggacaaatccatactcttacgccatgtctaccgaggaggcaagattcctcacctaccatatgtggccactgactttcttgtcccctagcgaactcgcccgtgccggattctattacattgggcccggagatcgcgtcgcatgctttgcttgtggtggaaagctcagtaactgggagccaaaggacgacgccatgtccgaacatcgtcggcattttcccaactgtccgtttctagaaaatagcctcgagaccctccggttctccatatctaacctgagcatgcagacgcatgccgccaggatgagaaccttcatgtattggcctagttcggtgcccgtccagcccgaacagctcgcctcggctgggttttactacgtaggaagaaacgacgatgtaaagtgtttttgttgcgatggcgggctccgatgctgggagtctggagacgatccctgggtggaacatgccaagtggttccccagatgtgagttcctgatcagaatgaaagggcaggagtttgtggacgagattcagggtcggtacccgcatctgctggaacaactgttatcaacctccgacactacaggagaagaaaatgccgatcctccaatcattcattttggccccggagagtcatcctccgaggacgcagtaatgatgaatactccagtcgtgaagtcggcattagagatgggctttaacagggacttggtgaagcagacggtccagtcaaaaatcctgaccactggtgagaactacaagacagtgaacgacatcgtcagcgctcttctgaacgctgaggatgaaaaacgggaggaggagaaagagaagcaggccgaagagatggccagcgacgacttgagtctgattaggaaaaataggatggctctgttccaacaacttacttgcgtcctgcctatcctagacaacctgctgaaagccaacgtgattaataagcaggaacacgacatcattaagcagaagacccagatacctctccaggcacgggaactgatcgatactatcctggtcaagggtaatgcagcagccaacatttttaagaactgcttgaaagaaatcgattctacactgtacaagaacctgtttgtggacaagaacatgaagtacatccccactgaagatgtatctgggctgtctttggaagagcagttgagacggctgcaagaagaacgaacctgcaaggtatgcatggataaagaagtctctgtggtctttatcccctgcggccacttggttgtttgtcaggagtgcgcacctagtctgagaaaatgcccaatctgccgcggtattattaaggggaccgtgcggacatttctatca

SEQ ID NO: 89835 - DNA, 1854 bp, Artificial Sequence
  derived and/or modified sequence
atgcacaagacagcttcacagcgactatttccagggcctagctatcagaacatcaaaagtatcatggaggacagcaccatcctatcggactggaccaatagtaacaagcagaaaatgaagtacgattttagctgcgagctctaccggatgagcacttatagtactttccccgccggagtacctgtgagtgagcggtctctggccagagccggcttctattacaccggcgtgaacgataaagtgaaatgcttttgttgtgggcttatgcttgataactggaagctgggcgactctcccattcagaaacacaagcagctttacccatcctgctctttcattcaaaatctggtctccgccagtctgggcagcacatctaagaacacaagcccaatgcgcaatagttttgcgcattccttgagtccaacgctcgaacacagcagtctgttcagcggttcgtacagcagtttatctcccaaccccttaaattcacgggccgtggaagacattagctcttcccggaccaacccttattcttatgccatgtccaccgaggaggcaagattcctaacctatcacatgtggccactgaccttcctctcacccagcgaactcgcccgagccggcttctattatatcgggcccggagatcgggtggcctgcttcgcctgcggcggaaagttgtcaaactgggagcccaaggacgacgccatgagcgagcacagaaggcacttcccgaattgtcccttcttagagaattctctggaaacccttagatttagcatttctaatctctctatgcaaactcacgctgccaggatgaggaccttcatgtattggccttcgtccgtgccagtccaacccgagcagctggcatccgccgggttttactacgtggggcggaatgatgatgtgaagtgcttttgttgcgatgggggcctgcgatgttgggagtctggggatgacccatgggtggaacacgcaaaatggtttcccaggtgtgaattccttataaggatgaaggggcaggagttcgtggacgaaatccagggtaggtaccctcacctgctggaacagctcttatctacatctgataccaccggagaggaaaacgccgatcctccaattatacacttcggccctggcgaatctagctctgaggacgctgttatgatgaacacacctgtggtgaaaagcgctctggaaatgggattcaaccgggatctcgttaaacagacagtacaatcaaagattctgaccactggcgagaactacaagacagtcaatgacatcgtcagtgcactgctaaacgctgaggacgaaaagagggaagaggagaaggagaagcaggccgaggagatggcatctgacgatctgtcgctgatccgcaagaatcggatggcactgttccagcagctgacatgcgtgttgccgatactcgataatcttcttaaggcgaatgtaattaacaaacaggagcacgatatcattaaacagaagacacagattccattgcaggctagagaactgattgacaccattctggtaaaagggaacgctgcagctaatatcttcaaaaattgcttgaaggaaatcgattctactttgtataaaaacctatttgtcgataaaaacatgaagtacatcccaaccgaggacgtgtctggcctcagtttggaagagcaactcaggcggttacaggaagagcgcacgtgtaaagtgtgcatggacaaagaagtgtccgtggtgttcataccttgcggccacctcgtggtctgtcaggagtgtgcaccctcattgcgcaagtgcccaatctgcagagggataatcaagggtaccgtgcgcacgttcctctcg

SEQ ID NO: 89836 - DNA, 1854 bp, Artificial Sequence
  derived and/or modified sequence
atgcacaaaactgcttcacagagactcttcccaggacctagctaccagaatattaagtccatcatggaggacagcacaatactgtctgactggacaaattcaaacaagcagaagatgaaatacgatttctcctgtgagctataccgtatgtctacttattcaaccttcccagccggggttcccgtgtccgaacgatccctggcaagggcaggattctattataccggggttaatgacaaagtgaaatgtttctgttgtggactgatgctggataattggaaacttggagattctcccatccagaaacacaagcagctatacccgagttgcagtttcattcagaacttggtaagcgccagtctcggcagtaccagtaagaacacctctcccatgcgcaatagcttcgctcattctttatcccccacactggagcattcatcactgttttccggaagctactcatccctttctccaaacccgctcaactcacgagctgtagaagatattagcagttcacggaccaacccctatagctacgccatgtctacagaggaggctcgatttctcacgtatcatatgtggcctctgacctttctgtcgccatccgagttagcccgggcaggcttttattacatcggaccaggggatcgtgtggcctgtttcgcatgtggcgggaaattatctaactgggaacccaaggacgatgcaatgtccgaacacaggagacatttccctaattgcccattcctggagaattcactcgaaactctaaggttcagtatatccaatcttagtatgcaaactcatgctgcgagaatgaggacttttatgtactggccctctagtgtgccggtacaacctgagcaactggctagcgctggtttttattatgtgggcagaaatgatgatgtcaaatgcttctgttgtgacgggggcttgcgctgctgggaaagcggcgacgatccatgggtggagcacgccaagtggttcccccgatgcgaattcctcatccggatgaagggacaagaatttgttgatgagattcagggtcgttacccgcacctgcttgagcagcttctctctacaagtgataccacaggagaagaaaacgccgatccccccattattcactttggtcccggcgaaagttctagcgaagacgcggttatgatgaacacccctgtggtgaaaagtgccctcgagatgggattcaatagggatctggtcaagcagaccgtgcagagcaaaatcttaaccaccggcgagaattacaagaccgttaacgatatcgtgtccgccttgttgaatgctgaggacgaaaagcgtgaggaggagaaagagaaacaggccgaggagatggcctctgacgatctgagcctgattcgcaagaataggatggctctgttccagcagctcacctgtgtcttgcctatcttggataatctgctcaaagctaacgtcattaataagcaagagcatgacatcatcaagcagaaaacccagattcctctccaggcaagagagctcattgataccatacttgtcaaagggaatgcggctgccaatatattcaagaactgcctaaaggaaatcgactcgacactgtacaagaatctttttgtggacaaaaatatgaagtatatcccaacggaggacgtgtctggcctctcactcgaggagcaactacgccgcctgcaagaggagcgcacatgtaaggtgtgcatggacaaggaagtgtctgtggtcttcattccatgcgggcacttggtggtgtgccaagagtgtgccccttctctgcggaagtgccctatttgccggggaatcattaagggaacagtcagaacgttcctcagc

SEQ ID NO: 89837 - DNA, 1854 bp, Artificial Sequence
  derived and/or modified sequence
atgcacaaaactgcctcccagcgcctgtttcctggaccctcctaccaaaacataaagtccattatggaggactcgactattctctccgactggaccaattcgaataagcagaagatgaagtatgacttttcctgcgaactctacagaatgtcaacttattccacctttccagcgggtgttcctgtgtcggaaagatcactcgcccgggcgggcttctactatactggtgtgaatgataaagtcaaatgcttctgttgtggactgatgttggataactggaaactcggtgacagccctattcaaaagcataagcagctttacccatcatgttcctttattcagaacttggtgagcgcttccctgggttcaacttcgaagaacacttcaccaatgaggaacagctttgcacattccctctcgcccaccctggaacactcctccctcttctcaggttcgtactccagcttgagccccaacccgctgaatagcagagcagtggaggatatctcatcttccagaacgaacccctacagctacgcaatgtccaccgaggaggccagatttctgacctaccatatgtggcctctcacctttctgtcgccatcggagcttgcaagggccggattctactacatcggccctggagatagggtcgcatgttttgcgtgtggcggcaaactctcgaactgggagccaaaggatgatgctatgtcggaacatcggagacattttcctaactgccctttcctcgaaaattcactggagactctgagattttctatcagcaaccttagcatgcaaacccacgctgcacggatgcgaactttcatgtactggccatcgtcggtgccagtccaacctgaacagctggcttctgcaggtttttactacgtgggacgtaatgatgatgtgaagtgtttctgttgcgacggagggctcagatgttgggagtccggagatgatccatgggtggaacatgccaagtggtttccacggtgtgaatttctgatccgtatgaaaggtcaggagtttgtggatgaaatccagggaagatacccacatctcctggagcaactcctttccacctcggatactaccggagaagaaaacgccgatcctccaatcatccacttcggtccgggcgaatcatcgagcgaggacgcagtgatgatgaatactccagtggtgaagtcagctctggaaatgggtttcaacagagatcttgtcaagcagaccgtccagagcaagattctgaccactggcgaaaactacaagactgtgaatgatatagtttcagctcttctgaacgccgaagatgagaagcgcgaggaagagaaggaaaaacaggcagaggagatggccagcgacgacctttcgctgattcgcaagaaccggatggcactgttccaacagctgacctgcgtgctgcctatacttgacaaccttctgaaggctaacgtcatcaataagcaagagcacgatatcataaaacaaaagactcagatcccactgcaagcacgtgaactgattgataccattctcgtgaagggaaacgcagcagcgaatatcttcaagaattgcctcaaagaaattgactcaaccctttacaagaacctgttcgtggataagaacatgaagtatatcccgaccgaggacgtgtcgggcctttcgctggaagagcaactgaggcggcttcaggaggaaagaacctgcaaggtgtgtatggacaaggaagtctccgtcgtgtttatcccatgtggacatcttgtggtgtgtcaagagtgtgcaccatccttgaggaagtgtcccatatgtcgtggtatcattaaggggacggtcagaacgtttcttagc

SEQ ID NO: 89838 - DNA, 1854 bp, Artificial Sequence
  derived and/or modified sequence
atgcacaaaaccgcatcacagcgactttttccggggcctagctaccagaatatcaagagcattatggaagattccaccattctttcagattggaccaactccaataagcaaaagatgaagtacgactttagctgcgaactctacagaatgtccacttactccaccttcccagccggagtccctgtgtcggagcgctcccttgcccgagcagggttttactacactggagtgaacgacaaggtgaaatgcttttgctgtggcctgatgcttgataattggaagctgggtgattcgcctattcaaaagcacaaacaactttacccttcgtgttcgtttattcagaatcttgtgagcgcatcgcttggaagcacttccaaaaacacttcaccaatgcgcaacagctttgcgcattcactctcgccaaccctggaacactcatctcttttctccggctcctactcttcactgagccccaatccactgaactccagagcagtcgaagatatctcgtcaagccgcactaatccttactcctatgcaatgtccaccgaagaagcccgcttcctgacgtaccatatgtggccacttacttttctgagcccttccgaacttgcaagagcaggattctattacattggaccaggcgatagggtggcctgctttgcttgtggaggaaaactgagcaactgggagcctaaggatgacgccatgtccgaacataggagacatttccccaactgtccctttctcgaaaactctctggaaactctgagattctccatttccaatctgtccatgcagactcatgcagcaagaatgcggacctttatgtactggccttccagcgtgcctgtgcagccagagcaactggcatcggcaggattttactacgtcggccgcaatgatgatgtgaagtgtttctgttgcgatggtggacttagatgttgggaaagcggagacgatccttgggtcgaacatgcaaagtggtttcctcggtgcgaatttcttattagaatgaagggacaagaatttgtggacgagatccaaggccgctacccacatctcctcgaacagcttctgtctaccagcgacactactggggaagaaaacgccgatcctcctatcatacattttggacctggtgagagctcgtccgaagatgcggttatgatgaacacccctgttgtgaagtccgccctggagatgggtttcaacagagatctggtgaagcagaccgtgcaatcgaagatcctgactaccggcgagaactacaaaaccgtgaatgatattgtgtccgccctcctcaacgcagaagatgagaagcgggaagaggagaaggaaaagcaggccgaagaaatggcgtcggatgatctgtcactcatccgtaagaacagaatggcacttttccaacaacttacttgcgtgctcccaatcctggacaacctccttaaggccaacgtcatcaacaagcaggaacacgacatcattaagcagaaaactcaaattccgctgcaagctcgcgaactgattgacactattctggtgaagggtaatgccgctgcgaacattttcaagaactgcctcaaggaaattgattcgactctgtataagaacctttttgtggataagaatatgaagtacattccgactgaagatgtctccgggctctcgctggaggaacagctgcggcggcttcaagaagagagaacttgcaaggtctgtatggacaaagaagtctcagtggtgttcattccctgcggtcacctggtggtctgccaggagtgtgcaccttcgctgagaaagtgccctatttgccgcgggataatcaaaggcactgtcagaaccttcctgtcc

SEQ ID NO: 89839 - DNA, 1854 bp, Artificial Sequence
  derived and/or modified sequence
atgcataaaaccgcaagccagcgactttttccgggtccttcctatcaaaatatcaaatctattatggaggattcaacgatccttagcgattggacaaactcaaataagcaaaaaatgaaatacgatttttcctgcgagttgtatcgcatgagcacatactctaccttcccggctggagtcccagtgagtgaaaggagtcttgcaagagctgggttttattataccggcgtaaatgataaagtcaagtgcttctgttgcggcttgatgttggataattggaaactcggagattcacctatacaaaaacataaacagctctatccatcgtgtagtttcatacagaacctagtgtctgcaagtcttgggtcaacttcaaaaaacacgtctcctatgcgaaacagtttcgcccattcactgagtcctacattggagcattctagcttgttttcaggatcttattcgtctttaagcccgaatccgctcaattcacgggccgttgaagatatttctagttctcggacgaacccgtactcatatgcgatgtcaacggaagaggcccggttccttacataccacatgtggcctcttacgttcttgtcacctagtgagttagcgcgggccggcttttattacataggacctggtgatcgagtggcatgttttgcctgtggcggaaaacttagcaactgggaaccgaaagatgatgcaatgagcgaacatcgacgacatttcccaaactgcccgtttcttgaaaattctctggaaacactgcgcttttctattagtaatctttcaatgcaaacacatgcggctcggatgagaacgtttatgtactggccttcatctgttcctgtccaacctgaacaattggcgagcgcaggcttttattatgtgggcaggaacgatgatgtgaaatgcttttgctgcgatggaggactgcggtgctgggaatccggagatgatccatgggttgaacacgcaaagtggtttcctcgttgcgaattccttattcgcatgaaagggcaagaatttgttgacgagattcaaggcagatatccgcatcttcttgagcaattgctttccacgagtgacacaactggggaagagaatgctgatcctcctattatccattttggcccgggcgagtcaagttctgaagatgctgtcatgatgaatacccccgtcgtcaaatctgctctagagatgggattcaatagagatttagtcaaacaaacagtccaaagtaaaatattgaccactggggagaactataagacggttaatgacattgtaagcgccctcctaaacgccgaggatgaaaaacgggaagaagaaaaagaaaagcaagccgaagagatggcctcagatgatctctccctcattcggaaaaatcgcatggctctctttcaacaactgacatgcgtccttccgatccttgataatctccttaaagcgaatgtaattaacaagcaagaacacgatattatcaagcagaaaacacaaatcccactgcaggctcgggaacttattgatacgatactggtcaaaggtaacgcggccgcaaatatatttaagaattgcttaaaggagattgactcaactctgtacaaaaacttatttgtcgataaaaatatgaaatacatccctacagaagacgtgagcggacttagtcttgaagaacaattgcgtcgacttcaggaagaacgtacgtgtaaagtatgcatggataaagaggtaagtgttgttttcatcccttgcgggcacctagttgtgtgccaggaatgcgctccgtctctgagaaagtgcccgatttgccggggcatcattaaaggaaccgtccgtacgtttctatct

SEQ ID NO: 89840 - DNA, 1854 bp, Artificial Sequence
  derived and/or modified sequence
atgcacaaaaccgcctctcagcggctgtttccagggcccagttaccaaaacattaaaagcattatggaggatagcactattctgagtgactggacaaactctaacaagcagaaaatgaagtatgacttcagctgcgagctttacagaatgagtacgtactccacgtttcccgcaggggttccggtgtcagaacgctccctcgcccgggccggattttactatacaggagttaatgacaaggtcaaatgcttctgttgtggtctgatgctcgacaattggaaactcggcgactcaccaatccaaaaacataagcagctgtatccgagctgttccttcatacagaaccttgttagcgcaagcttgggtagcacatcaaaaaacaccagccccatgaggaacagtttcgctcactctctgtctcccaccctggaacattctagtctgttttccgggtcatactctagcctttcccctaacccgctcaatagtagggctgtggaggacataagcagcagtcggacaaacccctactcatatgccatgagtaccgaggaagcccgattcctgacgtaccatatgtggcccctcacctttctctccccatccgagctggcacgcgctgggttttactatataggacccggggatagggttgcctgttttgcctgtggcgggaagctgagtaattgggaacccaaggacgacgcaatgtcagagcatagaaggcacttccctaattgcccttttctggaaaattctctggagaccttgagattctcaatctcaaacctgtccatgcagactcatgctgcgcggatgcgcaccttcatgtactggccttcctccgtgccagtacagcccgagcagctcgccagcgccggcttctattacgttggcaggaatgacgacgtcaaatgtttttgctgtgacggaggactgagatgttgggagagcggcgacgatccatgggtggaacacgcaaagtggtttccccggtgtgaatttctgatccggatgaaaggccaggaatttgtagatgagattcagggaaggtacccacaccttctggagcagctcctttcaacatccgatactacaggagaggaaaacgctgatccccccatcattcatttcggaccaggggagtcatcatccgaagatgccgtgatgatgaatacccctgtggttaagtctgccctggaaatggggttcaatagggacctggttaagcagaccgtgcagtccaaaatactgacaacaggagagaattataaaacagttaatgacatcgtgtcagctctgctgaatgctgaggacgagaagagagaggaggaaaaggagaaacaagccgaagaaatggcaagtgacgatctgtccctcatccggaagaaccgaatggcgctgttccagcagttgacctgcgtgctgcccattctggataacctgctgaaagccaatgtgatcaataagcaggagcatgacataattaagcagaaaacccagatccctctgcaagcccgggagctgattgataccatcctggtgaagggcaacgcagctgccaatatctttaaaaactgccttaaagagatcgactccacactgtataaaaatctctttgtcgacaaaaacatgaagtatattccaactgaggatgtcagcggactgagccttgaggagcagcttcggagacttcaggaggagcggacttgcaaggtgtgcatggacaaagaggtgtcagtggtgtttattccctgcgggcacctggtggtctgccaggagtgtgccccttccctgcggaagtgtccaatatgcagaggaattatcaaagggaccgtcagaaccttcctttcc

SEQ ID NO: 89841 - DNA, 1854 bp, Artificial Sequence
  derived and/or modified sequence
atgcacaaaacagccagtcagcggctcttccctggtcccagctatcagaacattaagagtatcatggaggactccacaatcctgagcgattggactaactccaataaacagaaaatgaaatacgattttagttgtgaactgtacaggatgagcacctattctacatttcccgcaggcgtgcccgtcagtgagcgatccctggcccgcgcgggcttttactataccggcgtaaatgataaagtaaagtgcttctgctgtggactcatgctggacaactggaaactgggcgatagcccaatccagaaacataagcagctctacccttcttgctctttcatccaaaatctcgtcagtgcctccctggggagtacctcaaagaacacatccccgatgcgtaatagtttcgcccacagtctgtcccccacgctcgagcactctagcctgttttccggaagttattcctctctgtctcccaatccgctgaattccagggctgttgaagacatctcaagttctcgcacaaacccttactcttacgctatgtctacagaggaagcccgcttcttgacctaccacatgtggccacttacttttctgtctccatcagaattagcacgagcgggtttctattacatcggcccgggagaccgcgttgcttgtttcgcatgcggcggtaagctgtccaattgggagccaaaggacgacgccatgtctgaacacagacgtcacttccccaactgcccctttctggagaattcactcgaaaccctccgcttcagcatctcaaatctttcaatgcagacccatgcagcacgcatgcgaaccttcatgtattggccctcctcagtgccggttcaacccgaacaactagctagcgccggattctactacgtgggccggaatgacgacgttaaatgtttctgctgtgatggcgggctgagatgctgggaaagtggtgacgacccctgggtcgaacacgcgaagtggttccctcggtgtgaattcctgattagaatgaagggccaggaatttgttgatgaaatccagggccgatatcctcatctcctcgaacagctgctgagcactagcgacacgactggggaggagaacgcagaccccccgattattcatttcggtccaggcgagtcttcctccgaagatgccgtgatgatgaatacccctgtcgtgaagtcggccctggaaatgggtttcaatcgcgatttggtgaagcagactgttcagtctaagatattgacgacaggcgagaattacaaaacagttaatgatattgtgagcgcgctgctcaacgcagaggatgaaaagcgagaagaggagaaggagaaacaagctgaggagatggcctccgacgacctttctttgatccggaagaaccgtatggccctgtttcagcagcttacgtgtgttcttccgatacttgacaatctgttgaaagccaacgtcattaataagcaggagcacgatattattaaacagaagacacaaatcccactgcaggcccgggaactcattgatactatactggtcaagggcaatgctgccgcgaatattttcaagaactgcctgaaagaaatagactctacgttgtacaagaatctttttgtagataagaacatgaagtacataccgaccgaagatgttagtggtctgtccctcgaggaacagttgcggcgcttgcaggaggagcgcacctgcaaagtgtgtatggacaaggaagtgtcagttgtgttcattccctgcggccacctagtagtctgtcaggaatgtgctcctagtctgagaaaatgcccgatctgccgaggaataattaaggggaccgtaaggacatttttatct

SEQ ID NO: 89842 - DNA, 1854 bp, Artificial Sequence
  derived and/or modified sequence
atgcacaagaccgctagccagaggttgttccctggcccgtcctaccaaaacatcaaatctatcatggaggactcgaccatcctctcagactggaccaactcaaataaacagaagatgaagtacgatttttcctgcgaactgtatcggatgtccacgtattcgaccttcccggccggggtccctgtctccgaacggagcttggccagagccggattttactacaccggcgtcaacgataaggtgaagtgcttctgttgcggattgatgctcgacaactggaagctcggagatagccctattcagaagcataagcagctttacccgtcctgctcgttcatccaaaacctggtgtccgccagcctcggtagcacctctaaaaacacttcccccatgcggaactcgttcgcccacagccttagccctacccttgagcactcgtctctcttctcaggcagctacagctcactttccccaaatcccctgaattcgcgggcggtggaggacatctcctcgtcgcggaccaatccctactcgtacgcgatgtctactgaggaagcgcggttcctcacttaccacatgtggccgctcactttcctctcaccgtcggaactggcccgcgctggattctattacatcggaccaggagatagggtggcatgctttgcgtgcggaggcaagctcagcaactgggaaccgaaagacgacgccatgagcgaacaccgcagacatttccctaactgcccgttcctggaaaattcgctcgaaacgctgcgcttttcaatctcaaatctgtcgatgcaaacccacgctgccagaatgcgcacctttatgtactggccgtcgagcgtcccagtgcagccggagcaactcgcgtcggcaggattctactacgtcggaaggaacgatgatgtcaaatgcttctgctgcgacggcggactgcggtgctgggaatcaggcgatgacccttgggtcgagcacgcgaagtggttcccacgctgcgaatttctgatccgcatgaaaggacaggagtttgtcgacgaaatccaaggtcgctacccgcatctcctggagcaactgctgtccaccagcgataccactggagaggaaaacgcagatcccccaatcattcattttggtcctggagaatcttcgtcagaagacgccgtgatgatgaataccccggtggtgaagagcgcactggagatgggtttcaaccgcgatctcgtgaagcaaaccgtgcaatcgaaaatcctgacgaccggtgaaaactataagactgtgaacgatatcgtcagcgctctcctcaacgcggaagacgaaaagagagaagaagagaaggagaagcaggccgaagagatggcatccgatgatctgagcctgatccgcaagaaccgcatggcactttttcaacagctgacgtgcgtgctccccatcttggacaacctgctcaaggctaacgtgattaacaaacaagagcacgacatcattaagcagaagactcagatcccactccaggcccgcgaacttatcgacacgatccttgtgaagggcaacgccgctgcgaacattttcaagaattgcctgaaggagatcgactcgactctctacaaaaatctgttcgtggataaaaacatgaagtacatccccacggaggacgtgtcgggtctgagcctcgaagagcagctgcgacggctgcaggaggaacggacttgcaaggtgtgtatggacaaggaagtcagtgtggtctttatcccttgcgggcatctggtggtctgccaggaatgtgccccttccctgcgcaaatgtccgatttgtcggggaatcatcaagggcactgtgagaacgttcctgtcc

SEQ ID NO: 89843 - DNA, 1854 bp, Artificial Sequence
  derived and/or modified sequence
atgcataagacggcttctcagcgcctttttccaggccctagctaccagaatatcaagagtatcatggaggactcgacaatcttatccgattggactaattcgaataagcaaaaaatgaagtacgattttagctgtgagttatacagaatgagcacgtactccactttccctgcgggagtcccagtttcggaacggagcctggctcgtgcggggttttattacaccggcgtgaatgacaaggtaaaatgtttctgttgcggcctcatgttagataactggaagctgggcgattcccctattcagaagcacaaacagttgtacccatcctgcagcttcattcagaacttggtcagcgcaagccttggttcgacttcgaagaacacaagccccatgcgcaatagcttcgctcactcgctgtcccccacccttgagcacagcagtttgttcagtgggtcttacagctcactgtcccccaatccactgaactcgcgggccgtggaggatatctccagttctcggaccaacccatatagctacgccatgtctactgaagaggctagatttctgacataccatatgtggccacttacctttctgtctccctcggaactcgcccgtgccggcttctactatatcggccccggagaccgcgtggcttgctttgcctgcggcggtaagctgagtaattgggaacccaaggacgacgctatgagcgaacatcgaagacacttccctaattgcccatttctggaaaattccctggaaactcttcgctttagtattagcaatctgagcatgcagacccatgctgcccgaatgaggacctttatgtactggccttctagcgtgccagttcagccagagcagttggcatcagccggcttctattatgtcggcaggaatgacgacgtaaagtgcttttgttgcgacggcggtctgagatgttgggaatccggcgacgacccttgggtcgaacacgccaagtggtttcctagatgcgaattcctgatacgaatgaagggccaggaatttgtcgacgagattcaaggtcgataccctcatcttctagagcaactgctctccacctcagatacaacaggggaagagaatgcagacccgcccatcatccacttcggacctggcgagtcctctagcgaggatgccgtcatgatgaacaccccggttgtgaaatctgcactggaaatgggctttaaccgtgatttggtcaagcagacagtgcagtcgaagatccttacaaccggtgaaaactataagactgttaatgatatagtgagtgcgcttctgaacgccgaagacgagaaacgagaggaggagaaagaaaagcaagcagaagaaatggctagcgatgacttgtctctgatcagaaagaaccgaatggccctcttccagcaactgacttgtgttttaccaattctcgataaccttttaaaagctaacgtgatcaataagcaagagcatgacataatcaagcaaaaaacccagatccctctacaagcccgcgagttaatcgataccatactggtaaaggggaatgccgcagccaacattttcaaaaactgcctcaaagagattgattctaccttgtataaaaacttgttcgtcgacaaaaatatgaagtatatcccaactgaagatgtctccggactttcactggaagagcagcttcgacgcctccaggaagaaagaacctgtaaggtgtgtatggataaggaagtatctgtggtgttcattccctgcgggcacctcgttgtgtgtcaagaatgcgccccaagcctcagaaaatgtcccatctgcagagggattatcaagggcaccgttaggacttttctaagt

SEQ ID NO: 89844 - DNA, 1854 bp, Artificial Sequence
  derived and/or modified sequence
atgcacaagaccgcctcgcagaggctcttcccaggaccttcctaccaaaacatcaaaagcataatggaagattccactatcctgtccgactggacgaattcaaataagcagaaaatgaagtacgatttctcctgtgagctctaccgcatgagcacctattcgactttccctgctggagtgccagtgtccgaacgttccctcgctcgcgccggattctactacaccggtgtgaatgataaggtgaaatgtttctgttgtggtttgatgcttgataattggaaactgggtgattccccaattcagaagcataaacaactctacccatcatgctcattcattcaaaacctggtttccgcatcacttggatccacttccaaaaacacctctcccatgagaaattcctttgcccatagcctgtcccctacccttgaacacagcagcctcttttcgggatcgtacagctcgctgtcgccaaaccccttgaactcaagagcagtggaggacatctcgtcaagccgtactaatccatattcatacgcaatgtcgaccgaagaagcacggtttctgacctaccacatgtggcctcttacttttctctcgccatccgagctcgctagggcaggtttttactacattggacctggggatcgggtggcatgcttcgcatgtgggggtaagctctcaaattgggaaccaaaggatgacgcaatgtcggagcataggagacactttcctaactgtccatttctggaaaactccttggaaaccctgagattttcgatttcgaacctgtccatgcaaacccacgcagctagaatgcgcacttttatgtattggccctcctctgtgccagtgcagcctgaacaacttgcaagcgcagggttctactacgtggggcggaacgacgacgtgaaatgcttttgttgtgatggaggtctgcgctgttgggagtccggagatgacccttgggtggaacatgcaaagtggttcccacgatgcgaattcctcatcagaatgaagggacaagagttcgttgacgaaatacagggaaggtaccctcacctgcttgaacagctcctttccacctccgacactactggtgaggagaacgcagatcctccaattatccattttggccccggggagtccagctcggaagatgcagtgatgatgaatactcctgtggtcaaatccgccctcgagatgggtttcaatagggacttggtcaagcagactgtgcagtcgaagattctgactaccggagaaaactacaaaaccgtcaacgatattgtgagcgcactgcttaacgcagaagatgaaaagagggaagaagaaaaagaaaagcaagcagaagaaatggcatccgatgatctttcacttatccgcaagaatagaatggcactctttcagcagctgacctgtgtcctcccgattctggataacctgcttaaggccaacgtgataaacaagcaggagcacgacatcattaaacaaaaaacccagataccgcttcaggcgagagaactcattgataccattcttgtgaaagggaatgcagccgccaacatcttcaaaaactgtttgaaggagatcgacagcaccctgtacaagaacctttttgtcgataagaatatgaagtacatacccaccgaggacgtgagcgggctctccctcgaggaacagcttagacggcttcaagaggaacgaacttgcaaggtctgtatggataaggaggtgagcgtggtgtttattccttgtggacacttggtggtctgtcaggaatgtgcaccatcgctgcgtaagtgccctatatgtcgggggatcattaaggggaccgtgcgcacgtttctctca

SEQ ID NO: 89845 - DNA, 1854 bp, Artificial Sequence
  derived and/or modified sequence
atgcacaagacagccagccagaggctgttccccggcccctcttaccagaatatcaaatccataatggaggactctacaatcctatctgattggactaacagtaataagcaaaagatgaagtatgatttctcatgcgaattgtatagaatgtcaacatattccacatttccagcgggggtgccagtgtctgagcggtctctcgcaagggcaggcttctattacaccggggtaaacgacaaggttaagtgcttttgctgcgggcttatgttagacaattggaagcttggggatagtccaatccagaagcataagcaactgtacccttcctgctcattcattcagaatttggtgtctgcttcattaggatccacatccaagaacacatcacctatgagaaattcttttgctcactctctgtctcccaccctcgagcatagcagcctattttccggcagctactccagtctttccccaaacccactcaactccagagcggtggaagatatctcgagttctcgaactaacccatactcctacgccatgtccacggaggaggcacgtttcctgacttaccatatgtggccacttaccttcttatcacctagtgagctcgcgagagctggattctattacattggcccgggagacagggtggcctgcttcgcctgcgggggcaaattgtctaattgggaacccaaggatgacgcaatgagcgagcacagaagacacttccctaactgtcctttcttggagaatagtttggagacattacgcttttcaatatctaacctgtctatgcaaactcacgcggccaggatgagaacatttatgtattggccgagttcagttcccgtccaacctgagcagctggccagcgccggattctattacgtcggtcggaatgacgacgtgaagtgtttctgctgtgatggcgggctgagatgctgggaaagtggggacgatccctgggtggagcacgcaaagtggttcccccggtgtgagtttctaatacgcatgaagggccaggagttcgtggatgagattcagggaagatatccacatctgctcgagcagctgctctcaacatccgatactaccggtgaggaaaacgctgaccctcccatcatccacttcggccccggggagtcgagcagcgaagatgccgttatgatgaacactcctgttgtaaagagcgcgctggaaatggggttcaacagggatctcgtcaaacagaccgtgcagtcaaagatacttaccacaggagagaactataagacggtgaatgatattgtgtcagccttgctgaacgcggaagacgagaagcgggaggaggagaaagaaaagcaggccgaagaaatggccagtgacgatctctctctgataagaaaaaatcgcatggcgctttttcagcaacttacgtgcgtcctgccaattttggataatctgctgaaagcgaacgtaattaataagcaggaacatgatatcatcaagcagaaaacgcaaataccactgcaggccagggagcttattgatacgatactcgttaagggaaacgctgctgctaatatttttaagaactgtctgaaagaaattgactctactctgtacaaaaacctgttcgtggataagaatatgaagtacatccccacagaggatgtttcaggcctgtctttagaggagcaattgcgcaggctgcaggaggaaaggacctgtaaggtgtgcatggacaaggaggttagtgtcgttttcatcccgtgcggtcatcttgtcgtgtgtcaggagtgcgccccaagtcttagaaaatgtcctatctgccgcggaatcatcaagggcaccgttagaacgttcctgtct

SEQ ID NO: 89846 - DNA, 1854 bp, Artificial Sequence
  derived and/or modified sequence
atgcataagacggcctcccagcgactgtttccgggaccaagctaccagaacattaagtctatcatggaagactccaccattctgtcagactggacgaactctaataagcagaagatgaagtatgatttcagctgtgagctgtatagaatgtcaacctatagtacatttcctgcaggtgtgccagtaagtgaacggtctttggcccgcgccggtttctattataccggagtaaacgataaggtcaagtgcttttgctgtggactgatgctggacaattggaagttaggtgacagcccgattcagaagcacaagcagctctacccctcttgtagctttatacagaacctcgtaagtgcttccctgggaagcacgtctaagaacacgagcccaatgcggaatagcttcgcacactcattgtctcccacacttgagcactcttcactttttagcggctcctatagctccttgagccctaaccccctcaactctcgggcagtcgaagacatatcctcgagccggaccaatccctacagctacgctatgtctaccgaagaggcccgctttctgacctatcacatgtggcccctaaccttcttgtcaccctccgaacttgctcgggccgggttttactatatcggaccaggggaccgggtggcctgttttgcttgtggaggaaaacttagcaattgggagcccaaagacgacgccatgtctgaacatagacggcactttccaaactgtccttttctcgaaaacagcctcgagaccttgagattcagcatctcgaacctcagcatgcagacccatgctgcacggatgcgaacgtttatgtactggccttcttcagtgccagttcagcccgagcagttggctagtgccggcttttactatgtcggacggaatgacgatgtaaagtgcttctgctgcgatggcggacttcggtgctgggagtcaggtgacgatccgtgggttgagcacgccaagtggttcccgaggtgcgaatttctgatccgcatgaaaggccaggagttcgtcgatgagatccaggggcgttatccccatctgctggagcaactgctgagcaccagcgacaccacaggtgaggagaatgcagaccctcccatcatacattttgggcccggcgagtccagcagtgaggatgcagtgatgatgaatacccccgtcgtgaagagcgcactggagatgggttttaatcgagacctcgtaaagcagacggtgcagagtaaaattctcacgacaggcgagaattacaagacagtgaatgacatagtgtcagccctgctgaacgccgaggacgaaaagcgagaggaggaaaaggaaaaacaggcagaagagatggcttccgacgatctgtcactcattcggaagaaccgcatggccctattccagcagctgacctgcgtgctgcccattctagacaatcttcttaaggcaaatgtgattaataagcaggagcatgatattatcaagcagaagacacagattcccctgcaggctagggaactgatagacactattctcgttaaaggcaacgccgcagccaacatttttaaaaactgcctcaaagagattgactctaccctgtataagaacctgttcgtggacaagaacatgaagtacatccctaccgaggatgtgtctggactgtctctggaggagcagttgaggagattgcaggaggagagaacttgcaaagtctgtatggacaaggaggtttccgtggtgtttattccatgcggtcacctggtggtctgccaggagtgtgccccatccctacgcaagtgccctatctgcaggggcatcattaaaggaacagttcggaccttcctcagc

SEQ ID NO: 89847 - DNA, 1854 bp, Artificial Sequence
  derived and/or modified sequence
atgcacaagactgcatcccagaggctctttcccgggccctcttatcagaacatcaaaagcatcatggaagatagcacaatccttagcgattggactaactcaaataagcagaaaatgaagtacgatttcagttgcgaactttaccgaatgagcacctacagtacctttccagcgggcgttccagtgagtgagaggtcacttgcaagagccggattttactacaccggagtcaacgacaaagtgaagtgtttttgctgtggtttgatgcttgataactggaagctgggcgacagtccaatccagaagcataaacagctctacccctcttgttcttttattcaaaatctggttagtgctagtctgggtagtacctccaaaaacacatctccaatgagaaactcatttgcccactccttgagtccgactctggagcatagttcactgttcagcggatcgtactcctcactaagcccaaacccactgaactctagggctgttgaagatatcagcagttcaagaaccaatccgtactcctatgctatgagcaccgaagaggcgcgttttttaacctaccacatgtggccactgacttttctaagcccatccgagctcgccagggccggattttactatataggacccggggatcgggtagcttgctttgcctgtggcgggaagttgtcaaactgggaacctaaggatgacgcaatgagcgaacacaggcggcactttcctaattgtccttttttggaaaactcactggagacactgaggttctctatctcaaatctcagtatgcaaacccacgctgcacgaatgagaacgtttatgtattggccctcgagcgttcccgttcaacccgagcagctcgccagtgccggattctactatgtgggtcggaatgatgatgttaaatgcttttgttgcgacgggggactgagatgctgggagtccggggatgacccatgggttgaacatgcaaagtggtttcctaggtgtgaatttttgatcaggatgaaggggcaagagtttgtggatgagatacaggggcgctacccccacctgctggagcagttgctgagcaccagtgatactactggtgaagaaaatgccgatcctcctattattcatttcggccccggtgaaagcagcagtgaggacgctgtgatgatgaatacaccagtggtgaagtcggccctcgagatgggcttcaatagggatttagttaaacagacagttcaatctaagattctgacaacaggagagaactacaaaacagtgaacgatatcgtcagtgccttgctcaatgcagaagatgaaaagagagaagaggagaaagagaaacaggctgaggaaatggcatccgacgacctgagtctcatccgcaagaaccggatggccttgttccagcagctcacatgcgtcctgcctatccttgataatctgctgaaagccaatgtgattaacaagcaagagcatgatatcattaagcagaagacacagatcccccttcaggcgcgtgagctgatcgacacgatcctggtgaaaggcaatgctgccgccaatatctttaagaattgccttaaggagattgacagtaccttgtacaaaaatcttttcgtggacaagaacatgaagtatatccccacggaggacgtgtctggactgagtctcgaggagcagctccggcggcttcaggaggaaaggacgtgtaaagtgtgcatggacaaagaagtctccgtggttttcatcccttgcggtcacctggtggtgtgccaggagtgcgctccgtcactccgcaagtgtccaatctgtcgcggcatcataaaagggacagtgcgcaccttcttgtct

SEQ ID NO: 89848 - DNA, 1854 bp, Artificial Sequence
  derived and/or modified sequence
atgcacaagactgcttctcagcgcctcttccctggcccaagctatcaaaacatcaaaagcatcatggaagattctactatcttgagcgattggaccaattctaacaagcaaaagatgaagtacgacttctcctgcgagctctacaggatgagcacctatagtaccttccctgcaggcgtccctgtgagcgagaggtcactggctcgcgcaggcttctactacaccggggtgaacgataaagtgaagtgtttctgctgcggcctcatgttggataattggaagctcggcgacagtcccatccagaagcacaagcagttgtacccaagttgcagttttatccaaaaccttgtttccgcgagcctcggttcaacgtcaaagaacacaagcccgatgcggaactcttttgcgcacagcctgagtcccactctggagcactcaagccttttctctggatcttacagctcactgtcaccaaaccccctgaacagccgcgcagttgaggatatctcgagcagtcgaactaacccttatagctacgccatgagcaccgaggaagcacgcttcctgacctaccatatgtggcccctgacttttttgtccccatctgaactggctagggcaggcttttactatatcggtcccggcgacagggtggcatgttttgcatgtggcggaaagctgtcaaattgggagcccaaggacgatgccatgagtgagcataggaggcattttcctaactgtccattcttggagaacagccttgaaactctgaggttctccatcagtaacctgtcaatgcagacgcatgctgcccgtatgcgcacatttatgtattggccaagctctgtgcctgttcaaccagagcagttggcaagtgctggcttctactacgtgggccgaaatgatgatgtgaagtgcttctgttgcgatggaggactgcgctgctgggagagtggagacgatccatgggtggaacacgctaagtggttccctcgatgcgaatttctgattaggatgaaaggacaggagttcgtggatgaaattcaaggccgctaccctcacctcttggaacagctactgtccacatcagatacgacaggcgaggagaatgccgatccaccaatcatccattttgggcccggagaatctagctctgaggatgctgttatgatgaacacacctgtggtgaagagtgccctggaaatgggattcaacagagacctggtgaaacagaccgtccagagcaaaatcctcaccaccggcgaaaactacaagactgtgaacgatatagtcagcgccctgctgaacgccgaagacgaaaagagggaagaggagaaagagaagcaggctgaggagatggcctccgacgatctgtccctcataaggaaaaatagaatggctctgtttcagcagctgacctgcgttttgcccattttggataatcttctgaaagcaaacgtgatcaacaaacaggagcacgatatcatcaagcaaaagacacagatcccactgcaggctcgagagctaatcgacaccatccttgtcaagggcaacgctgctgctaacatcttcaaaaactgcctgaaggagattgactccacgctctataagaacttgttcgtagataagaacatgaagtacatcccaaccgaagacgtcagcggccttagtctggaggagcaattgagaagacttcaggaagaacgcacctgtaaggtttgtatggataaggaagtaagcgtggtcttcatcccatgtggtcatctcgtggtgtgccaggagtgcgcacctagtctgaggaaatgtccaatctgtagggggattatcaagggaacagtaagaaccttcctgtcc

SEQ ID NO: 89849 - DNA, 1854 bp, Artificial Sequence
  derived and/or modified sequence
atgcataagactgcttcccaacgtctgtttccaggaccttcctaccagaacatcaagtccattatggaggatagcacaatcctctccgactggactaactcaaacaagcagaagatgaagtacgatttctcttgcgagctgtataggatgtctacctactccaccttcccagccggagtacctgtttctgaaaggtctcttgcaagggctggtttctactacacaggcgtgaacgacaaggtgaagtgcttctgttgcggtctgatgctcgacaactggaagcttggtgactcacccatccagaagcacaagcagctttacccctcatgttctttcatacaaaatcttgtttctgcaagtcttggatccacctcaaagaatacttctcctatgcgtaacagctttgcacactctctgtctcctacattggaacatagctcactgttttcaggatcttactctagcttgtccccaaacccattgaatagccgtgctgtagaggacattagttcatcccgcaccaacccttactcctacgctatgtctactgaggaggctcgtttcctgacctaccatatgtggccactgacctttctctccccatccgagctcgctcgtgctggattctactacattggccccggcgaccgcgtcgcttgctttgcctgcggcggcaaactgtccaactgggaacccaaggacgatgccatgtccgagcatcgtaggcacttccccaattgtccattcctggagaacagtctggagactctgcgctttagcatttctaacctgagcatgcagactcatgctgccaggatgcgtacattcatgtactggccaagttccgtgcccgttcagccagagcagttggcttccgccggtttctattatgttggtcgcaatgacgacgtcaagtgcttttgctgcgacggcggactgcgctgttgggagtccggcgacgacccatgggtcgaacacgcaaagtggttccctcgctgcgagttcctgattcgtatgaaaggccaggagttcgtcgatgaaattcagggcagataccctcacttgctggagcagcttctctccactagtgacaccactggcgaggagaatgccgatccaccaattatccacttcggacccggagagagttcaagcgaggacgctgtaatgatgaacaccccagttgttaaatcagctctggagatgggattcaacagagacttggtcaagcagaccgtccagtccaagattttgactaccggagaaaactataagactgtgaacgatattgtgtccgccctgctgaacgcagaagatgaaaagcgcgaggaggaaaaggagaagcaggcagaggagatggcctccgacgatctgagcctgatacgcaaaaacagaatggccctgttccagcagctcacatgcgtgttgcctatacttgataacctcctgaaggccaatgtgatcaataagcaagagcatgatatcatcaagcagaagacacagatccctctccaggccagggagctcattgataccatcttggtaaagggtaacgctgctgctaatatttttaaaaactgtcttaaggaaatcgacagcacactgtataagaatctgttcgtggacaagaatatgaaatatatccctaccgaggatgtgtccggactctccctggaggaacagcttagacgcttgcaggaggagagaacctgcaaagtttgcatggataaggaagtgtcagtggtgtttatcccttgtggtcacctcgtagtttgccaagaatgtgctccatccttgaggaaatgcccaatttgtagaggtattattaaaggtacagttcgtacctttctgtca

SEQ ID NO: 89850 - DNA, 1854 bp, Artificial Sequence
  derived and/or modified sequence
atgcataagactgcttcccagcggctgttccctggaccttcataccaaaacataaagtcaatcatggaggacagcactattctgtctgattggactaattccaacaaacaaaagatgaaatacgatttcagctgcgagctgtaccggatgtcaacttatagcacctttccggccggagtgccggtgagcgagaggtccctggctagagcgggattctactacactggagtgaatgacaaggtgaaatgtttctgctgcgggctgatgctggacaactggaaattgggggactcgccgattcagaagcataaacagctctaccccagctgctcatttatccagaacctcgtgtcggcgagcctgggaagcacctcgaagaacacttcacctatgcggaattcgttcgcgcattcgctctcgccgactttggaacacagctccctgttctccggtagctactcctcgctgagtccaaaccccctcaactcccgggccgtggaggacatctcatcgtccaggaccaacccgtactcctatgccatgtcgacggaagaggcccggttcctgacctaccacatgtggccgctcaccttcctgtcccctagcgaactggcaagagcaggattttactacatcggaccgggtgatcgggtcgcttgcttcgcgtgcggaggtaagctgtcgaattgggagcctaaggatgacgcgatgtccgagcacaggcgccatttccccaactgcccgttccttgagaactcgctggaaacgctccgcttctcaatctcaaatctctcaatgcagacccatgcagctcggatgagaacctttatgtactggccaagctccgtccctgttcagcccgaacaactggcttctgcaggcttctattatgtgggacggaacgacgatgtgaaatgcttctgctgcgacggaggactgcggtgctgggagtccggtgacgacccgtgggtcgaacatgcgaagtggtttccgcggtgcgaatttcttatcagaatgaaaggacaggagttcgtggatgagatccaaggtcggtacccgcaccttctcgagcaactcctgtcaacctcggacactaccggcgaagaaaatgccgatccacccattattcattttggccccggcgagagtagctctgaagatgccgtgatgatgaatactccagtggtgaagtccgccctcgaaatgggattcaaccgcgacctggttaaacaaaccgtgcagtcaaaaatcttgaccaccggagagaattacaagaccgtgaatgatattgtgtcagctttgctgaacgccgaagatgagaagcgggaagaagaaaaagagaagcaagcagaagagatggcatcggacgacctttccctgatccggaagaatagaatggccttgtttcagcagcttacttgcgtactgcccattctcgacaaccttttgaaggcgaacgtgatcaataaacaggagcacgatatcatcaagcaaaagacccaaattccgctgcaggctcgcgagctcatcgataccatcctggtgaaaggcaacgccgcggcgaacatcttcaagaactgtctcaaggaaattgattcgactctgtacaaaaacctgttcgtggacaagaatatgaagtacatcccgaccgaagatgtgtcgggactttcactggaagaacagcttaggcgccttcaggaggaacggacctgcaaggtgtgtatggacaaggaggtcagcgtcgtctttataccgtgcggacatctcgtggtctgccaggaatgtgcgccttcgcttcgcaagtgtccgatctgccgcggaatcattaaagggactgtgcgaactttcctctct

SEQ ID NO: 89851 - DNA, 1854 bp, Artificial Sequence
  derived and/or modified sequence
atgcataagactgctagccaacgccttttcccaggtccctcctaccaaaatattaaaagcatcatggaagacagcaccatcctgtccgattggactaactcaaataagcagaagatgaaatatgacttctcctgcgaactttatcgcatgtccacgtactctacattcccggccggtgtccctgttagtgaacgcagtttggccagagcaggtttttactacaccggagtgaacgataaggtgaagtgcttctgctgtggactgatgttggacaattggaagcttggagactccccaattcagaaacacaagcagctctacccgagctgctcatttatacagaatctggtgtcagcttccctcggatcaactagtaaaaacacatccccaatgaggaatagtttcgcccactcccttagccctacgctcgaacactcttccttgttcagtggctcttacagttccctttcccccaaccccctgaacagtagagctgtggaggacatctccagcagtagaaccaacccttactcttacgctatgtctacggaggaggctaggtttctcacataccatatgtggccactcacttttctgagtccatctgaacttgctagggccggattctattacattggcccgggcgaccgcgtggcatgttttgcgtgcggtggcaaactgtccaattgggaaccaaaggacgatgctatgtcagagcaccgcagacacttcccaaattgccccttccttgagaacagcctggagaccctgaggttctcaataagtaacctgtccatgcagacccacgctgcaaggatgcgcaccttcatgtattggccatcctctgttcccgtacagcccgagcagctggcctccgctggattctactacgttggcagaaatgacgacgtgaagtgcttctgttgtgacggtggactcaggtgctgggaatccggtgatgacccatgggttgagcacgccaagtggttcccgagatgcgagttcttgatcaggatgaagggacaagagttcgtggatgaaattcagggccgctacccgcacctgctggaacagctgctgtccacctctgacaccactggcgaagagaacgccgatccacccatcattcactttggccctggtgagagctccagtgaagatgccgtcatgatgaacactcccgttgtgaaatctgctctcgagatgggcttcaatcgcgatctggtgaagcagaccgttcagagcaaaatcctgaccaccggagagaactacaaaaccgtgaatgatatcgtgtcagcacttctgaacgccgaggatgagaagagagaagaagaaaaagagaagcaggccgaggagatggcgtccgacgacctgagcctgatcaggaaaaataggatggcactttttcagcagttgacctgtgttttgccgattttggacaatctcctcaaggccaatgttattaacaagcaagagcatgacatcatcaaacagaagacccagattcccctccaagccagggaactcatagatactatcctggtaaagggtaatgcggccgctaatatattcaagaattgcttgaaggagatagattctaccctctacaagaatctctttgttgacaagaatatgaaatatatccccactgaagacgtatccggactttccctggaggaacagcttcgcaggcttcaggaagaacgcacctgtaaagtgtgcatggacaaagaagtgtcagtggtcttcataccttgcggtcacctggttgtctgtcaagagtgcgccccgtcactcagaaagtgccccatttgtagaggcattattaagggtaccgtacgcaccttcctgagc

SEQ ID NO: 89852 - DNA, 3743 bp, Artificial Sequence
  derived and/or modified sequence
ggatggggcggcgggcttcgggagcgcccgggctgatccgagccgagcgggccgtatctccttgtcggcgccgctgattcccggctctgcggaggcctctaggcagccgcgcagcttccgtgtttgctgcgcccgcactgcgatttacaaccctgaagaatctccctatccctattttgtccccctgcagtaataaatcccattatggagatctcgaaactttataaagggatatagtttgaattctatggagtgtaattttgtgtatgaattatatttttaaaacattgaagagttttcagaaagaaggctagtagagttgattactgatactttatgctaagcagtacttttttggtagtacaatattttgttaggcgtttctgataacactagaaaggacaagttttatcttgtgataaattgattaatgtttacaacatgactgataattatagctgaatagtccttaaatgatgaacaggttatttagtttttaaatgcagtgtaaaaagtgtgctgtggaaattttatggctaactaagtttatggagaaaataccttcagttgatcaagaataatagtggtatacaaagttaggaagaaagtcaacatgatgctgcaggaaatggaaacaaatacaaatgatatttaacaaagatagagtttacagtttttgaactttaagccaaattcatttgacatcaagcactatagcaggcacaggttcaacaaagcttgtgggtattgacttcccccaaaagttgtcagctgaagtaatttagcccacttaagtaaatactatgatgataagctgtgtgaacttagcttttaaatagtgtgaccatatgaaggttttaattacttttgtttattggaataaaatgagattttttgggttgtcatgttaaagtgcttatagggaaagaagcctgcatataattttttaccttgtggcataatcagtaattggtctgttattcaggcttcatagcttgtaaccaaatataaataaaaggcataatttaggtattctatagttgcttagaattttgttaatataaatctctgtgaaaaatcaaggagttttaatattttcagaagtgcatccacctttcagggctttaagttagtattactcaagattatgaacaaatagcacttaggttacctgaaagagttactacaaccccaaagagttgtgttctaagtagtatcttggtaattcagagagatactcatcctacctgaatataaactgagataaatccagtaaagaaagtgtagtaaattctacataagagtctatcattgatttctttttgtggtaaaaatcttagttcatgtgaagaaatttcatgtgaatgttttagctatcaaacagtactgtcacctactcatgcacaaaactgcctcccaaagacttttcccaggtccctcgtatcaaaacattaagagtataatggaagatagcacgatcttgtcagattggacaaacagcaacaaacaaaaaatgaagtatgacttttcctgtgaactctacagaatgtctacatattcaactttccccgccggggtgcctgtctcagaaaggagtcttgctcgtgctggtttttattatactggtgtgaatgacaaggtcaaatgcttctgttgtggcctgatgctggataactggaaactaggagacagtcctattcaaaagcataaacagctatatcctagctgtagctttattcagaatctggtttcagctagtctgggatccacctctaagaatacgtctccaatgagaaacagttttgcacattcattatctcccaccttggaacatagtagcttgttcagtggttcttactccagcctttctccaaaccctcttaattctagagcagttgaagacatctcttcatcgaggactaacccctacagttatgcaatgagtactgaagaagccagatttcttacctaccatatgtggccattaacttttttgtcaccatcagaattggcaagagctggtttttattatataggacctggagatagggtagcctgctttgcctgtggtgggaagctcagtaactgggaaccaaaggatgatgctatgtcagaacaccggaggcattttcccaactgtccatttttggaaaattctctagaaactctgaggtttagcatttcaaatctgagcatgcagacacatgcagctcgaatgagaacatttatgtactggccatctagtgttccagttcagcctgagcagcttgcaagtgctggtttttattatgtgggtcgcaatgatgatgtcaaatgcttttgttgtgatggtggcttgaggtgttgggaatctggagatgatccatgggtagaacatgccaagtggtttccaaggtgtgagttcttgatacgaatgaaaggccaagagtttgttgatgagattcaaggtagatatcctcatcttcttgaacagctgttgtcaacttcagataccactggagaagaaaatgctgacccaccaattattcattttggacctggagaaagttcttcagaagatgctgtcatgatgaatacacctgtggttaaatctgccttggaaatgggctttaatagagacctggtgaaacaaacagttcaaagtaaaatcctgacaactggagagaactataaaacagttaatgatattgtgtcagcacttcttaatgctgaagatgaaaaaagagaagaggagaaggaaaaacaagctgaagaaatggcatcagatgatttgtcattaattcggaagaacagaatggctctctttcaacaattgacatgtgtgcttcctatcctggataatcttttaaaggccaatgtaattaataaacaggaacatgatattattaaacaaaaaacacagatacctttacaagcgagagaactgattgataccattttggttaaaggaaatgctgcggccaacatcttcaaaaactgtctaaaagaaattgactctacattgtataagaacttatttgtggataagaatatgaagtatattccaacagaagatgtttcaggtctgtcactggaagaacaattgaggaggttgcaagaagaacgaacttgtaaagtgtgtatggacaaagaagtttctgttgtatttattccttgtggtcatctggtagtatgccaggaatgtgccccttctctaagaaaatgccctatttgcaggggtataatcaagggtactgttcgtacatttctctcttaaagaaaaatagtctatattttaacctgcataaaaaggtctttaaaatattgttgaacacttgaagccatctaaagtaaaaagggaattatgagtttttcaattagtaacattcatgttctagtctgctttggtactaataatcttgtttctgaaaagatggtatcatatatttaatcttaatctgtttatttacaagggaagatttatgtttggtgaactatattagtatgtatgtgtacctaagggagtagtgtcactgcttgttatgcatcatttcaggagttactggatttgttgttctttcagaaagctttgaatactaaattatagtgtagaaaagaactggaaaccaggaactctggagttcatcagagttatggtgccgaattgtctttggtgcttttcacttgtgttttaaaataaggatttttctcttatttctccccctagtttgtgagaaacatctcaataaagtgctttaaaaaga

SEQ ID NO: 89853 - DNA, 1927 bp, Artificial Sequence
  derived and/or modified sequence
atcgtgcgtcagagtgagcccggatggggcggcgggcttcgggagcgcccgggctgatccgagccgagcgggccgtatctccttgtcggcgccgctgattcccggctctgcggaggcctctaggcagccgcgcagcttccgtgtttgctgcgcccgcactgcgaatgtctacatattcaactttccccgccggggtgcctgtctcagaaaggagtcttgctcgtgctggtttttattatactggtgtgaatgacaaggtcaaatgcttctgttgtggcctgatgctggataactggaaactaggagacagtcctattcaaaagcataaacagctatatcctagctgtagctttattcagaatctggtttcagctagtctgggatccacctctaagaatacgtctccaatgagaaacagttttgcacattcattatctcccaccttggaacatagtagcttgttcagtggttcttactccagcctttctccaaaccctcttaattctagagcagttgaagacatctcttcatcgaggactaacccctacagttatgcaatgagtactgaagaagccagatttcttacctaccatatgtggccattaacttttttgtcaccatcagaattggcaagagctggtttttattatataggacctggagatagggtagcctgctttgcctgtggtgggaagctcagtaactgggaaccaaaggatgatgctatgtcagaacaccggaggcattttcccaactgtccatttttggaaaattctctagaaactctgaggtttagcatttcaaatctgagcatgcagacacatgcagctcgaatgagaacatttatgtactggccatctagtgttccagttcagcctgagcagcttgcaagtgctggtttttattatgtgggtcgcaatgatgatgtcaaatgcttttgttgtgatggtggcttgaggtgttgggaatctggagatgatccatgggtagaacatgccaagtggtttccaaggtgtgagttcttgatacgaatgaaaggccaagagtttgttgatgagattcaaggtagatatcctcatcttcttgaacagctgttgtcaacttcagataccactggagaagaaaatgctgacccaccaattattcattttggacctggagaaagttcttcagaagatgctgtcatgatgaatacacctgtggttaaatctgccttggaaatgggctttaatagagacctggtgaaacaaacagttcaaagtaaaatcctgacaactggagagaactataaaacagttaatgatattgtgtcagcacttcttaatgctgaagatgaaaaaagagaagaggagaaggaaaaacaagctgaagaaatggcatcagatgatttgtcattaattcggaagaacagaatggctctctttcaacaattgacatgtgtgcttcctatcctggataatcttttaaaggccaatgtaattaataaacaggaacatgatattattaaacaaaaaacacagatacctttacaagcgagagaactgattgataccattttggttaaaggaaatgctgcggccaacatcttcaaaaactgtctaaaagaaattgactctacattgtataagaacttatttgtggataagaatatgaagtatattccaacagaagatgtttcaggtctgtcactggaagaacaattgaggaggttgcaagaagaacgaacttgtaaagtgtgtatggacaaagaagtttctgttgtatttattccttgtggtcatctggtagtatgccaggaatgtgccccttctctaagaaaatgccctatttgcaggggtataatcaagggtactgttcgtacatttctctcttaaagaaaaatagtctatattttaacctgcataaaaaggtctttaaaatattgttg

SEQ ID NO: 89854 - DNA, 2617 bp, Artificial Sequence
  derived and/or modified sequence
gggcttcgggagcgcccgggctgatccgagccgagcgggccgtatctccttgtcggcgccgctgattcccggctctgcggaggcctctaggcagccgcgcagcttccgtgtttgctgcgcccgcactgcgatttacaaccctgaagaatctccctatccctattttgtccccctgcagtaataaatcccattatggagatctcgaaactttataaagggatatagtttgaattctatggagtgtaattttgtgtatgaattatatttttaaaacattgaagagttttcagaaagaagacttttcccaggtccctcgtatcaaaacattaagagtataatggaagatagcacgatcttgtcagattggacaaacagcaacaaacaaaaaatgaagtatgacttttcctgtgaactctacagaatgtctacatattcaactttccccgccggggtgcctgtctcagaaaggagtcttgctcgtgctggtttttattatactggtgtgaatgacaaggtcaaatgcttctgttgtggcctgatgctggataactggaaactaggagacagtcctattcaaaagcataaacagctatatcctagctgtagctttattcagaatctggtttcagctagtctgggatccacctctaagaatacgtctccaatgagaaacagttttgcacattcattatctcccaccttggaacatagtagcttgttcagtggttcttactccagcctttctccaaaccctcttaattctagagcagttgaagacatctcttcatcgaggactaacccctacagttatgcaatgagtactgaagaagccagatttcttacctaccatatgtggccattaacttttttgtcaccatcagaattggcaagagctggtttttattatataggacctggagatagggtagcctgctttgcctgtggtgggaagctcagtaactgggaaccaaaggatgatgctatgtcagaacaccggaggcattttcccaactgtccatttttggaaaattctctagaaactctgaggtttagcatttcaaatctgagcatgcagacacatgcagctcgaatgagaacatttatgtactggccatctagtgttccagttcagcctgagcagcttgcaagtgctggtttttattatgtgggtcgcaatgatgatgtcaaatgcttttgttgtgatggtggcttgaggtgttgggaatctggagatgatccatgggtagaacatgccaagtggtttccaaggtgtgagttcttgatacgaatgaaaggccaagagtttgttgatgagattcaaggtagatatcctcatcttcttgaacagctgttgtcaacttcagataccactggagaagaaaatgctgacccaccaattattcattttggacctggagaaagttcttcagaagatgctgtcatgatgaatacacctgtggttaaatctgccttggaaatgggctttaatagagacctggtgaaacaaacagttcaaagtaaaatcctgacaactggagagaactataaaacagttaatgatattgtgtcagcacttcttaatgctgaagatgaaaaaagagaagaggagaaggaaaaacaagctgaagaaatggcatcagatgatttgtcattaattcggaagaacagaatggctctctttcaacaattgacatgtgtgcttcctatcctggataatcttttaaaggccaatgtaattaataaacaggaacatgatattattaaacaaaaaacacagatacctttacaagcgagagaactgattgataccattttggttaaaggaaatgctgcggccaacatcttcaaaaactgtctaaaagaaattgactctacattgtataagaacttatttgtggataagaatatgaagtatattccaacagaagatgtttcaggtctgtcactggaagaacaattgaggaggttgcaagaagaacgaacttgtaaagtgtgtatggacaaagaagtttctgttgtatttattccttgtggtcatctggtagtatgccaggaatgtgccccttctctaagaaaatgccctatttgcaggggtataatcaagggtactgttcgtacatttctctcttaaagaaaaatagtctatattttaacctgcataaaaaggtctttaaaatattgttgaacacttgaagccatctaaagtaaaaagggaattatgagtttttcaattagtaacattcatgttctagtctgctttggtactaataatcttgtttctgaaaagatggtatcatatatttaatcttaatctgtttatttacaagggaagatttatgtttggtgaactatattagtatgtatgtgtacctaagggagtagtgtcactgcttgttatgcatcatttcaggagttactggatttgttgttctttcagaaagctttgaatactaaattatagtgtagaaaagaactggaaaccaggaactctggagttcatcagagttatggtgccgaattgtctttggtgcttttcacttgtgttttaaaataaggatttttctcttatttctccccctagtttgtgagaaacatctcaataaagtgctttaaaaag

SEQ ID NO: 89855 - DNA, 3001 bp, Artificial Sequence
  derived and/or modified sequence
ggatggggcggcgggcttcgggagcgcccgggctgatccgagccgagcgggccgtatctccttgtcggcgccgctgattcccggctctgcggaggcctctaggcagccgcgcagcttccgtgtttgctgcgcccgcactgcgatttacaaccctgaagaatctccctatccctattttgtccccctgcagtaataaatcccattatggagatctcgaaactttataaagggatatagtttgaattctatggagtgtaattttgtgtatgaattatatttttaaaacattgaagagttttcagaaagaaggctagtagagttgattactgatactttatgctaagcagtacttttttggtagtacaatattttgttaggcgtttctgataacactagaaaggacaagttttatcttgtgataaattgattaatgtttacaacatgactgataattatagctgaatagtccttaaatgatgaacaggttatttagtttttaaatgcagtgtaaaaagtgtgctgtggaaattttatggctaactaagtttatggagaaaataccttcagttgatcaagaataatagtggtatacaaagttaggaagaaagtcaacatgatgctgcaggaaatggaaacaaatacaaatgatatttaacaaagatagagtttacagtttttgaactttaagccaaattcatttgacatcaagcactatagcaggcacaggttcaacaaagcttgtgggtattgacttcccccaaaagttgtcagctgaagtaatttagcccacttaagtaaatactatgatgataagctgtgtgaacttagcttttaaatagtgtgaccatatgaaggttttaattacttttgtttattggaataaaatgagattttttgggttgtcatgttaaagtgcttatagggaaagaagcctgcatataattttttaccttgtggcataatcagtaattggtctgttattcaggcttcatagcttgtaaccaaatataaataaaaggcataatttaggtattctatagttgcttagaattttgttaatataaatctctgtgaaaaatcaaggagttttaatattttcagaagtgcatccacctttcagggctttaagttagtattactcaagattatgaacaaatagcacttaggttacctgaaagagttactacaaccccaaagagttgtgttctaagtagtatcttggtaattcagagagatactcatcctacctgaatataaactgagataaatccagtaaagaaagtgtagtaaattctacataagagtctatcattgatttctttttgtggtaaaaatcttagttcatgtgaagaaatttcatgtgaatgttttagctatcaaacagtactgtcacctactcatgcacaaaactgcctcccaaagacttttcccaggtccctcgtatcaaaacattaagagtataatggaagatagcacgatcttgtcagattggacaaacagcaacaaacaaaaaatgaagtatgacttttcctgtgaactctacagaatgtctacatattcaactttccccgccggggtgcctgtctcagaaaggagtcttgctcgtgctggtttttattatactggtgtgaatgacaaggtcaaatgcttctgttgtggcctgatgctggataactggaaactaggagacagtcctattcaaaagcataaacagctatatcctagctgtagctttattcagaatctggtttcagctagtctgggatccacctctaagaatacgtctccaatgagaaacagttttgcacattcattatctcccaccttggaacatagtagcttgttcagtggttcttactccagcctttctccaaaccctcttaattctagagcagttgaagacatctcttcatcgaggactaacccctacagttatgcaatgagtactgaagaagccagatttcttacctaccatatgtggccattaacttttttgtcaccatcagaattggcaagagctggtttttattatataggacctggagatagggtagcctgctttgcctgtggtgggaagctcagtaactgggaaccaaaggatgatgctatgtcagaacaccggaggcattttcccaactgtccatttttggaaaattctctagaaactctgaggtttagcatttcaaatctgagcatgcagacacatgcagctcgaatgagaacatttatgtactggccatctagtgttccagttcagcctgagcagcttgcaagtgctggtttttattatgtgggtcgcaatgatgatgtcaaatgcttttgttgtgatggtggcttgaggtgttgggaatctggagatgatccatgggtagaacatgccaagtggtttccaaggtgtgagttcttgatacgaatgaaaggccaagagtttgttgatgagattcaaggtagatatcctcatcttcttgaacagctgttgtcaacttcagataccactggagaagaaaatgctgacccaccaattattcattttggacctggagaaagttcttcagaagatgctgtcatgatgaatacacctgtggttaaatctgccttggaaatgggctttaatagagacctggtgaaacaaacagttcaaagtaaaatcctgacaactggagagaactataaaacagttaatgatattgtgtcagcacttcttaatgctgaagatgaaaaaagagaagaggagaaggaaaaacaagctgaagaaatggcatcagatgatttgtcattaattcggaagaacagaatggctctctttcaacaattgacatgtgtgcttcctatcctggataatcttttaaaggccaatgtaattaataaacaggaacatgatattattaaacaaaaaacacagatacctttacaagcgagagaactgattgataccattttggttaaaggaaatgctgcggccaacatcttcaaaaactgtctaaaagtaaaacaaagattt

SEQ ID NO: 89856 - DNA, 1854 bp, Artificial Sequence
  derived and/or modified sequence
atgcacaagaccgccagccagcgcctgttccccggccccagctaccagaacatcaagagcatcatggaggacagcaccatcctgagcgactggaccaacagcaacaagcagaagatgaagtacgacttcagctgcgagctgtaccgcatgagcacctacagcaccttccccgccggcgtgcccgtgagcgagcgcagcctggcccgcgccggcttctactacaccggcgtgaacgacaaggtgaagtgcttctgctgcggcctgatgctggacaactggaagctgggcgacagccccatccagaagcacaagcagctgtaccccagctgcagcttcatccagaacctggtgagcgccagcctgggcagcaccagcaagaacaccagccccatgcgcaacagcttcgcccacagcctgagccccaccctggagcacagcagcctgttcagcggcagctacagcagcctgagccccaaccccctgaacagccgcgccgtggaggacatcagcagcagccgcaccaacccctacagctacgccatgagcaccgaggaggcccgcttcctgacctaccacatgtggcccctgaccttcctgagccccagcgagctggcccgcgccggcttctactacatcggccccggcgaccgcgtggcctgcttcgcctgcggcggcaagctgagcaactgggagcccaaggacgacgccatgagcgagcaccgccgccacttccccaactgccccttcctggagaacagcctggagaccctgcgcttcagcatcagcaacctgagcatgcagacccacgccgcccgcatgcgcaccttcatgtactggcccagcagcgtgcccgtgcagcccgagcagctggccagcgccggcttctactacgtgggccgcaacgacgacgtgaagtgcttctgctgcgacggcggcctgcgctgctgggagagcggcgacgacccctgggtggagcacgccaagtggttcccccgctgcgagttcctgatccgcatgaagggccaggagttcgtggacgagatccagggccgctacccccacctgctggagcagctgctgagcaccagcgacaccaccggcgaggagaacgccgacccccccatcatccacttcggccccggcgagagcagcagcgaggacgccgtgatgatgaacacccccgtggtgaagagcgccctggagatgggcttcaaccgcgacctggtgaagcagaccgtgcagagcaagatcctgaccaccggcgagaactacaagaccgtgaacgacatcgtgagcgccctgctgaacgccgaggacgagaagcgcgaggaggagaaggagaagcaggccgaggagatggccagcgacgacctgagcctgatccgcaagaaccgcatggccctgttccagcagctgacctgcgtgctgcccatcctggacaacctgctgaaggccaacgtgatcaacaagcaggagcacgacatcatcaagcagaagacccagatccccctgcaggcccgcgagctgatcgacaccatcctggtgaagggcaacgccgccgccaacatcttcaagaactgcctgaaggagatcgacagcaccctgtacaagaacctgttcgtggacaagaacatgaagtacatccccaccgaggacgtgagcggcctgagcctggaggagcagctgcgccgcctgcaggaggagcgcacctgcaaggtgtgcatggacaaggaggtgagcgtggtgttcatcccctgcggccacctggtggtgtgccaggagtgcgcccccagcctgcgcaagtgccccatctgccgcggcatcatcaagggcaccgtgcgcaccttcctgagc

SEQ ID NO: 89857 - DNA, 1791 bp, Artificial Sequence
  derived and/or modified sequence
atggaggacagcaccatcctgagcgactggaccaacagcaacaagcagaagatgaagtacgacttcagctgcgagctgtaccgcatgagcacctacagcaccttccccgccggcgtgcccgtgagcgagcgcagcctggcccgcgccggcttctactacaccggcgtgaacgacaaggtgaagtgcttctgctgcggcctgatgctggacaactggaagctgggcgacagccccatccagaagcacaagcagctgtaccccagctgcagcttcatccagaacctggtgagcgccagcctgggcagcaccagcaagaacaccagccccatgcgcaacagcttcgcccacagcctgagccccaccctggagcacagcagcctgttcagcggcagctacagcagcctgagccccaaccccctgaacagccgcgccgtggaggacatcagcagcagccgcaccaacccctacagctacgccatgagcaccgaggaggcccgcttcctgacctaccacatgtggcccctgaccttcctgagccccagcgagctggcccgcgccggcttctactacatcggccccggcgaccgcgtggcctgcttcgcctgcggcggcaagctgagcaactgggagcccaaggacgacgccatgagcgagcaccgccgccacttccccaactgccccttcctggagaacagcctggagaccctgcgcttcagcatcagcaacctgagcatgcagacccacgccgcccgcatgcgcaccttcatgtactggcccagcagcgtgcccgtgcagcccgagcagctggccagcgccggcttctactacgtgggccgcaacgacgacgtgaagtgcttctgctgcgacggcggcctgcgctgctgggagagcggcgacgacccctgggtggagcacgccaagtggttcccccgctgcgagttcctgatccgcatgaagggccaggagttcgtggacgagatccagggccgctacccccacctgctggagcagctgctgagcaccagcgacaccaccggcgaggagaacgccgacccccccatcatccacttcggccccggcgagagcagcagcgaggacgccgtgatgatgaacacccccgtggtgaagagcgccctggagatgggcttcaaccgcgacctggtgaagcagaccgtgcagagcaagatcctgaccaccggcgagaactacaagaccgtgaacgacatcgtgagcgccctgctgaacgccgaggacgagaagcgcgaggaggagaaggagaagcaggccgaggagatggccagcgacgacctgagcctgatccgcaagaaccgcatggccctgttccagcagctgacctgcgtgctgcccatcctggacaacctgctgaaggccaacgtgatcaacaagcaggagcacgacatcatcaagcagaagacccagatccccctgcaggcccgcgagctgatcgacaccatcctggtgaagggcaacgccgccgccaacatcttcaagaactgcctgaaggagatcgacagcaccctgtacaagaacctgttcgtggacaagaacatgaagtacatccccaccgaggacgtgagcggcctgagcctggaggagcagctgcgccgcctgcaggaggagcgcacctgcaaggtgtgcatggacaaggaggtgagcgtggtgttcatcccctgcggccacctggtggtgtgccaggagtgcgcccccagcctgcgcaagtgccccatctgccgcggcatcatcaagggcaccgtgcgcaccttcctgagc

SEQ ID NO: 89858 - DNA, 1794 bp, Artificial Sequence
  derived and/or modified sequence
atggaggacagcaccatcctgagcgactggaccaacagcaacaagcagaagatgaagtacgacttcagctgcgagctgtacagaatgagcacctacagcaccttccccgccggcgtgcccgtgagcgagagaagcctggccagagccggcttctactacaccggcgtgaacgacaaggtgaagtgcttctgctgcggcctgatgctggacaactggaagctgggcgacagccccatccagaagcacaagcagctgtaccccagctgcagcttcatccagaacctggtgagcgccagcctgggcagcaccagcaagaacaccagccccatgagaaacagcttcgcccacagcctgagccccaccctggagcacagcagcctgttcagcggcagctacagcagcctgagccccaaccccctgaacagcagagccgtggaggacatcagcagcagcagaaccaacccctacagctacgccatgagcaccgaggaggccagattcctgacctaccacatgtggcccctgaccttcctgagccccagcgagctggccagagccggcttctactacatcggccccggcgacagagtggcctgcttcgcctgcggcggcaagctgagcaactgggagcccaaggacgacgccatgagcgagcacagaagacacttccccaactgccccttcctggagaacagcctggagaccctgagattcagcatcagcaacctgagcatgcagacccacgccgccagaatgagaaccttcatgtactggcccagcagcgtgcccgtgcagcccgagcagctggccagcgccggcttctactacgtgggcagaaacgacgacgtgaagtgcttctgctgcgacggcggcctgagatgctgggagagcggcgacgacccctgggtggagcacgccaagtggttccccagatgcgagttcctgatcagaatgaagggccaggagttcgtggacgagatccagggcagatacccccacctgctggagcagctgctgagcaccagcgacaccaccggcgaggagaacgccgacccccccatcatccacttcggccccggcgagagcagcagcgaggacgccgtgatgatgaacacccccgtggtgaagagcgccctggagatgggcttcaacagagacctggtgaagcagaccgtgcagagcaagatcctgaccaccggcgagaactacaagaccgtgaacgacatcgtgagcgccctgctgaacgccgaggacgagaagagagaggaggagaaggagaagcaggccgaggagatggccagcgacgacctgagcctgatcagaaagaacagaatggccctgttccagcagctgacctgcgtgctgcccatcctggacaacctgctgaaggccaacgtgatcaacaagcaggagcacgacatcatcaagcagaagacccagatccccctgcaggccagagagctgatcgacaccatcctggtgaagggcaacgccgccgccaacatcttcaagaactgcctgaaggagatcgacagcaccctgtacaagaacctgttcgtggacaagaacatgaagtacatccccaccgaggacgtgagcggcctgagcctggaggagcagctgagaagactgcaggaggagagaacctgcaaggtgtgcatggacaaggaggtgagcgtggtgttcatcccctgcggccacctggtggtgtgccaggagtgcgcccccagcctgagaaagtgccccatctgcagaggcatcatcaagggcaccgtgagaaccttcctgagctag

SEQ ID NO: 89859 - DNA, 1605 bp, Artificial Sequence
  derived and/or modified sequence
atgcacaagaccgccagccagagactgttccccggccccagctaccagaacatcaagagcatcatggaggacagcaccatcctgagcgactggaccaacagcaacaagcagaagatgaagtacgacttcagctgcgagctgtacagaatgagcacctacagcaccttccccgccggcgtgcccgtgagcgagagaagcctggccagagccggcttctactacaccggcgtgaacgacaaggtgaagtgcttctgctgcggcctgatgctggacaactggaagctgggcgacagccccatccagaagcacaagcagctgtaccccagctgcagcttcatccagaacctggtgagcgccagcctgggcagcaccagcaagaacaccagccccatgagaaacagcttcgcccacagcctgagccccaccctggagcacagcagcctgttcagcggcagctacagcagcctgagccccaaccccctgaacagcagagccgtggaggacatcagcagcagcagaaccaacccctacagctacgccatgagcaccgaggaggccagattcctgacctaccacatgtggcccctgaccttcctgagccccagcgagctggccagagccggcttctactacatcggccccggcgacagagtggcctgcttcgcctgcggcggcaagctgagcaactgggagcccaaggacgacgccatgagcgagcacagaagacacttccccaactgccccttcctggagaacagcctggagaccctgagattcagcatcagcaacctgagcatgcagacccacgccgccagaatgagaaccttcatgtactggcccagcagcgtgcccgtgcagcccgagcagctggccagcgccggcttctactacgtgggcagaaacgacgacgtgaagtgcttctgctgcgacggcggcctgagatgctgggagagcggcgacgacccctgggtggagcacgccaagtggttccccagatgcgagttcctgatcagaatgaagggccaggagttcgtggacgagatccagggcagatacccccacctgctggagcagctgctgagcaccagcgacaccaccggcgaggagaacgccgacccccccatcatccacttcggccccggcgagagcagcagcgaggacgccgtgatgatgaacacccccgtggtgaagagcgccctggagatgggcttcaacagagacctggtgaagcagaccgtgcagagcaagatcctgaccaccggcgagaactacaagaccgtgaacgacatcgtgagcgccctgctgaacgccgaggacgagaagagagaggaggagaaggagaagcaggccgaggagatggccagcgacgacctgagcctgatcagaaagaacagaatggccctgttccagcagctgacctgcgtgctgcccatcctggacaacctgctgaaggccaacgtgatcaacaagcaggagcacgacatcatcaagcagaagacccagatccccctgcaggccagagagctgatcgacaccatcctggtgaagggcaacgccgccgccaacatcttcaagaactgcctgaaggtgaagcagagattctag

SEQ ID NO: 89860 - DNA, 2043 bp, Artificial Sequence
  derived and/or modified sequence
taatacgactcactatagggaaataagagagaaaagaagagtaagaagaaatataagagccaccatgcacaaaactgcctcccaaagacttttcccaggtccctcgtatcaaaacattaagagtataatggaagatagcacgatcttgtcagattggacaaacagcaacaaacaaaaaatgaagtatgacttttcctgtgaactctacagaatgtctacatattcaactttccccgccggggtgcctgtctcagaaaggagtcttgctcgtgctggtttttattatactggtgtgaatgacaaggtcaaatgcttctgttgtggcctgatgctggataactggaaactaggagacagtcctattcaaaagcataaacagctatatcctagctgtagctttattcagaatctggtttcagctagtctgggatccacctctaagaatacgtctccaatgagaaacagttttgcacattcattatctcccaccttggaacatagtagcttgttcagtggttcttactccagcctttctccaaaccctcttaattcaagagcagttgaagacatctcttcatcgaggactaacccctacagttatgcaatgagtactgaagaagccagatttcttacctaccatatgtggccattaacttttttgtcaccatcagaattggcaagagctggtttttattatataggacctggagatagggtagcctgctttgcctgtggtgggaagctcagtaactgggaaccaaaggatgatgctatgtcagaacaccggaggcattttcccaactgtccatttttggaaaattctttagaaactctgaggtttagcatttcaaatctgagcatgcagacacatgcagctcgaatgagaacatttatgtactggccatctagtgttccagttcagcctgagcagcttgcaagtgctggtttttattatgtgggtcgcaatgatgatgtcaaatgcttttgttgtgatggtggcttgaggtgttgggaatctggagatgatccatgggtagaacatgccaagtggtttccaaggtgtgagttcttgatacgaatgaaaggccaagagtttgttgatgagattcaaggtagatatcctcatcttcttgaacagctgttgtcaacttcagataccactggagaagaaaatgctgacccaccaattattcattttggacctggagaaagttcttcagaagatgctgtcatgatgaatacacctgtggttaaatctgccttggaaatgggctttaatagagacctggtgaaacaaacagttcaaagtaaaatcctgacaactggagagaactataaaacagttaatgatattgtgtcagcacttcttaatgctgaagatgaaaaaagagaagaggagaaggaaaaacaagctgaagaaatggcatcagatgatttgtcattaattcggaagaacagaatggctctctttcaacaattgacatgtgtgcttcctatcctggataatcttttaaaggccaatgtaattaataaacaggaacatgatattattaaacaaaaaacacagatacctttacaagcgagagaactgattgataccattttggttaaaggaaatgctgcggccaacatcttcaaaaactgtctaaaagaaattgactctacattgtataagaacttatttgtggataagaatatgaagtatattccaacagaagatgtttcaggtctgtcactggaagaacaattgaggaggttgcaagaagaacgaacttgtaaagtgtgtatggacaaagaagtttctgttgtatttattccttgtggtcatctggtagtatgccaggaatgtgccccttctctaagaaaatgccctatttgcaggggtataatcaagggtactgttcgtacatttctctcttgataataggctggagcctcggtggccatgcttcttgccccttgggcctccccccagcccctcctccccttcctgcacccgtacccccgtggtctttgaataaagtctgagtgggcggctctaga

SEQ ID NO: 89861 - DNA, 2043 bp, Artificial Sequence
  derived and/or modified sequence
taatacgactcactatagggaaataagagagaaaagaagagtaagaagaaatataagagccaccatgcacaaaactgcctcccaaagacttttcccaggtccctcgtatcaaaacattaagagtataatggaagatagcacgatcttgtcagattggacaaacagcaacaaacaaaaaatgaagtatgacttttcctgtgaactctacagaatgtctacatattcaactttccccgccggggtgcctgtctcagaaaggagtcttgctcgtgctggtttttattatactggtgtgaatgacaaggtcaaatgcttctgttgtggcctgatgctggataactggaaactaggagacagtcctattcaaaagcataaacagctatatcctagctgtagctttattcagaatctggtttcagctagtctgggatccacctctaagaatacgtctccaatgagaaacagttttgcacattcattatctcccaccttggaacatagtagcttgttcagtggttcttactccagcctttctccaaaccctcttaattctagagcagttgaagacatctcttcatcgaggactaacccctacagttatgcaatgagtactgaagaagccagatttcttacctaccatatgtggccattaacttttttgtcaccatcagaattggcaagagctggtttttattatataggacctggagatagggtagcctgctttgcctgtggtgggaagctcagtaactgggaaccaaaggatgatgctatgtcagaacaccggaggcattttcccaactgtccatttttggaaaattctctagaaactctgaggtttagcatttcaaatctgagcatgcagacacatgcagctcgaatgagaacatttatgtactggccatctagtgttccagttcagcctgagcagcttgcaagtgctggtttttattatgtgggtcgcaatgatgatgtcaaatgcttttgttgtgatggtggcttgaggtgttgggaatctggagatgatccatgggtagaacatgccaagtggtttccaaggtgtgagttcttgatacgaatgaaaggccaagagtttgttgatgagattcaaggtagatatcctcatcttcttgaacagctgttgtcaacttcagataccactggagaagaaaatgctgacccaccaattattcattttggacctggagaaagttcttcagaagatgctgtcatgatgaatacacctgtggttaaatctgccttggaaatgggctttaatagagacctggtgaaacaaacagttcaaagtaaaatcctgacaactggagagaactataaaacagttaatgatattgtgtcagcacttcttaatgctgaagatgaaaaaagagaagaggagaaggaaaaacaagctgaagaaatggcatcagatgatttgtcattaattcggaagaacagaatggctctctttcaacaattgacatgtgtgcttcctatcctggataatcttttaaaggccaatgtaattaataaacaggaacatgatattattaaacaaaaaacacagatacctttacaagcgagagaactgattgataccattttggttaaaggaaatgctgcggccaacatcttcaaaaactgtctaaaagaaattgactctacattgtataagaacttatttgtggataagaatatgaagtatattccaacagaagatgtttcaggtctgtcactggaagaacaattgaggaggttgcaagaagaacgaacttgtaaagtgtgtatggacaaagaagtttctgttgtatttattccttgtggtcatctggtagtatgccaggaatgtgccccttctctaagaaaatgccctatttgcaggggtataatcaagggtactgttcgtacatttctctcttgataataggctggagcctcggtggccatgcttcttgccccttgggcctccccccagcccctcctccccttcctgcacccgtacccccgtggtctttgaataaagtctgagtgggcggctctaga

SEQ ID NO: 89862 - protein, 569 aa, Artificial Sequence
  derived and/or modified sequence
MSTYSTFPAGVPVSERSLARAGFYYTGVNDKVKCFCCGLMLDNWKLGDSPIQKHKQLYPSCSFIQNLVSASLGSTSKNTSPMRNSFAHSLSPTLEHSSLFSGSYSSLSPNPLNSRAVEDISSSRTNPYSYAMSTEEARFLTYHMWPLTFLSPSELARAGFYYIGPGDRVACFACGGKLSNWEPKDDAMSEHRRHFPNCPFLENSLETLRFSISNLSMQTHAARMRTFMYWPSSVPVQPEQLASAGFYYVGRNDDVKCFCCDGGLRCWESGDDPWVEHAKWFPRCEFLIRMKGQEFVDEIQGRYPHLLEQLLSTSDTTGEENADPPIIHFGPGESSSEDAVMMNTPVVKSALEMGFNRDLVKQTVQSKILTTGENYKTVNDIVSALLNAEDEKREEEKEKQAEEMASDDLSLIRKNRMALFQQLTCVLPILDNLLKANVINKQEHDIIKQKTQIPLQARELIDTILVKGNAAANIFKNCLKEIDSTLYKNLFVDKNMKYIPTEDVSGLSLEEQLRRLQEERTCKVCMDKEVSVVFIPCGHLVVCQECAPSLRKCPICRGIIKGTVRTFLS

SEQ ID NO: 89863 - DNA, 1710 bp, Artificial Sequence
  derived and/or modified sequence
atgtctacctactcgacctttcctgccggagtgcccgttagtgagagaagtttggcacgggccggcttctattataccggcgttaatgataaagtcaaatgcttctgttgcgggctgatgctggacaattggaaattgggagactcgccaattcagaagcataaacagctttacccatcttgttccttcatacagaacctggtgtctgcctcgctgggtagcacctctaaaaacacatcgcccatgcgaaactcctttgcccatagtctgtctccaaccctggagcactctagtcttttcagcggctcctattcctcactgagtcccaaccccctcaactcgagggcagtggaagatatttcctcatcaagaactaacccatatagttacgccatgtctaccgaagaggcgcgattcttgacgtatcacatgtggccgctcacctttctcagcccaagtgaactggccagagcaggcttctactacatcgggcccggcgatcgagtagcttgcttcgcttgcgggggcaaattgagtaactgggaacccaaagatgacgccatgtcagagcatcggcggcatttcccaaactgcccttttctcgaaaactccctggaaacactgcgcttctctatctctaatctatctatgcagacacacgccgccaggatgcgcacgttcatgtactggccatcatctgttccggtacagcccgaacagctcgctagcgctgggttctactatgttgggcggaatgacgatgtcaagtgcttttgctgtgacggcggcctgaggtgctgggagtctggagatgacccatgggtcgagcacgcaaagtggtttccaaggtgtgaatttctcatccggatgaaagggcaggagttcgttgatgagattcagggcaggtatccccatttgctggagcagttattatcgacaagtgatacgacaggagaagaaaatgctgacccgccaattatccacttcgggcctggtgaaagttcctccgaggacgccgtcatgatgaacacccccgtggtgaagtcggccctagagatgggatttaaccgggacctggttaagcagacggtacaaagcaaaatcctgacaactggggagaactacaagactgtgaacgatatagtgtccgcattactaaacgcggaagatgagaagagagaagaagagaaggagaagcaggctgaggagatggcttccgacgatcttagcctgattcgtaagaaccgcatggcactgtttcagcagctcacatgcgtcttacctatcctcgataaccttctaaaggcgaacgtgatcaataaacaggagcacgacatcataaaacagaaaacacagattcccctccaggctcgcgaactgattgatactatcttagttaagggaaatgcagcagctaacatattcaaaaattgcctgaaggagatagatagcactttgtataaaaacctctttgtcgacaagaatatgaagtatatccccactgaggacgtctctggactgtccctggaggaacagctgagaagactgcaagaggagcggacctgtaaggtctgtatggacaaagaagtttctgtcgtgttcatcccctgcgggcatttggttgtttgccaggaatgcgcaccttctctgaggaagtgtccaatatgtagaggaattattaagggaacggtccggacattcctgtcctag

SEQ ID NO: 89864 - DNA, 1710 bp, Artificial Sequence
  derived and/or modified sequence
atgagcacctacagcaccttccctgctggggtgcctgtgtctgagaggagcctggcccgggccggcttctactacacaggagtgaatgacaaggtgaagtgcttctgctgcggcctgatgctggacaactggaagctgggggacagccccatccagaagcacaagcagctgtaccccagctgcagcttcatccagaacctggtgtctgccagcctgggcagcaccagcaagaacaccagccccatgagaaattcctttgcccacagcctgagccccaccctggagcacagcagcctcttcagcggcagctacagcagcctgagccccaaccccctgaacagcagagctgtggaggacatcagcagcagcaggaccaacccctacagctatgccatgagcacagaggaggcccgcttcctgacctaccacatgtggcccctgaccttcctgagccccagcgagctggcccgggccggcttctactacatcggccctggggacagagtggcctgctttgcctgtggcggcaagctgagcaactgggagcccaaggatgatgccatgtctgagcaccggcggcacttccccaactgccccttcctggagaacagcctggagaccctgcgcttcagcatcagcaacctgtccatgcagacccatgctgccaggatgaggaccttcatgtactggcccagctctgtgcctgtgcagcctgagcagctggccagcgctggcttctactacgtgggcagaaatgatgatgtgaagtgcttctgctgtgatggcggcctgcgctgctgggagagcggagatgacccctgggtggagcacgccaagtggttcccccgctgtgagttcctgatccgcatgaagggccaggagtttgtggatgagatccagggccgctacccccacctgctggagcagctgctgagcaccagtgacaccactggagaggagaatgctgacccccccatcatccactttggacctggagagagcagcagtgaagatgctgtgatgatgaacacccctgtggtgaagagcgccctggagatgggcttcaacagagacctggtgaagcagacagtgcagagcaagatcctgaccactggagagaactacaagacagtgaatgacatcgtgtctgccctgctgaatgcagaagatgagaagcgggaggaggagaaggagaagcaggccgaggagatggccagtgatgacctgagcctcatcaggaagaacaggatggccctcttccagcagctgacctgtgtgctgcccatcctggacaacctgctgaaggccaacgtcatcaacaagcaggagcatgacatcatcaagcagaagacccagatccccctgcaggcccgggagctgattgacaccatcctggtgaagggaaatgctgctgccaacatcttcaagaactgcctgaaggagattgacagcaccctgtacaagaacctgtttgtggacaagaacatgaagtacatccccacagaagatgtgtctggcctgagcctggaggagcagctgcggcggctgcaggaggagaggacctgcaaggtgtgcatggacaaggaggtgtctgtggtgttcatcccctgtggccacctggtggtgtgccaggagtgtgcccccagcctgaggaagtgccccatctgccggggcatcatcaagggcaccgtgaggaccttcctgtcctag

SEQ ID NO: 89865 - DNA, 1710 bp, Artificial Sequence
  derived and/or modified sequence
atgagcacctacagcaccttccccgccggcgtgcccgtgagcgagagatcactggcacgcgccggtttttattatacaggcgtgaatgataaggttaaatgcttttgctgcggacttatgcttgataactggaagttgggggattctcccattcagaaacataagcaactctacccttcctgcagctttattcagaacctcgtatcagcatctctggggagcaccagtaaaaatacctctccaatgcggaactcctttgcccatagcctgtcccctaccctcgaacattctagcctcttttcggggagttattcctctttgtccccaaaccccctcaactcacgcgccgtcgaagatatttctagctctcgcaccaacccatattcatatgccatgtctactgaggaagctcgattcctaacctaccacatgtggcctcttaccttcctgtctccatccgaactcgctagagcaggtttctactatattggcccaggcgaccgcgtagcatgtttcgcatgtgggggtaagctctctaattgggaaccaaaagacgatgccatgagtgagcatcggcgccattttccgaattgcccattcttggagaactcgttagaaacccttcgttttagtatcagcaacctgtcgatgcagacacacgccgctcgcatgcgcactttcatgtactggccttcgtctgtgccggttcagccagagcagcttgctagtgctgggttctattacgtcgggcggaacgacgatgtaaagtgtttctgttgcgacggcggattgaggtgttgggagtccggggacgacccatgggtcgagcacgccaaatggttccctagatgtgaatttctgatcagaatgaagggccaagagttcgtagacgaaatccaaggacggtatccgcatttactcgaacagttgctctctacaagcgatactaccggggaagagaatgccgaccccccaattatccatttcggccctggagaatcctcctctgaagatgcagtgatgatgaacacaccggttgtgaagtcagccctggagatgggatttaatcgcgatctcgtaaagcagactgtgcaatccaagatcttaactaccggcgaaaactacaaaactgtgaatgatatcgtgtccgctctgttaaatgccgaggatgaaaagcgcgaggaggagaaagaaaagcaagctgaggaaatggcgtcagacgacctgtccctaatccgtaaaaaccgcatggcactcttccagcagctcacatgcgttctgcctatactggataatctgctgaaagccaacgtgataaataagcaggagcacgacatcatcaagcagaaaactcagatacctcttcaggcccgtgagctcatcgacacgatcctcgtgaaaggcaacgcagccgccaacatttttaaaaactgccttaaagagatagatagcaccctgtacaagaacttgtttgtggacaagaatatgaagtatatccccactgaagacgtgagcggcttgagtctagaggaacagctgagacggctgcaggaggaacggacttgtaaggtatgcatggacaaagaggtgtccgtagtgttcatcccctgcggccaccttgtggtgtgccaggagtgtgcacccagcctccgcaagtgccccatctgtagaggcattataaagggcaccgtcagaactttcctgtcctag

SEQ ID NO: 89866 - DNA, 1710 bp, Artificial Sequence
  derived and/or modified sequence
atgagtacctattccacattccctgccggagtgcctgtgtccgagcggtccttagcccgagcagggttctactacactggtgtcaacgataaggtcaaatgtttttgctgcggcctgatgctggacaactggaaactgggagactccccaatacagaagcataaacagctttacccctcttgctcattcattcagaatctcgtctctgctagtcttgggtcaacctccaagaacactagtcctatgcggaactcattcgctcattcattgtcacccacgctggagcactccagtttatttagcgggagctactcgagtctcagccctaatcccttaaactctagagccgtagaggatatctcttcaagcagaacaaacccatattcttatgccatgagtaccgaggaagcgagattcctgacctaccacatgtggcccttgacgtttctctctccatccgaactggcccgtgctggtttctactacataggcccaggcgatagggtggcttgctttgcctgcgggggtaagctgagcaattgggagccaaaagacgatgctatgagtgaacacagacgccatttcccaaactgccctttcctggagaacagccttgagacactgcgcttctctatatcaaatctctccatgcagacgcatgccgctcgaatgcgcacattcatgtattggcccagctccgtgccagtgcagcccgaacaactcgctagcgccggtttttactacgttggcagaaacgacgacgtaaaatgcttctgttgtgatgggggactcaggtgctgggaatccggggacgacccctgggtggagcatgccaaatggtttccgagatgcgagtttctgatccgcatgaaagggcaggaatttgtggatgagatccagggaaggtatccccatttactggagcagctgctgagcacatctgatacaactggagaagagaacgccgaccccccaattatacacttcgggcctggggagagctccagcgaagacgctgtgatgatgaataccccagtcgtgaagtcagctctggaaatgggttttaaccgggatctcgttaaacaaactgtgcagagcaaaatcttgaccactggcgagaattataaaacagtcaatgatattgtgtccgccctgctgaatgctgaggacgagaagcgggaggaggaaaaggaaaaacaggctgaagagatggcatccgatgatctgtcactgatccggaaaaatcgaatggcacttttccaacagcttacatgtgttctccctatactggacaatctgctgaaagccaatgtgataaacaaacaggaacacgatattatcaagcagaaaacgcagatccccctgcaagcccgagaactcatcgacacgatactcgtaaaggggaatgccgcagccaacatctttaagaattgcctaaaagagatcgactccacactgtataaaaacctgtttgtagataagaatatgaagtacattcccacagaagacgtctccggcctcagccttgaggagcagttgaggcggctgcaggaggagaggacctgtaaagtctgtatggataaggaagtctccgtggtttttatcccttgtgggcacctggtggtgtgtcaagagtgtgccccatccctcagaaagtgtccaatctgccggggaataattaaaggcacggtgagaacctttctttcttag

SEQ ID NO: 89867 - DNA, 1707 bp, Artificial Sequence
  derived and/or modified sequence
atgagcacctacagcaccttccccgccggcgtgcccgtgagcgagcgcagcctggcccgcgccggcttctactacaccggcgtgaacgacaaggtgaagtgcttctgctgcggcctgatgctggacaactggaagctgggcgacagccccatccagaagcacaagcagctgtaccccagctgcagcttcatccagaacctggtgagcgccagcctgggcagcaccagcaagaacaccagccccatgcgcaacagcttcgcccacagcctgagccccaccctggagcacagcagcctgttcagcggcagctacagcagcctgagccccaaccccctgaacagccgcgccgtggaggacatcagcagcagccgcaccaacccctacagctacgccatgagcaccgaggaggcccgcttcctgacctaccacatgtggcccctgaccttcctgagccccagcgagctggcccgcgccggcttctactacatcggccccggcgaccgcgtggcctgcttcgcctgcggcggcaagctgagcaactgggagcccaaggacgacgccatgagcgagcaccgccgccacttccccaactgccccttcctggagaacagcctggagaccctgcgcttcagcatcagcaacctgagcatgcagacccacgccgcccgcatgcgcaccttcatgtactggcccagcagcgtgcccgtgcagcccgagcagctggccagcgccggcttctactacgtgggccgcaacgacgacgtgaagtgcttctgctgcgacggcggcctgcgctgctgggagagcggcgacgacccctgggtggagcacgccaagtggttcccccgctgcgagttcctgatccgcatgaagggccaggagttcgtggacgagatccagggccgctacccccacctgctggagcagctgctgagcaccagcgacaccaccggcgaggagaacgccgacccccccatcatccacttcggccccggcgagagcagcagcgaggacgccgtgatgatgaacacccccgtggtgaagagcgccctggagatgggcttcaaccgcgacctggtgaagcagaccgtgcagagcaagatcctgaccaccggcgagaactacaagaccgtgaacgacatcgtgagcgccctgctgaacgccgaggacgagaagcgcgaggaggagaaggagaagcaggccgaggagatggccagcgacgacctgagcctgatccgcaagaaccgcatggccctgttccagcagctgacctgcgtgctgcccatcctggacaacctgctgaaggccaacgtgatcaacaagcaggagcacgacatcatcaagcagaagacccagatccccctgcaggcccgcgagctgatcgacaccatcctggtgaagggcaacgccgccgccaacatcttcaagaactgcctgaaggagatcgacagcaccctgtacaagaacctgttcgtggacaagaacatgaagtacatccccaccgaggacgtgagcggcctgagcctggaggagcagctgcgccgcctgcaggaggagcgcacctgcaaggtgtgcatggacaaggaggtgagcgtggtgttcatcccctgcggccacctggtggtgtgccaggagtgcgcccccagcctgcgcaagtgccccatctgccgcggcatcatcaagggcaccgtgcgcaccttcctgagc

SEQ ID NO: 89868 - DNA, 1710 bp, Artificial Sequence
  derived and/or modified sequence
atgagcacctacagcaccttccccgccggcgtgcccgtgagcgagagaagcctggccagagccggcttctactacaccggcgtgaacgacaaggtgaagtgcttctgctgcggcctgatgctggacaactggaagctgggcgacagccccatccagaagcacaagcagctgtaccccagctgcagcttcatccagaacctggtgagcgccagcctgggcagcaccagcaagaacaccagccccatgagaaacagcttcgcccacagcctgagccccaccctggagcacagcagcctgttcagcggcagctacagcagcctgagccccaaccccctgaacagcagagccgtggaggacatcagcagcagcagaaccaacccctacagctacgccatgagcaccgaggaggccagattcctgacctaccacatgtggcccctgaccttcctgagccccagcgagctggccagagccggcttctactacatcggccccggcgacagagtggcctgcttcgcctgcggcggcaagctgagcaactgggagcccaaggacgacgccatgagcgagcacagaagacacttccccaactgccccttcctggagaacagcctggagaccctgagattcagcatcagcaacctgagcatgcagacccacgccgccagaatgagaaccttcatgtactggcccagcagcgtgcccgtgcagcccgagcagctggccagcgccggcttctactacgtgggcagaaacgacgacgtgaagtgcttctgctgcgacggcggcctgagatgctgggagagcggcgacgacccctgggtggagcacgccaagtggttccccagatgcgagttcctgatcagaatgaagggccaggagttcgtggacgagatccagggcagatacccccacctgctggagcagctgctgagcaccagcgacaccaccggcgaggagaacgccgacccccccatcatccacttcggccccggcgagagcagcagcgaggacgccgtgatgatgaacacccccgtggtgaagagcgccctggagatgggcttcaacagagacctggtgaagcagaccgtgcagagcaagatcctgaccaccggcgagaactacaagaccgtgaacgacatcgtgagcgccctgctgaacgccgaggacgagaagagagaggaggagaaggagaagcaggccgaggagatggccagcgacgacctgagcctgatcagaaagaacagaatggccctgttccagcagctgacctgcgtgctgcccatcctggacaacctgctgaaggccaacgtgatcaacaagcaggagcacgacatcatcaagcagaagacccagatccccctgcaggccagagagctgatcgacaccatcctggtgaagggcaacgccgccgccaacatcttcaagaactgcctgaaggagatcgacagcaccctgtacaagaacctgttcgtggacaagaacatgaagtacatccccaccgaggacgtgagcggcctgagcctggaggagcagctgagaagactgcaggaggagagaacctgcaaggtgtgcatggacaaggaggtgagcgtggtgttcatcccctgcggccacctggtggtgtgccaggagtgcgcccccagcctgagaaagtgccccatctgcagaggcatcatcaagggcaccgtgagaaccttcctgagctag

SEQ ID NO: 89869 - DNA, 390 bp, Artificial Sequence
  derived and/or modified sequence
atggccgctggcagcgctcctatgcagctgcacttgagagctacaattagaatgaaggatggcctctgtgttccaagaaagtggatttaccatctgaccgagggtagcaccgaccttcggactgaagggagaccagatatgaaaaccgagctgttttcctcctcttgccccggagggatcatgctcaatgagactgggcaggggtaccagagattccttttgtataatcggtccccgcatccacctgagaagtgtgtcgaagaattcaaatctctcaccagctgtctggactcgaaagccttcctattgacaccacggaatcagggtaaaggcctcaagtcgcacaagaccggtctggggctgacgaaaagttcgggagtgaccggctag

SEQ ID NO: 89870 - DNA, 351 bp, Artificial Sequence
  derived and/or modified sequence
atggcagctggcagcgcaccgatgcagttacacctgagggccacgatccgcatgaaggatggtctctgcgtccctcgcaagtggatctaccatttaaccgagggtagtaccgacctgcgcactgaggggaggccagacatgaagactgaacttttcagctcctcttgccccggtgggatcatgcttaacgagacgggacaggggtatcaacggtttctactgtataatcgatccccacacccacctgagaaatgcgttgaggagtttaaatctctgacttcttgtctagatagcaaagccttcctactgacaccccgtaaccaggaggcatgcgaattatccaacaactag

SEQ ID NO: 89871 - DNA, 351 bp, Artificial Sequence
  derived and/or modified sequence
atggctgccggaagtgccccaatgcagctccacctgagagccacaataagaatgaaggatggcttatgtgttccgaggaagtggatttatcatcttactgagggctccacagacctgcgaaccgaaggcaggcctgatatgaaaactgagctcttcagcagctcatgccctggtggtatcatgttgaatgagaccgggcaggggtaccagagattcctgctgtacaacaggtccccgcaccctccagagaagtgtgtggaggagttcaagagcctgacttcctgtttggatagtaaagccttcctacttacccctagaaatcaggaggcgtgtgagctgagcaataactag

SEQ ID NO: 89872 - DNA, 351 bp, Artificial Sequence
  derived and/or modified sequence
atggccgctggtagcgctccgatgcagttgcacctccgcgcaacaatccgtatgaaagacgggttatgtgtgccccgaaagtggatctaccatctcacggaaggaagtacagacttacggaccgaaggtaggcccgatatgaagactgagctgtttagcagctcctgccccggtgggattatgctcaacgagacaggacagggttatcaacgtttcttgctctacaacaggtcaccccacccacccgaaaagtgcgtggaggagtttaaatcgctaacatcgtgcctagattccaaagcctttctgctaacacctagaaatcaggaagcctgcgagctgtcaaacaactag

SEQ ID NO: 89873 - DNA, 390 bp, Artificial Sequence
  derived and/or modified sequence
atggctgctggctctgctcccatgcagttgcacctgagagcgactattaggatgaaggatggcctctgcgttccccgtaagtggatctatcacctgacagaaggatcaacagatctgaggacggagggccgtcctgacatgaagaccgagctgttttcttcctcatgtcccggaggaatcatgcttaacgagaccgggcagggatatcaacgcttcctgctctataatagatctccacaccctcctgagaagtgtgtggaagaattcaagtccctgacaagttgcctggatagtaaggcctttctgttaactcctcgtaaccagggcaaaggacttaagagtcacaagacagggctgggtttaactaagtcttcgggcgtgaccgggtag

SEQ ID NO: 89874 - DNA, 351 bp, Artificial Sequence
  derived and/or modified sequence
atggccgcaggatccgccccaatgcaattgcatctccgcgcaaccatccgaatgaaggatggtctgtgtgtgccaagaaagtggatctatcacttgactgagggatcgaccgacctacgcacagagggacggcctgacatgaaaactgaactgttttcaagcagttgccccggtggcatcatgctgaatgagaccggtcaaggctaccagagatttctcctatacaaccgttcgcctcatcctcccgaaaagtgcgtggaggagtttaagtcattaacgagctgcttggactctaaggcgttcctcctgacgccaaggaatcaagaagcatgcgaactgagcaacaactag

SEQ ID NO: 89875 - DNA, 351 bp, Artificial Sequence
  derived and/or modified sequence
atggccgctggctcggccccaatgcagctgcatctccgggctaccatccgcatgaaggacggactctgtgtgccccgaaagtggatatatcatttaacagaaggcagcaccgacctcaggaccgagggcagacccgatatgaagaccgagttgttttcttcttcctgtcctggcggtataatgctcaacgaaactggccaggggtaccaacgtttcctcttgtacaatcggtccccacaccccccagagaagtgcgtggaagagttcaagagcctaacctcctgtcttgactctaaagccttcctgttaaccccacgcaatcaggaagcatgcgagctgtccaacaattag

SEQ ID NO: 89876 - DNA, 390 bp, Artificial Sequence
  derived and/or modified sequence
atggccgctggaagcgcgccaatgcagctgcacctgagggcaactatccgaatgaaggatgggctgtgtgtcccacggaagtggatttatcacctgacagaaggttcgacagacttacggaccgaaggcaggcccgatatgaagactgaactgttttcatccagttgccctggcggaatcatgctgaacgagacagggcaggggtaccagcgcttcttgctttacaatagatccccccaccccccagaaaaatgtgtggaggaattcaaatcgctgaccagttgcctggattcgaaggcgttcctcctcactccgaggaatcaggggaaaggcctgaagagccataagacagggctcggtctgaccaagtcgtcgggcgtgacaggatag

SEQ ID NO: 89877 - DNA, 390 bp, Artificial Sequence
  derived and/or modified sequence
atggcagcagggagcgcaccaatgcagctgcatctgagagcaaccatcaggatgaaagacggcctgtgtgtcccgcgaaaatggatatatcaccttaccgaaggcagcaccgacctgcggaccgaaggccgacctgatatgaagacagagctcttctcgagctcttgcccaggaggcatcatgttgaacgaaacaggacagggctaccaaagatttctgctctacaatcgctcaccccaccctcccgagaagtgcgtcgaagaattcaagagcctgaccagttgcctcgatagtaaagcttttctactgacccctagaaatcaggggaaaggccttaaaagtcacaaaactggcctcggactgaccaaaagttcgggggtcacaggctag

SEQ ID NO: 89878 - DNA, 390 bp, Artificial Sequence
  derived and/or modified sequence
atggcggctggatctgcaccaatgcagcttcatctgagggctaccattaggatgaaggacgggctgtgtgtgccaaggaaatggatataccacctgacagagggctctacagacctacgcactgaaggcaggcctgacatgaaaacggagttgttctctagctcttgtccaggtggtatcatgttgaatgaaaccgggcaggggtatcagagatttcttctgtataataggtcccctcacccacctgagaagtgtgtcgaagaatttaagagcctgaccagctgtcttgactccaaggcctttctgctcaccccgaggaatcagggcaaaggtttaaagtctcacaagaccggactgggattaactaaaagctccggcgttacagggtag

SEQ ID NO: 89879 - DNA, 351 bp, Artificial Sequence
  derived and/or modified sequence
atggcggctggaagcgcccctatgcagctgcatctgcgcgcaaccatacgaatgaaggatggcctgtgtgtgccacgaaaatggatctatcacctgacagagggcagcacagatctccgtaccgaggggcgacctgatatgaagaccgagttgttcagttcctcatgcccgggagggatcatgctgaatgagaccggccaagggtaccagcgtttcctgttgtacaacaggtccccgcacccccctgagaagtgtgtagaagagtttaagagcctcacgtcctgtctggactcaaaagcttttttgctaaccccgaggaaccaggaagcttgtgaactctccaacaactag

SEQ ID NO: 89880 - DNA, 390 bp, Artificial Sequence
  derived and/or modified sequence
atggctgcaggatccgctcccatgcagctgcacttgcgggctacgatccgaatgaaggatggactttgcgtccctcggaagtggatatatcacctgactgaaggttctaccgacctgcggacagagggacgtcccgatatgaaaaccgaacttttcagctcctcttgccctggcggtattatgctgaacgaaacaggccagggctatcagagattcttgctgtacaaccgctctccacatccccctgagaaatgtgtggaagagttcaaatctctcacatcctgcctcgattccaaggcttttctgttgacaccgaggaatcagggtaaggggctgaaaagtcataaaactgggctgggactaacaaagtcatctggagttacaggatag

SEQ ID NO: 89881 - DNA, 351 bp, Artificial Sequence
  derived and/or modified sequence
atggccgctggctctgcccctatgcaacttcatttgcgggctacaattagaatgaaagacgggctgtgcgtaccacgtaagtggatctaccatcttaccgagggaagcacagacctaagaactgaaggacgtccagacatgaaaacagagctgttcagttcctcctgtcccggaggcataatgctaaatgagacaggccaaggctaccagcgctttcttctctataatcgctctccacaccccccagaaaagtgcgtggaagaatttaaatcattgacctcgtgtctcgatagcaaggcattcctgcttaccccacggaatcaggaagcatgtgagctatccaataattag

SEQ ID NO: 89882 - DNA, 390 bp, Artificial Sequence
  derived and/or modified sequence
atggccgctggctcggccccaatgcagttgcacctaagagccaccatcaggatgaaagacgggctgtgcgtgcccaggaagtggatctaccatctgaccgagggatctactgatcttcggactgaagggagacctgacatgaaaacagaactctttagcagctcatgtcccggagggattatgctcaacgaaacaggacagggataccagcgctttctcctctacaatagatctcctcacccgccagaaaaatgcgtggaggagtttaaatcgctcactagttgcctcgatagcaaagccttcctcctgacgcctagaaaccaggggaaaggactgaaatctcacaagacaggtttgggactcaccaaatcttctggggttaccggttag

SEQ ID NO: 89883 - DNA, 390 bp, Artificial Sequence
  derived and/or modified sequence
atggcagctgggtctgcccctatgcagctccatctgcgcgccactatcaggatgaaggacggactgtgtgtgccaagaaaatggatataccatctcacagaaggctcaacggatctacgcaccgaaggacgtccagacatgaaaaccgaactttttagcagtagctgccctggagggattatgctcaatgagacaggccaggggtatcagcgattcttattatacaacagatcaccccatccacctgaaaagtgcgtcgaagaattcaaaagcctgacttcttgtcttgattctaaggcttttctcttaactccaagaaaccaggggaaaggacttaaatctcataagaccggtctggggttgacaaagtcgagcggcgtgaccggctag

SEQ ID NO: 89884 - DNA, 351 bp, Artificial Sequence
  derived and/or modified sequence
atggctgccggatccgcaccaatgcaactacacttgcgcgctacaattcggatgaaagacggtctttgcgtgcctagaaaatggatctaccatctcacagagggaagtaccgatttacgaacagaaggccgacctgacatgaagaccgaactattttcctcatcatgccccggagggattatgctaaatgagaccggtcagggctaccagcgcttcctcctgtataaccgctctcctcaccctcctgaaaagtgcgtagaggaatttaagtccctcacatcttgcctcgatagcaaggcttttcttctgacacctcgaaaccaagaagcatgtgagctgtccaataattag

SEQ ID NO: 89885 - DNA, 351 bp, Artificial Sequence
  derived and/or modified sequence
atggctgctggaagtgccccaatgcaactacatctgagagcgacgatccgaatgaaagacggcctctgtgttccacgcaaatggatttaccacctgactgaagggagtaccgacttgcgaaccgaggggagacctgatatgaagacggaattattttccagctcatgccccggagggataatgttgaatgagaccggacaggggtatcagagatttttgttatataatcggagtcctcaccccccagagaagtgcgtggaggagttcaagagccttacttcttgcctggactcaaaagccttccttctcacacctagaaaccaagaagcgtgtgaactctctaataactag

SEQ ID NO: 89886 - DNA, 351 bp, Artificial Sequence
  derived and/or modified sequence
atggccgctggatccgccccaatgcagctgcatctccgcgctaccatcaggatgaaggacggtctctgtgtgcctagaaagtggatttaccacctcacagagggaagcaccgatttgaggacagagggtaggcccgatatgaaaactgagctcttttcctcaagctgccctgggggtattatgctgaacgaaactggacagggttatcaaaggttcctgctgtacaacagatctccacacccacctgaaaaatgcgtagaggagttcaaatccttaacctcctgcttggatagcaaagcttttttactgacaccaaggaatcaagaggcttgcgaactgtccaacaattag

SEQ ID NO: 89887 - DNA, 390 bp, Artificial Sequence
  derived and/or modified sequence
atggcagccggatctgcccctatgcaactgcaccttagagccacaatcaggatgaaagacggattatgcgtcccccgaaaatggatctatcacctcaccgaaggaagcaccgaccttagaactgaggggagacccgacatgaagacggaactgttttcaagttcatgtcccggtggcattatgttaaacgagactgggcagggttaccagcgatttctactgtacaatcgatccccacacccccccgagaaatgcgtggaagagttcaagagccttacaagctgcttagatagcaaggccttccttcttaccccccgaaaccagggtaagggtctgaagtctcacaagactggattgggccttaccaaatcaagcggggttaccggctag

SEQ ID NO: 89888 - DNA, 351 bp, Artificial Sequence
  derived and/or modified sequence
atggcagcgggaagtgcacctatgcagctgcatctgcgagctacaatccgaatgaaagatggtctctgtgttccccggaaatggatttatcatctcacagaaggttcaactgacctacgaaccgagggtcgaccagatatgaaaacagaactgttctcatccagttgtcctggcgggattatgctcaacgagaccggacaggggtaccaaaggttcctcttgtataacagatccccacatccaccagaaaaatgcgttgaggagttcaaatcgctaactagctgtctcgattccaaagccttcctgctaaccccccgtaaccaggaggcctgcgagctgtcaaacaactag

SEQ ID NO: 89889 - DNA, 351 bp, Artificial Sequence
  derived and/or modified sequence
atggccgccggtagcgcaccaatgcaattacacctgagagccacaatcaggatgaaagacgggttatgtgtgcccagaaagtggatttatcacctaacagagggtagtaccgacctaaggactgagggaagacctgatatgaaaacggaattattttcctcgagttgtcccggtggaattatgctaaacgagacagggcagggatatcaacgatttctgctctacaataggagcccccaccctcccgagaagtgtgtggaagagtttaaatccctgactagctgcctggactcgaaggctttcctgcttacacccaggaaccaagaagcctgtgagcttagtaataattag

SEQ ID NO: 89890 - DNA, 390 bp, Artificial Sequence
  derived and/or modified sequence
atggcagcgggcagcgccccaatgcagctccatctgagggctacaattcggatgaaagatggactatgcgtccctagaaaatggatctaccatctgacagagggaagcacagacctgagaaccgaaggcagaccagacatgaaaacagaactttttagttcttcttgtcccgggggcataatgctgaacgaaacaggacaaggatatcagcggttcctgctctacaatagatccccacatccccctgagaagtgcgtcgaagaattcaagtccttgacttcatgcctggacagtaaagctttcctgcttacaccacgaaaccaaggaaagggtctcaaatctcacaaaacagggctaggactcaccaagtcatctggcgtgacgggttag

SEQ ID NO: 89891 - DNA, 390 bp, Artificial Sequence
  derived and/or modified sequence
atggccgctggtagcgcaccaatgcaactccacctcagagccactataaggatgaaggacggactgtgtgtgcctcgaaaatggatttaccatttgactgagggttcaacggatttacgaaccgagggtagacctgatatgaagaccgaattgtttagctcgagttgccccggcggcataatgcttaacgaaaccgggcaaggataccaacgcttcctgctctataaccgctccccacaccctcctgaaaaatgtgtcgaggaattcaagtccttgacctcttgccttgactcaaaggccttcctattgacaccaagaaaccagggaaaggggctgaagagccacaagaccggacttgggctgacaaagtcgtcaggcgtaacgggctag

SEQ ID NO: 89892 - DNA, 390 bp, Artificial Sequence
  derived and/or modified sequence
atggctgctggttcagcgcccatgcagctgcatttacgagccactattcgcatgaaggatggactttgtgttccaaggaaatggatctatcacctgaccgaaggcagtaccgatctgcgcactgagggccgtccagatatgaaaacagagctgttctcgagctcgtgcccaggcgggatcatgctcaacgaaacaggacaggggtatcagcgcttcctgctctataatcgcagcccgcaccccccggagaagtgtgtggaagaattcaaatctttaaccagctgtctagatagtaaggcattcctcctgacacctaggaaccaaggaaaaggactgaaatctcataagactgggctggggctgaccaagtcgagtggcgtgacaggttag

SEQ ID NO: 89893 - DNA, 351 bp, Artificial Sequence
  derived and/or modified sequence
atggcagctggctccgcaccgatgcagctacacttgcgggctaccattcgtatgaaggacgggttgtgcgtgccgcggaaatggatatatcacctgacagagggctcaacagatctgaggacggaaggcagaccggatatgaagaccgagctcttttccagcagctgcccaggaggaattatgctaaacgagacaggccagggctaccagagatttctgttgtacaataggtcaccccaccctcctgaaaaatgtgttgaagagtttaaatcgctgacatcctgcctggatagcaaggcttttctgctcactccacgcaaccaggaagcatgtgagctgagtaacaactag

SEQ ID NO: 89894 - DNA, 390 bp, Artificial Sequence
  derived and/or modified sequence
atggccgccggtagtgcacccatgcaactccacctgcgagcaaccattcggatgaaggacggactctgtgtgccccggaaatggatttaccatttgacagaagggtccactgatcttaggactgagggccgaccagatatgaaaacggagctgtttagctccagttgcccaggaggcatcatgctcaatgaaaccggccagggatatcaaagattcctgttgtataatcggtcaccccacccacccgaaaagtgtgtcgaagagttcaagagtctcacatcatgtcttgatagtaaggcgtttctgctgactccacgtaatcaagggaaaggcttaaagtctcacaaaaccggattggggcttacgaaatcctctggagtgacagggtag

SEQ ID NO: 89895 - DNA, 351 bp, Artificial Sequence
  derived and/or modified sequence
atggcagctggatccgccccaatgcagctacacttgcgcgccacaataagaatgaaagacgggctgtgtgtaccccggaagtggatttaccacctcacagagggttcaaccgacctgaggactgaaggccgaccagacatgaagaccgagctgttttcctcttcttgtcccgggggcatcatgctcaacgagactggacagggctaccagcgattcctgctgtataataggagtccacatccaccagagaagtgcgtggaagaatttaaatcccttacctcttgcctggacagcaaggcctttttattaaccccacgcaaccaggaagcttgcgaattgtctaacaactag

SEQ ID NO: 89896 - DNA, 390 bp, Artificial Sequence
  derived and/or modified sequence
atggccgctggatcagcccccatgcagctgcatcttagagctaccataagaatgaaggatgggttatgcgtgcctagaaaatggatatatcacttaactgagggttccaccgacctgcgcactgagggcagaccagacatgaaaactgaactgttttcttcctcgtgcccagggggcattatgttgaatgaaactggacagggctaccagaggtttcttctctataataggtccccccacccgcctgagaaatgtgtggaagaatttaaaagccttacatcatgcctggatagcaaagcatttcttctcacgccacgaaatcagggtaaaggactgaaatcacataaaacaggccttggcctcactaaatcctcaggagtgaccgggtag

SEQ ID NO: 89897 - DNA, 390 bp, Artificial Sequence
  derived and/or modified sequence
atggctgccggatccgcacccatgcagttgcacttacgggctactattagaatgaaagacggcctttgtgtcccgagaaagtggatctatcatttgactgaggggtctacagatctcagaacagaagggagaccagatatgaagacggaactattctccagttcttgtccaggcggaattatgctgaatgagaccggacaagggtaccaacgattcttactgtacaacaggtcaccgcaccccccggaaaaatgcgtagaagagttcaagtcattgacttcgtgcctggattccaaagctttcttactgacaccaagaaaccagggcaaggggcttaagtcacacaagaccggactcgggttaacaaagagctcaggcgtgaccggatag

SEQ ID NO: 89898 - DNA, 351 bp, Artificial Sequence
  derived and/or modified sequence
atggctgccggatccgcaccaatgcaactacacttgcgcgctacaattcggatgaaagacggtctttgcgtgcctagaaaatggatctaccatctcacagagggaagtaccgatttacgaacagaaggccgacctgacatgaagaccgaactattttcctcatcatgccccggagggattatgctaaatgagaccggtcagggctaccagcgcttcctcctgtataaccgctctcctcaccctcctgaaaagtgcgtagaggaatttaagtccctcacatcttgcctcgatagcaaggcttttcttctaacaccccggaatcaggaagcctgcgaactctcaaataattag

SEQ ID NO: 89899 - DNA, 351 bp, Artificial Sequence
  derived and/or modified sequence
atggcagctggctccgcgcctatgcaactacatttgcgtgccacaattcggatgaaagacgggctctgcgtaccccgcaaatggatttatcacttgactgagggcagtactgatctaaggaccgaaggccgcccagatatgaagaccgaacttttctccagtagctgtccaggcggaattatgctcaatgaaaccggacagggctaccaacggtttctgttgtacaaccgctcccctcacccccccgaaaagtgtgtcgaggaattcaagtctcttacttcatgccttgattccaaagcctttctactcaccccacggaaccaagaagcgtgcgaactgtctaataattag

SEQ ID NO: 89900 - DNA, 390 bp, Artificial Sequence
  derived and/or modified sequence
atggcagccggatctgcccctatgcaactgcaccttagagccacaatcaggatgaaagacggattatgcgtcccccgaaaatggatctatcacctcaccgaaggaagcaccgaccttagaactgaggggagacccgacatgaagacggaactgttttcaagttcatgtcccggtggcattatgttaaacgagactgggcagggttaccagcgatttctactgtacaatcgatccccacacccccccgagaaatgcgtggaagagttcaagagccttacaagctgcttagatagcaaggccttcctcttgacaccacgcaaccaaggcaagggactaaaaagccataagacggggctcggactgacaaaaagcagcggcgtgaccggctag

SEQ ID NO: 89901 - DNA, 351 bp, Artificial Sequence
  derived and/or modified sequence
atggcagcgggaagtgcacctatgcagctgcatctgcgagctacaatccgaatgaaagatggtctctgtgttccccggaaatggatttatcatctcacagaaggttcaactgacctacgaaccgagggtcgaccagatatgaaaacagaactgttctcatccagttgtcctggcgggattatgctcaacgagaccggacaggggtaccaaaggttcctcttgtataacagatccccacatccaccagaaaaatgcgttgaggagttcaaatcgctaactagctgtctcgattccaaagcctttctccttacaccaagaaaccaggaagcatgcgaactgtcaaataactag

SEQ ID NO: 89902 - DNA, 351 bp, Artificial Sequence
  derived and/or modified sequence
atggccgccggctctgcgcccatgcagcttcacctcagggccacaattagaatgaaagatggcttatgcgtgcccagaaaatggatctaccatcttactgaaggtagtaccgacctcagaacggaaggcagacccgatatgaagaccgaactattctccagctcttgccctggtggcattatgctgaacgagacagggcaaggctaccagaggtttctattgtacaacaggtcaccccacccacccgagaagtgtgttgaggaatttaagtctctgacatcatgtcttgattcaaaagcatttttgctcaccccacgcaaccaagaagcctgtgaactctctaacaactag

SEQ ID NO: 89903 - DNA, 390 bp, Artificial Sequence
  derived and/or modified sequence
atggctgccggaagcgcccctatgcagctccacctgagagctaccataagaatgaaagatggcttatgtgtccccagaaagtggatataccacttgacagagggctccactgacctgagaactgaaggacggccagacatgaagaccgaactattcagtagctcatgtccaggcggtatcatgctaaacgaaaccggccaggggtaccagagatttctgctttacaatcgaagcccccaccctccagagaagtgcgttgaagagtttaagagcctcacctcctgtctagattccaaggcttttttattgacgccacgaaaccaaggtaaaggactcaagtcacacaagactggactggggctaacaaagtcaagcggggttacgggatag

SEQ ID NO: 89904 - DNA, 390 bp, Artificial Sequence
  derived and/or modified sequence
atggccgcggggagcgcacctatgcagctacatctgagagcaacaatccgcatgaaagatgggctctgtgtcccaaggaaatggatttatcacctgaccgagggtagtactgatctccgtacagagggacgtcctgatatgaaaaccgaattattttctagctcatgccctggcggcattatgcttaacgagacaggccagggctatcaaaggttcttattgtataaccgcagcccccaccccccagaaaagtgtgtcgaagaatttaagtcgcttacgtcctgtctcgattctaaggctttcttattgacaccaaggaaccaaggtaaagggctgaaaagtcataagaccggcctcggactgacaaaatcaagcggcgtgactggatag

SEQ ID NO: 89905 - DNA, 390 bp, Artificial Sequence
  derived and/or modified sequence
atggctgcgggatctgctccaatgcaactccacctgcgcgcaacaatccggatgaaagacggactgtgtgtgccccgaaaatggatataccatctcaccgaaggtagtacagacctccgtacagaggggagaccagatatgaagactgaattattttcctcttcgtgccccggcggcataatgctcaacgaaacaggtcaagggtaccagagattcctgttgtacaacagaagcccacatccgccagaaaaatgtgtggaagaattcaagtccctcacatcctgcctcgattcaaaggcctttctgctgactccccgaaaccagggaaaaggcttaaaatcccataaaaccggattgggtttaacaaaatcgagtggcgtgaccgggtag

SEQ ID NO: 89906 - DNA, 351 bp, Artificial Sequence
  derived and/or modified sequence
atggcagctggctccgcaccgatgcagctacacttgcgggctaccattcgtatgaaggacgggttgtgcgtgccgcggaaatggatatatcacctgacagagggctcaacagatctgaggacggaaggcagaccggatatgaagaccgagctcttttccagcagctgcccaggaggaattatgctaaacgagacaggccagggctaccagagatttctgttgtacaataggtcaccccaccctcctgaaaaatgtgttgaagagtttaaatcgctgacatcctgcctggatagcaaggctttcctgttaacgcctagaaaccaagaagcctgtgagttatccaataattag

SEQ ID NO: 89907 - DNA, 390 bp, Artificial Sequence
  derived and/or modified sequence
atggccgccggctccgcacctatgcagttgcacctgcgggccaccattcgcatgaaagacgggctctgcgtgccccgaaagtggatttaccacttgacagaaggttccactgatctccggactgagggtagaccagatatgaaaactgagttgttcagctcttcttgccccgggggaatcatgctgaacgagaccggtcaaggctatcagagatttctgctttataatcgctcgccccatcctcctgaaaaatgcgtcgaagaatttaaatcacttacatcttgcctagattcaaaagctttccttctaacccctcgcaatcaagggaagggcttgaaatctcataaaacaggactaggccttacaaagtcctctggcgttaccggctag

SEQ ID NO: 89908 - DNA, 351 bp, Artificial Sequence
  derived and/or modified sequence
atggctgcaggctccgcccccatgcagttacacttacgagccacaataagaatgaaagatggtctctgtgtccctagaaagtggatctaccacctgaccgaaggcagtactgatcttcgaacggaaggaagaccagacatgaaaacagaattgtttagctctagctgcccaggaggaatcatgctcaacgagactggacaggggtatcagcgattccttctttataaccggtcgccccatccaccagagaagtgcgtcgaggagtttaaaagcctgacatcatgcttagacagtaaagcctttctgttgaccccccggaaccaagaagcgtgtgaactgtctaataactag

SEQ ID NO: 89909 - DNA, 390 bp, Artificial Sequence
  derived and/or modified sequence
atggccgccggatcagcaccaatgcaactgcacctgagggcgacaatacgcatgaaagacggcctgtgtgttccaaggaaatggatttatcacctgacagaggggagtaccgacctgaggacggagggaagaccggacatgaaaacagaattgttttcaagctcatgtcccggtggtatcatgctgaatgagacgggacaagggtatcaacgctttctcctgtacaaccgatcaccgcacccacctgagaaatgtgtggaggagtttaaatcactcacttcctgcctagattctaaagcttttttactgactccaagaaaccaagggaaaggattgaagagccacaaaactgggctgggcctcactaagtcatctggcgtcaccggctag

SEQ ID NO: 89910 - DNA, 390 bp, Artificial Sequence
  derived and/or modified sequence
atggccgccggcagcgcccccatgcagctgcacctgagagccaccatcagaatgaaggacggcctgtgcgtgcccagaaagtggatctaccacctgaccgagggcagcaccgacctgagaaccgagggcagacccgacatgaagaccgagctgttcagcagcagctgccccggcggcatcatgctgaacgagaccggccagggctaccagagattcctgctgtacaacagaagcccccacccccccgagaagtgcgtggaggagttcaagagcctgaccagctgcctggacagcaaggccttcctgctgacccccagaaaccagggcaagggcctgaagagccacaagaccggcctgggcctgaccaagagcagcggcgtgaccggctag

SEQ ID NO: 89911 - DNA, 351 bp, Artificial Sequence
  derived and/or modified sequence
atggccgccggcagcgcccccatgcagctgcacctgagagccaccatcagaatgaaggacggcctgtgcgtgcccagaaagtggatctaccacctgaccgagggcagcaccgacctgagaaccgagggcagacccgacatgaagaccgagctgttcagcagcagctgccccggcggcatcatgctgaacgagaccggccagggctaccagagattcctgctgtacaacagaagcccccacccccccgagaagtgcgtggaggagttcaagagcctgaccagctgcctggacagcaaggccttcctgctgacccccagaaaccaggaggcctgcgagctgagcaacaactag

SEQ ID NO: 89912 - DNA, 390 bp, Artificial Sequence
  derived and/or modified sequence
atggctgctggctctgcacccatgcagctacatctgagggctactatccgaatgaaagatggcctttgcgtcccccgcaaatggatctatcacctgacggagggctcgaccgacttacgaactgaaggcaggccagacatgaaaaccgaattgttcagttcctcctgtccaggcgggatcatgctcaatgaaaccggtcagggataccagcggtttttgctatacaatagaagtcctcacccccctgaaaaatgcgtggaggagttcaaatccctgacttcttgcctggattccaaagctttcttgttaacaccgagaaatcagggaaaaggcttgaagtctcacaaaactgggctcgggttgactaagagcagcggagtcacgggttag

SEQ ID NO: 89913 - DNA, 351 bp, Artificial Sequence
  derived and/or modified sequence
atggccgcaggctcggctccaatgcagctgcacctgagggccaccatccgtatgaaggacggactatgcgtacccaggaaatggatctatcacttgacagaagggtccaccgatctccggaccgagggccggccagatatgaaaactgagctcttctcctctagttgtccaggagggataatgttgaacgagaccggacagggctatcaacgctttttactgtataaccggagtccacaccctcctgagaaatgcgtggaggagtttaaatccctcacaagctgcctcgattctaaggcgtttctgctgactccccgcaatcaggaagcatgtgagctgtccaataattag

SEQ ID NO: 89914 - DNA, 351 bp, Artificial Sequence
  derived and/or modified sequence
atggcagctggatctgcacctatgcaactgcacttgcgcgccaccataaggatgaaggacggcctatgcgtccccaggaagtggatttaccatctcaccgaaggaagcactgatttgagaaccgagggcaggccagacatgaaaactgaactcttcagctccagttgccccgggggtatcatgctgaacgaaaccggacagggataccaaagattcttactgtataaccgctcccctcatccaccagagaagtgcgtcgaagagttcaagtctctgacttcctgtctggattccaaagcttttctgctgacgccccgcaatcaagaagcttgtgagctctctaataactag

SEQ ID NO: 89915 - DNA, 351 bp, Artificial Sequence
  derived and/or modified sequence
atggcagctggctccgctccaatgcaactgcacctgagagctaccatcaggatgaaagatgggctgtgtgtcccccgcaagtggatttaccatctcacagaggggagtaccgacctccggacggagggacgaccggacatgaagacagagctcttttccagctcatgtcctggcggcattatgctgaacgagaccggccaggggtatcagcggtttctgctctacaaccgcagcccacacccgccagagaaatgcgtggaagaatttaagtctctcacctcatgtctggatagcaaagccttccttcttactccacggaatcaggaggcctgcgaactgtcaaataactag

SEQ ID NO: 89916 - DNA, 390 bp, Artificial Sequence
  derived and/or modified sequence
atggctgcgggctctgcgccgatgcagctgcatctgcgtgctacaatccgtatgaaggacggcctgtgcgtgccacgtaaatggatctaccatctcaccgaagggtcgaccgaccttagaactgaaggtcgacccgacatgaaaacagaactgtttagttcctcatgtcccggtggtatcatgcttaacgagactggacaagggtatcagagattccttttatacaacagatcccctcatcccccagaaaaatgcgtcgaggaattcaaatcattaaccagttgcctagactctaaggcttttctgctgactccacggaaccagggcaaggggctaaagtcacacaaaacaggcttagggttgactaaatcctcaggagtgacgggctag

SEQ ID NO: 89917 - DNA, 351 bp, Artificial Sequence
  derived and/or modified sequence
atggccgctggatccgcgcccatgcaattgcatctgcgtgccaccatcagaatgaaggatggtctgtgtgtcccgaggaagtggatctaccacctgacagaaggctctacagatcttcgcacagagggccgtcctgatatgaagaccgaactgttctcgtcttcctgtcctggaggcattatgctcaatgaaacgggacagggttaccagcgatttctcctgtataataggagccctcaccctccagaaaaatgcgtggaggagttcaagagtctgacttcctgcttggattccaaagcatttctcttaacaccccgcaatcaggaggcgtgcgaactttctaataattag

SEQ ID NO: 89918 - DNA, 351 bp, Artificial Sequence
  derived and/or modified sequence
atggccgccggatctgcacctatgcaacttcaccttcgagctacaatacgaatgaaggacggcttatgcgtgcctcggaagtggatctaccaccttaccgagggctcaacagacttgcggaccgaaggacggccagacatgaaaacagagctctttagctccagctgccctggcgggatcatgctgaacgagactgggcagggataccaaagatttcttctgtataaccgctctcctcacccgcctgagaaatgcgttgaggagttcaagtcactcacctcctgtctcgactctaaagccttcctgttgacaccacgcaaccaggaagcatgcgagctgtccaataattag

SEQ ID NO: 89919 - DNA, 390 bp, Artificial Sequence
  derived and/or modified sequence
atggcagccggatccgcccccatgcagcttcatctccgagctacgatccgaatgaaagatggactgtgtgtgccacggaagtggatctaccatctaaccgaggggagtacagacctcagaaccgaaggcaggcccgacatgaagaccgagctgttctcttctagctgtcccggcggtatcatgcttaatgaaaccggccagggttatcagagatttcttttgtacaaccgcagtccccatcctcctgagaaatgcgttgaggaattcaaatctctaacctcctgcctcgacagcaaagcctttcttctcacccctcggaatcagggaaagggactgaagtctcataaaaccggtctggggctgacaaaatcttccggggtgactggatag

SEQ ID NO: 89920 - DNA, 390 bp, Artificial Sequence
  derived and/or modified sequence
atggccgcaggcagcgcaccgatgcagcttcacctccgggccaccatccgtatgaaagatggcttgtgtgtacccagaaagtggatatatcacctcacagagggttcgacagacctgagaaccgagggacggcctgacatgaaaacggagctcttctcgtcctcttgccctggcggtatcatgctcaacgaaaccggtcagggctaccaacggttcttgctctacaacagaagcccccaccccccagagaagtgtgtagaggagttcaagtctttaactagttgcctggactcaaaggcttttctccttaccccgcggaatcaaggaaagggattaaagagtcataaaaccggacttgggctaacaaagtcgagcggcgttactggctag

SEQ ID NO: 89921 - DNA, 390 bp, Artificial Sequence
  derived and/or modified sequence
atggcggccggatcggctccgatgcagttgcatctcagggccaccatcaggatgaaagatggactctgcgtgcctcgaaagtggatctatcacttaaccgaaggctctaccgatttaagaacagagggaaggccggacatgaagactgagctcttctcctccagctgccccggaggcataatgctgaatgaaaccggccaggggtatcagcggtttctgctgtataataggtctccacacccacctgagaaatgtgttgaggagtttaaatctctgactagttgtctggactccaaggcctttctgctgaccccccgcaaccagggtaaaggcctgaaatcacacaagacaggattgggcctgacgaaaagctctggggtgacagggtag

SEQ ID NO: 89922 - DNA, 351 bp, Artificial Sequence
  derived and/or modified sequence
atggctgccggtagtgcacctatgcaactgcatcttagagcaaccatccgaatgaaagacggcctgtgcgtaccccggaagtggatctatcacctaaccgaagggagtactgaccttcgcacagaagggcggcccgacatgaaaacggagctgttctcctcctcatgcccggggggcatcatgctgaatgaaacaggacagggctaccagcggttcctgctctataatcggtcaccccaccctccagagaaatgtgtggaggagtttaagtccctgacctcttgtttagattccaaagctttcctcctgacaccacgaaaccaggaagcttgtgagctgtccaataattag

SEQ ID NO: 89923 - DNA, 390 bp, Artificial Sequence
  derived and/or modified sequence
atggcagcaggctctgcaccgatgcaactccatctcagggcaaccattcggatgaaggacgggctgtgtgtgcccaggaaatggatctatcatctaaccgagggtagcactgacctaaggaccgaaggccgccctgacatgaaaacagagttgtttagttcttcatgccctggtgggatcatgctgaatgaaactggccagggataccaaagattcttactgtacaaccggtccccacaccctcctgaaaagtgcgtggaagagttcaagtctctcaccagctgtcttgattcgaaggcctttttattgacgcccaggaatcaggggaaggggctcaaaagccataagacaggactcgggctcaccaaatcttcaggggtgacaggatag

SEQ ID NO: 89924 - DNA, 351 bp, Artificial Sequence
  derived and/or modified sequence
atggctgctggctccgctccgatgcagctccacttacgcgcgaccatcaggatgaaggatggtctttgtgtgccccgcaagtggatatatcatcttacagaggggagcactgacctcaggaccgaaggtcggcccgacatgaaaaccgaacttttctcgtctagttgccccggtggcataatgcttaatgaaaccgggcagggctaccaacggttcctgctgtacaatcgttctcctcaccccccggagaagtgcgtggaggagtttaaaagtctcacatcctgtctggattccaaggcatttctgcttaccccaaggaaccaggaggcatgtgagttgtccaataactag

SEQ ID NO: 89925 - DNA, 390 bp, Artificial Sequence
  derived and/or modified sequence
atggcggccggaagtgcaccaatgcagctccaccttcgggccactataaggatgaaggacgggctgtgtgtaccccgtaagtggatttaccatttaaccgaggggtcaaccgaccttaggacagagggtcggcctgacatgaagacagagctgttctcctcatcatgccctgggggcattatgctcaatgagaccggtcaagggtaccagcggttcctcttgtacaatcgcagccctcacccccccgaaaagtgtgtggaggagtttaagagtcttacatcatgtctggacagtaaagcctttttgctgacaccaaggaaccaaggaaaaggactcaagtcccataagacagggctcggcctaacaaaaagctcgggcgttaccggatag

SEQ ID NO: 89926 - DNA, 390 bp, Artificial Sequence
  derived and/or modified sequence
atggctgctggcagcgcccccatgcagctgcacctgcgggccaccatccgcatgaaggatggcctgtgtgtgcccaggaagtggatctaccacctgacagagggcagcacagacctgaggacagagggccgcccagacatgaagacagagctgttcagcagcagctgccctgggggcatcatgctgaatgaaacaggccagggctaccagcgcttcctgctgtacaacagaagcccccaccccccagagaagtgtgtggaggagttcaagagcctgaccagctgcctggacagcaaggccttcctgctgacccccaggaaccagggcaagggcctgaagagccacaagacaggcctgggcctgaccaagagcagtggagtgactggatag

SEQ ID NO: 89927 - DNA, 351 bp, Artificial Sequence
  derived and/or modified sequence
atggctgctggcagcgcccccatgcagctgcacctgcgggccaccatccgcatgaaggatggcctgtgtgtgcccaggaagtggatctaccacctgacagagggcagcacagacctgaggacagagggccgcccagacatgaagacagagctgttcagcagcagctgccctgggggcatcatgctgaatgaaacaggccagggctaccagcgcttcctgctgtacaacagaagcccccaccccccagagaagtgtgtggaggagttcaagagcctgaccagctgcctggacagcaaggccttcctgctgacccccaggaaccaggaggcctgtgagctgagcaacaactag

SEQ ID NO: 89928 - DNA, 390 bp, Artificial Sequence
  derived and/or modified sequence
atggccgccggcagcgcccccatgcagctgcacctgcgggccaccataaggatgaaagacggattatgtgtcccacgtaagtggatatatcacctgactgagggatctactgatttacggacggaaggacgacccgatatgaaaaccgaacttttctcgtctagctgtccaggggggatcatgctgaatgagactggtcaggggtaccagaggtttttactgtacaacagaagtccacaccctccagagaagtgtgttgaggaatttaaaagtttgacgagctgtttagattccaaagccttccttctgacgccaaggaaccagggtaaagggctgaagtcacacaagacagggctgggactgacaaagagtagcggagtgaccggctag

SEQ ID NO: 89929 - DNA, 351 bp, Artificial Sequence
  derived and/or modified sequence
atggccgccggcagcgcccccatgcagctgcacctgcgggccaccattagaatgaaggatggactctgtgtgccgcggaaatggatttatcatttgacagaaggatccacggacctccggaccgagggtagacctgatatgaaaactgaattatttagctcctcttgtcctggaggcattatgttaaatgaaacaggacaaggctatcagaggtttctcctgtataacaggtcccctcatcctccggagaagtgcgtggaagaatttaagagtttgacatcctgtctggattccaaagcatttttgctaaccccccggaaccaagaagcctgtgaattgtctaataattag

SEQ ID NO: 89930 - DNA, 351 bp, Artificial Sequence
  derived and/or modified sequence
atggccgccggcagcgcccccatgcagctgcacctgcgggccaccattcgcatgaaggacggtctgtgtgtccccagaaagtggatataccaccttacagaaggctccaccgatcttaggaccgagggcagacctgacatgaagactgagctgtttagttcctcctgccccgggggtatcatgcttaatgagacgggacagggctaccaacgctttttactctataatagatccccacatccaccggaaaaatgtgttgaggagtttaaatctctgacctcttgcctagattctaaagcatttctcttgacaccccggaatcaggaagcttgtgaactttccaataactag

SEQ ID NO: 89931 - DNA, 351 bp, Artificial Sequence
  derived and/or modified sequence
atggccgccggcagcgcccccatgcagctgcacctgcgggccaccatccgcatgaaggatgggctgtgtgtgcctcgcaaatggatctatcacctgaccgagggctctactgatctgcgaacggaaggtcggccagacatgaagactgagctgttttcatcctcgtgccctggtggaatcatgctgaacgaaaccggccaagggtaccagcgcttcctcctatacaatcgctcaccacacccccccgagaaatgtgtggaagagtttaaatccctgaccagttgtttagactccaaagccttcttgcttacgccccgcaaccaggaggcctgtgagttgtcaaataattag

SEQ ID NO: 89932 - DNA, 390 bp, Artificial Sequence
  derived and/or modified sequence
atggccgccggcagcgcccccatgcagctgcacctgcgggccaccatccgcatgaaggatggactgtgcgttccaaggaagtggatttatcacttaacagaggggtccacagatttacgtactgaagggaggcccgatatgaagactgaattattttcttctagttgtcctggagggataatgttgaacgagaccggccagggttaccagcgattcctgctgtacaatcggtctccccacccaccggaaaaatgcgtggaggaattcaagtcattgacatcttgtctcgattcgaaagcttttttgctgacaccgcggaaccagggaaaaggactcaagtcccacaagacaggccttgggctcacaaaaagctcgggagtgacagggtag

SEQ ID NO: 89933 - DNA, 351 bp, Artificial Sequence
  derived and/or modified sequence
atggccgccggcagcgcccccatgcagctgcacctgcgggccaccatcagaatgaaagacggactgtgcgtgcctcgcaagtggatttaccacctcactgagggctcaacagatctgcgcacagaaggtcgtcccgatatgaagactgaactcttctcatcctcttgccctgggggtataatgctgaacgaaacaggtcagggttaccagcgatttctgctctacaacagatcacctcacccacccgagaagtgcgtggaggagttcaaaagtctgacttcatgtctagactcgaaggccttcctccttaccccaagaaaccaggaggcgtgtgagctgtcaaacaattag

SEQ ID NO: 89934 - DNA, 351 bp, Artificial Sequence
  derived and/or modified sequence
atggccgccggcagcgcccccatgcagctgcacctgcgggccaccatccgcatgaaagacggtttatgcgtccctcgcaagtggatctatcatctcacagaaggatctacagatttgcgcaccgaagggaggcccgacatgaagaccgaactgtttagctcttcttgtcctggagggattatgctgaatgagacagggcaggggtaccaacgctttctgctatataaccggtctccccacccgcctgaaaagtgtgtcgaggaatttaagagcttgacatcttgcctggacagcaaggccttcttattgactcctagaaaccaagaagcatgtgaactgtcaaataactag

SEQ ID NO: 89935 - DNA, 390 bp, Artificial Sequence
  derived and/or modified sequence
atggccgccggcagcgcccccatgcagctgcacctgcgggccaccattagaatgaaggacggtctgtgcgtgccccgtaaatggatataccacttgacggagggctccacagatctgcggacggagggacggcccgacatgaagacagagttgttcagcagcagctgtcctggcgggattatgctgaatgaaaccggtcaaggatatcagcgattcttactgtacaatcggtctccacacccacctgagaaatgtgtggaggaattcaaaagcctaaccagttgcttggattcgaaggccttcctgctgacccctcggaatcagggaaagggcttaaagagccataagacagggctcggcctgacgaaatcttccggcgtgactggttag

SEQ ID NO: 89936 - DNA, 390 bp, Artificial Sequence
  derived and/or modified sequence
atggccgccggcagcgcccccatgcagctgcacctgcgggccaccattaggatgaaggatggcctatgtgtcccacgcaagtggatctatcacttgaccgaaggatcaacggacctcagaaccgaaggtagacccgacatgaagaccgaattgttcagcagttcttgccccggaggcatcatgctaaatgagacaggacaggggtatcagcgcttcctgctctataacaggtctccacatcctcctgaaaaatgcgtcgaggagttcaaatctctgacgtcatgcctcgactccaaagctttcctcctgactcccaggaatcaggggaagggacttaagtcacacaagacaggcctggggctcacaaagtctagtggagtaacaggttag

SEQ ID NO: 89937 - DNA, 390 bp, Artificial Sequence
  derived and/or modified sequence
atggccgccggcagcgcccccatgcagctgcacctgcgggccaccattagaatgaaagacggcctctgcgtgccacgcaaatggatttatcacctgaccgagggatcaaccgacctgcgaacagagggaagacctgatatgaagaccgagttattctcatcttcctgtccaggcggaataatgctgaatgaaactgggcaaggctaccaaagatttctgctatataataggtcaccacatccaccagagaagtgcgttgaggaatttaagtcgctgacaagctgcttggacagtaaggccttcctgctcacccctagaaaccagggaaagggtctcaaaagccacaagaccggcctaggccttaccaaaagcagtggtgttacgggatag

SEQ ID NO: 89938 - DNA, 351 bp, Artificial Sequence
  derived and/or modified sequence
atggccgccggcagcgcccccatgcagctgcacctgcgggccaccatccggatgaaagatggcctctgcgtcccaagaaaatggatttatcatctgaccgaaggctctaccgacttgcgcacagaaggcaggcccgatatgaagacagaactattctcgagctcatgtcccggcgggattatgttgaacgaaaccggacagggataccagcggttcctactgtataatagaagccctcaccctcccgagaagtgcgttgaagagtttaagtctctgacgtcctgtctcgatagcaaagccttcctacttactccccggaatcaggaagcatgcgagctgagcaacaactag

SEQ ID NO: 89939 - DNA, 390 bp, Artificial Sequence
  derived and/or modified sequence
atggccgccggcagcgcccccatgcagctgcacctgcgggccaccattcggatgaaggacggactgtgcgtcccacgaaagtggatttatcatttgactgagggctctacagatctgcgtacagagggacgtccagacatgaagaccgagcttttctcatcttcctgccctgggggcattatgcttaacgagacgggacagggttaccagcgctttctcctgtacaaccggagcccacaccccccggaaaaatgtgtggaggaattcaaatctcttacgtcctgcctggatagcaaggccttccttctaactcctcggaatcagggaaagggattaaagagtcacaagactggcttgggcctcacaaagagctcaggggtgaccggttag

SEQ ID NO: 89940 - DNA, 351 bp, Artificial Sequence
  derived and/or modified sequence
atggccgccggcagcgcccccatgcagctgcacctgcgggccaccatccgaatgaaagacggactgtgtgtgccacggaagtggatctaccacctgaccgaagggagtacagacctaaggaccgaggggagaccagacatgaagaccgagctcttctctagttcttgcccgggggggattatgctgaatgaaaccggacagggttaccagaggtttctcctgtacaacagatcaccacatccacccgaaaaatgtgtagaagaattcaaatccctgactagttgcctcgatagcaaggcattcttgctaacaccacgcaaccaggaggcgtgcgagctcagtaataattag

SEQ ID NO: 89941 - DNA, 390 bp, Artificial Sequence
  derived and/or modified sequence
atggccgccggcagcgcccccatgcagctgcacctgcgggccaccatccgaatgaaggacggcctctgcgttcctaggaagtggatctatcatctgactgagggtagtaccgatctccgtacggaggggaggcccgacatgaaaacagaactgtttagcagctcgtgccctggaggaatcatgctgaatgaaacggggcagggataccaacgattcctattgtataatcggtctcctcacccaccagaaaaatgtgttgaagaatttaaaagcctgacaagctgtttggacagcaaagccttcctactaacacctcggaaccagggaaaggggctgaaatcccataagacaggactcggactgacaaaatcaagcggggttactgggtag

SEQ ID NO: 89942 - RNA, 390 nt, Artificial Sequence
  derived and/or modified sequence
auggcagcugggucugccccuaugcagcuccaucugcgcgccacuaucaggaugaaggacggacugugugugccaagaaaauggauauaccaucucacagaaggcucaacggaucuacgcaccgaaggacguccagacaugaaaaccgaacuuuuuagcaguagcugcccuggagggauuaugcucaaugagacaggccagggguaucagcgauucuuauuauacaacagaucaccccauccaccugaaaagugcgucgaagaauucaaaagccugacuucuugucuugauucuaaggcuuuucucuuaacuccaagaaaccaggggaaaggacuuaaaucucauaagaccggucugggguugacaaagucgagcggcgugaccggcuag

SEQ ID NO: 89943 - RNA, 351 nt, Artificial Sequence
  derived and/or modified sequence
auggcugccggauccgcaccaaugcaacuacacuugcgcgcuacaauucggaugaaagacggucuuugcgugccuagaaaauggaucuaccaucucacagagggaaguaccgauuuacgaacagaaggccgaccugacaugaagaccgaacuauuuuccucaucaugccccggagggauuaugcuaaaugagaccggucagggcuaccagcgcuuccuccuguauaaccgcucuccucacccuccugaaaagugcguagaggaauuuaagucccucacaucuugccucgauagcaaggcuuuucuucugacaccucgaaaccaagaagcaugugagcuguccaauaauuag

SEQ ID NO: 89944 - RNA, 351 nt, Artificial Sequence
  derived and/or modified sequence
auggcugcuggaagugccccaaugcaacuacaucugagagcgacgauccgaaugaaagacggccucuguguuccacgcaaauggauuuaccaccugacugaagggaguaccgacuugcgaaccgaggggagaccugauaugaagacggaauuauuuuccagcucaugccccggagggauaauguugaaugagaccggacagggguaucagagauuuuuguuauauaaucggaguccucaccccccagagaagugcguggaggaguucaagagccuuacuucuugccuggacucaaaagccuuccuucucacaccuagaaaccaagaagcgugugaacucucuaauaacuag

SEQ ID NO: 89945 - RNA, 351 nt, Artificial Sequence
  derived and/or modified sequence
auggccgcuggauccgccccaaugcagcugcaucuccgcgcuaccaucaggaugaaggacggucucugugugccuagaaaguggauuuaccaccucacagagggaagcaccgauuugaggacagaggguaggcccgauaugaaaacugagcucuuuuccucaagcugcccuggggguauuaugcugaacgaaacuggacaggguuaucaaagguuccugcuguacaacagaucuccacacccaccugaaaaaugcguagaggaguucaaauccuuaaccuccugcuuggauagcaaagcuuuuuuacugacaccaaggaaucaagaggcuugcgaacuguccaacaauuag

SEQ ID NO: 89946 - RNA, 390 nt, Artificial Sequence
  derived and/or modified sequence
auggcagccggaucugccccuaugcaacugcaccuuagagccacaaucaggaugaaagacggauuaugcgucccccgaaaauggaucuaucaccucaccgaaggaagcaccgaccuuagaacugaggggagacccgacaugaagacggaacuguuuucaaguucaugucccgguggcauuauguuaaacgagacugggcaggguuaccagcgauuucuacuguacaaucgauccccacacccccccgagaaaugcguggaagaguucaagagccuuacaagcugcuuagauagcaaggccuuccuucuuaccccccgaaaccaggguaagggucugaagucucacaagacuggauugggccuuaccaaaucaagcgggguuaccggcuag

SEQ ID NO: 89947 - RNA, 351 nt, Artificial Sequence
  derived and/or modified sequence
auggcagcgggaagugcaccuaugcagcugcaucugcgagcuacaauccgaaugaaagauggucucuguguuccccggaaauggauuuaucaucucacagaagguucaacugaccuacgaaccgagggucgaccagauaugaaaacagaacuguucucauccaguuguccuggcgggauuaugcucaacgagaccggacagggguaccaaagguuccucuuguauaacagauccccacauccaccagaaaaaugcguugaggaguucaaaucgcuaacuagcugucucgauuccaaagccuuccugcuaaccccccguaaccaggaggccugcgagcugucaaacaacuag

SEQ ID NO: 89948 - RNA, 351 nt, Artificial Sequence
  derived and/or modified sequence
auggccgccgguagcgcaccaaugcaauuacaccugagagccacaaucaggaugaaagacggguuaugugugcccagaaaguggauuuaucaccuaacagaggguaguaccgaccuaaggacugagggaagaccugauaugaaaacggaauuauuuuccucgaguugucccgguggaauuaugcuaaacgagacagggcagggauaucaacgauuucugcucuacaauaggagcccccacccucccgagaaguguguggaagaguuuaaaucccugacuagcugccuggacucgaaggcuuuccugcuuacacccaggaaccaagaagccugugagcuuaguaauaauuag

SEQ ID NO: 89949 - RNA, 390 nt, Artificial Sequence
  derived and/or modified sequence
auggcagcgggcagcgccccaaugcagcuccaucugagggcuacaauucggaugaaagauggacuaugcgucccuagaaaauggaucuaccaucugacagagggaagcacagaccugagaaccgaaggcagaccagacaugaaaacagaacuuuuuaguucuucuugucccgggggcauaaugcugaacgaaacaggacaaggauaucagcgguuccugcucuacaauagauccccacaucccccugagaagugcgucgaagaauucaaguccuugacuucaugccuggacaguaaagcuuuccugcuuacaccacgaaaccaaggaaagggucucaaaucucacaaaacagggcuaggacucaccaagucaucuggcgugacggguuag

SEQ ID NO: 89950 - RNA, 390 nt, Artificial Sequence
  derived and/or modified sequence
auggccgcugguagcgcaccaaugcaacuccaccucagagccacuauaaggaugaaggacggacugugugugccucgaaaauggauuuaccauuugacugaggguucaacggauuuacgaaccgaggguagaccugauaugaagaccgaauuguuuagcucgaguugccccggcggcauaaugcuuaacgaaaccgggcaaggauaccaacgcuuccugcucuauaaccgcuccccacacccuccugaaaaaugugucgaggaauucaaguccuugaccucuugccuugacucaaaggccuuccuauugacaccaagaaaccagggaaaggggcugaagagccacaagaccggacuugggcugacaaagucgucaggcguaacgggcuag

SEQ ID NO: 89951 - RNA, 390 nt, Artificial Sequence
  derived and/or modified sequence
auggcugcugguucagcgcccaugcagcugcauuuacgagccacuauucgcaugaaggauggacuuuguguuccaaggaaauggaucuaucaccugaccgaaggcaguaccgaucugcgcacugagggccguccagauaugaaaacagagcuguucucgagcucgugcccaggcgggaucaugcucaacgaaacaggacagggguaucagcgcuuccugcucuauaaucgcagcccgcaccccccggagaaguguguggaagaauucaaaucuuuaaccagcugucuagauaguaaggcauuccuccugacaccuaggaaccaaggaaaaggacugaaaucucauaagacugggcuggggcugaccaagucgaguggcgugacagguuag

SEQ ID NO: 89952 - RNA, 351 nt, Artificial Sequence
  derived and/or modified sequence
auggcagcuggcuccgcaccgaugcagcuacacuugcgggcuaccauucguaugaaggacggguugugcgugccgcggaaauggauauaucaccugacagagggcucaacagaucugaggacggaaggcagaccggauaugaagaccgagcucuuuuccagcagcugcccaggaggaauuaugcuaaacgagacaggccagggcuaccagagauuucuguuguacaauaggucaccccacccuccugaaaaauguguugaagaguuuaaaucgcugacauccugccuggauagcaaggcuuuucugcucacuccacgcaaccaggaagcaugugagcugaguaacaacuag

SEQ ID NO: 89953 - RNA, 390 nt, Artificial Sequence
  derived and/or modified sequence
auggccgccgguagugcacccaugcaacuccaccugcgagcaaccauucggaugaaggacggacucugugugccccggaaauggauuuaccauuugacagaaggguccacugaucuuaggacugagggccgaccagauaugaaaacggagcuguuuagcuccaguugcccaggaggcaucaugcucaaugaaaccggccagggauaucaaagauuccuguuguauaaucggucaccccacccacccgaaaagugugucgaagaguucaagagucucacaucaugucuugauaguaaggcguuucugcugacuccacguaaucaagggaaaggcuuaaagucucacaaaaccggauuggggcuuacgaaauccucuggagugacaggguag

SEQ ID NO: 89954 - RNA, 351 nt, Artificial Sequence
  derived and/or modified sequence
auggcagcuggauccgccccaaugcagcuacacuugcgcgccacaauaagaaugaaagacgggcuguguguaccccggaaguggauuuaccaccucacagaggguucaaccgaccugaggacugaaggccgaccagacaugaagaccgagcuguuuuccucuucuugucccgggggcaucaugcucaacgagacuggacagggcuaccagcgauuccugcuguauaauaggaguccacauccaccagagaagugcguggaagaauuuaaaucccuuaccucuugccuggacagcaaggccuuuuuauuaaccccacgcaaccaggaagcuugcgaauugucuaacaacuag

SEQ ID NO: 89955 - RNA, 390 nt, Artificial Sequence
  derived and/or modified sequence
auggccgcuggaucagcccccaugcagcugcaucuuagagcuaccauaagaaugaaggauggguuaugcgugccuagaaaauggauauaucacuuaacugaggguuccaccgaccugcgcacugagggcagaccagacaugaaaacugaacuguuuucuuccucgugcccagggggcauuauguugaaugaaacuggacagggcuaccagagguuucuucucuauaauagguccccccacccgccugagaaauguguggaagaauuuaaaagccuuacaucaugccuggauagcaaagcauuucuucucacgccacgaaaucaggguaaaggacugaaaucacauaaaacaggccuuggccucacuaaauccucaggagugaccggguag

SEQ ID NO: 89956 - RNA, 390 nt, Artificial Sequence
  derived and/or modified sequence
auggcugccggauccgcacccaugcaguugcacuuacgggcuacuauuagaaugaaagacggccuuugugucccgagaaaguggaucuaucauuugacugaggggucuacagaucucagaacagaagggagaccagauaugaagacggaacuauucuccaguucuuguccaggcggaauuaugcugaaugagaccggacaaggguaccaacgauucuuacuguacaacaggucaccgcaccccccggaaaaaugcguagaagaguucaagucauugacuucgugccuggauuccaaagcuuucuuacugacaccaagaaaccagggcaaggggcuuaagucacacaagaccggacucggguuaacaaagagcucaggcgugaccggauag

SEQ ID NO: 89957 - RNA, 351 nt, Artificial Sequence
  derived and/or modified sequence
auggcugccggauccgcaccaaugcaacuacacuugcgcgcuacaauucggaugaaagacggucuuugcgugccuagaaaauggaucuaccaucucacagagggaaguaccgauuuacgaacagaaggccgaccugacaugaagaccgaacuauuuuccucaucaugccccggagggauuaugcuaaaugagaccggucagggcuaccagcgcuuccuccuguauaaccgcucuccucacccuccugaaaagugcguagaggaauuuaagucccucacaucuugccucgauagcaaggcuuuucuucuaacaccccggaaucaggaagccugcgaacucucaaauaauuag

SEQ ID NO: 89958 - RNA, 351 nt, Artificial Sequence
  derived and/or modified sequence
auggcagcuggcuccgcgccuaugcaacuacauuugcgugccacaauucggaugaaagacgggcucugcguaccccgcaaauggauuuaucacuugacugagggcaguacugaucuaaggaccgaaggccgcccagauaugaagaccgaacuuuucuccaguagcuguccaggcggaauuaugcucaaugaaaccggacagggcuaccaacgguuucuguuguacaaccgcuccccucacccccccgaaaagugugucgaggaauucaagucucuuacuucaugccuugauuccaaagccuuucuacucaccccacggaaccaagaagcgugcgaacugucuaauaauuag

SEQ ID NO: 89959 - RNA, 390 nt, Artificial Sequence
  derived and/or modified sequence
auggcagccggaucugccccuaugcaacugcaccuuagagccacaaucaggaugaaagacggauuaugcgucccccgaaaauggaucuaucaccucaccgaaggaagcaccgaccuuagaacugaggggagacccgacaugaagacggaacuguuuucaaguucaugucccgguggcauuauguuaaacgagacugggcaggguuaccagcgauuucuacuguacaaucgauccccacacccccccgagaaaugcguggaagaguucaagagccuuacaagcugcuuagauagcaaggccuuccucuugacaccacgcaaccaaggcaagggacuaaaaagccauaagacggggcucggacugacaaaaagcagcggcgugaccggcuag

SEQ ID NO: 89960 - RNA, 351 nt, Artificial Sequence
  derived and/or modified sequence
auggcagcgggaagugcaccuaugcagcugcaucugcgagcuacaauccgaaugaaagauggucucuguguuccccggaaauggauuuaucaucucacagaagguucaacugaccuacgaaccgagggucgaccagauaugaaaacagaacuguucucauccaguuguccuggcgggauuaugcucaacgagaccggacagggguaccaaagguuccucuuguauaacagauccccacauccaccagaaaaaugcguugaggaguucaaaucgcuaacuagcugucucgauuccaaagccuuucuccuuacaccaagaaaccaggaagcaugcgaacugucaaauaacuag

SEQ ID NO: 89961 - RNA, 351 nt, Artificial Sequence
  derived and/or modified sequence
auggccgccggcucugcgcccaugcagcuucaccucagggccacaauuagaaugaaagauggcuuaugcgugcccagaaaauggaucuaccaucuuacugaagguaguaccgaccucagaacggaaggcagacccgauaugaagaccgaacuauucuccagcucuugcccugguggcauuaugcugaacgagacagggcaaggcuaccagagguuucuauuguacaacaggucaccccacccacccgagaaguguguugaggaauuuaagucucugacaucaugucuugauucaaaagcauuuuugcucaccccacgcaaccaagaagccugugaacucucuaacaacuag

SEQ ID NO: 89962 - RNA, 390 nt, Artificial Sequence
  derived and/or modified sequence
auggcugccggaagcgccccuaugcagcuccaccugagagcuaccauaagaaugaaagauggcuuauguguccccagaaaguggauauaccacuugacagagggcuccacugaccugagaacugaaggacggccagacaugaagaccgaacuauucaguagcucauguccaggcgguaucaugcuaaacgaaaccggccagggguaccagagauuucugcuuuacaaucgaagcccccacccuccagagaagugcguugaagaguuuaagagccucaccuccugucuagauuccaaggcuuuuuuauugacgccacgaaaccaagguaaaggacucaagucacacaagacuggacuggggcuaacaaagucaagcgggguuacgggauag

SEQ ID NO: 89963 - RNA, 390 nt, Artificial Sequence
  derived and/or modified sequence
auggccgcggggagcgcaccuaugcagcuacaucugagagcaacaauccgcaugaaagaugggcucugugucccaaggaaauggauuuaucaccugaccgaggguaguacugaucuccguacagagggacguccugauaugaaaaccgaauuauuuucuagcucaugcccuggcggcauuaugcuuaacgagacaggccagggcuaucaaagguucuuauuguauaaccgcagcccccaccccccagaaaagugugucgaagaauuuaagucgcuuacguccugucucgauucuaaggcuuucuuauugacaccaaggaaccaagguaaagggcugaaaagucauaagaccggccucggacugacaaaaucaagcggcgugacuggauag

SEQ ID NO: 89964 - RNA, 390 nt, Artificial Sequence
  derived and/or modified sequence
auggcugcgggaucugcuccaaugcaacuccaccugcgcgcaacaauccggaugaaagacggacugugugugccccgaaaauggauauaccaucucaccgaagguaguacagaccuccguacagaggggagaccagauaugaagacugaauuauuuuccucuucgugccccggcggcauaaugcucaacgaaacaggucaaggguaccagagauuccuguuguacaacagaagcccacauccgccagaaaaauguguggaagaauucaagucccucacauccugccucgauucaaaggccuuucugcugacuccccgaaaccagggaaaaggcuuaaaaucccauaaaaccggauuggguuuaacaaaaucgaguggcgugaccggguag

SEQ ID NO: 89965 - RNA, 351 nt, Artificial Sequence
  derived and/or modified sequence
auggcagcuggcuccgcaccgaugcagcuacacuugcgggcuaccauucguaugaaggacggguugugcgugccgcggaaauggauauaucaccugacagagggcucaacagaucugaggacggaaggcagaccggauaugaagaccgagcucuuuuccagcagcugcccaggaggaauuaugcuaaacgagacaggccagggcuaccagagauuucuguuguacaauaggucaccccacccuccugaaaaauguguugaagaguuuaaaucgcugacauccugccuggauagcaaggcuuuccuguuaacgccuagaaaccaagaagccugugaguuauccaauaauuag

SEQ ID NO: 89966 - RNA, 390 nt, Artificial Sequence
  derived and/or modified sequence
auggccgccggcuccgcaccuaugcaguugcaccugcgggccaccauucgcaugaaagacgggcucugcgugccccgaaaguggauuuaccacuugacagaagguuccacugaucuccggacugaggguagaccagauaugaaaacugaguuguucagcucuucuugccccgggggaaucaugcugaacgagaccggucaaggcuaucagagauuucugcuuuauaaucgcucgccccauccuccugaaaaaugcgucgaagaauuuaaaucacuuacaucuugccuagauucaaaagcuuuccuucuaaccccucgcaaucaagggaagggcuugaaaucucauaaaacaggacuaggccuuacaaaguccucuggcguuaccggcuag

SEQ ID NO: 89967 - RNA, 351 nt, Artificial Sequence
  derived and/or modified sequence
auggcugcaggcuccgcccccaugcaguuacacuuacgagccacaauaagaaugaaagauggucucugugucccuagaaaguggaucuaccaccugaccgaaggcaguacugaucuucgaacggaaggaagaccagacaugaaaacagaauuguuuagcucuagcugcccaggaggaaucaugcucaacgagacuggacagggguaucagcgauuccuucuuuauaaccggucgccccauccaccagagaagugcgucgaggaguuuaaaagccugacaucaugcuuagacaguaaagccuuucuguugaccccccggaaccaagaagcgugugaacugucuaauaacuag

SEQ ID NO: 89968 - RNA, 390 nt, Artificial Sequence
  derived and/or modified sequence
auggccgccggaucagcaccaaugcaacugcaccugagggcgacaauacgcaugaaagacggccuguguguuccaaggaaauggauuuaucaccugacagaggggaguaccgaccugaggacggagggaagaccggacaugaaaacagaauuguuuucaagcucaugucccggugguaucaugcugaaugagacgggacaaggguaucaacgcuuucuccuguacaaccgaucaccgcacccaccugagaaauguguggaggaguuuaaaucacucacuuccugccuagauucuaaagcuuuuuuacugacuccaagaaaccaagggaaaggauugaagagccacaaaacugggcugggccucacuaagucaucuggcgucaccggcuag

SEQ ID NO: 89969 - protein, 158 aa, Artificial Sequence
  derived and/or modified sequence
MSDTAVADTRRLNSKPQDLTDAYGPPSNFLEIDIFNPQTVGVGRARFTTYETNLPIFKLKESCVRRRYSDFEWLKNELERDSKIVVPPLPGKALKRQLPFRGDEGIFEESFIEERRQGLEQFINKIAGHPLAQNERCLHMFLQEEAIDRNYVPGKVRQ

SEQ ID NO: 89970 - DNA, 477 bp, Artificial Sequence
  derived and/or modified sequence
atgagcgacaccgccgtggccgacaccagaagactgaacagcaagccccaggacctgaccgacgcctacggcccccccagcaacttcctggagatcgacatcttcaacccccagaccgtgggcgtgggcagagccagattcaccacctacgagaccaacctgcccatcttcaagctgaaggagagctgcgtgagaagaagatacagcgacttcgagtggctgaagaacgagctggagagagacagcaagatcgtggtgccccccctgcccggcaaggccctgaagagacagctgcccttcagaggcgacgagggcatcttcgaggagagcttcatcgaggagagaagacagggcctggagcagttcatcaacaagatcgccggccaccccctggcccagaacgagagatgcctgcacatgttcctgcaggaggaggccatcgacagaaactacgtgcccggcaaggtgagacagtag

SEQ ID NO: 89971 - DNA, 477 bp, Artificial Sequence
  derived and/or modified sequence
atgagcgatacagccgttgccgacacccggcgattgaatagtaagcctcaggatttgacagacgcatacggccctccttccaatttcttagaaatagacatatttaatccccagacagtgggtgtcgggagggcacggttcaccacctatgaaacgaatctgcctattttcaagctcaaggagtcctgcgtccggcgtcggtacagcgattttgagtggcttaagaacgagttagaacgagatagtaagatagtggtgcccccgttaccaggcaaggcattgaaacgccagctcccctttagaggcgatgaggggatttttgaagagagtttcatcgaggaacggcgacagggcctcgaacagtttattaataagatcgcagggcatccattagcgcagaatgaacgttgcttgcacatgttcctgcaggaagaggcaattgatcgaaattacgttccagggaaagtgcgccaatag

SEQ ID NO: 89972 - DNA, 477 bp, Artificial Sequence
  derived and/or modified sequence
atgtctgacacagctgtggccgacacccggcggctgaacagcaagccccaggacctgacagatgcctacggcccccccagcaacttcctggagattgacatcttcaacccccagacagtgggcgtgggccgggcccgcttcaccacctatgagaccaacctgcccatcttcaagctgaaggagagctgtgtgagaagacgctacagcgactttgagtggctgaagaatgagctggagcgggacagcaagatcgtggtgccccccctgcccgggaaggccctgaagaggcagctgcccttcagaggagatgagggcatctttgaggagagcttcatcgaggagcggcggcagggcctggagcagttcatcaacaagattgctggccaccccctggcccagaatgaacgctgcctgcacatgttcctgcaggaggaggccatcgacagaaattatgtgcctgggaaggtgcggcagtag

SEQ ID NO: 89973 - DNA, 477 bp, Artificial Sequence
  derived and/or modified sequence
atgagcgacaccgccgtggccgacacccggcggctgaacagcaagccgcaggacctaaccgacgcgtacggacctccctccaattttctggagattgatattttcaacccccagacagtgggggttggacgcgctcgcttcactacttatgagaccaacttaccaatctttaagctgaaggagagctgcgtgcggaggcgatactctgactttgaatggctgaagaacgaattggagcgtgactcaaagatagtggtccctccgctgccaggtaaagctctgaaaagacagcttcccttccggggtgacgagggcatttttgaggaatctttcatcgaggagaggcggcaagggctcgagcaatttattaacaagatcgccggccacccactcgcccagaatgagcgctgtcttcacatgtttctgcaggaggaagctatcgaccggaactacgtgccaggaaaggtcaggcagtag

SEQ ID NO: 89974 - DNA, 477 bp, Artificial Sequence
  derived and/or modified sequence
atgtctgacaccgctgtggctgacaccaggcgactgaattctaagccgcaggatctgaccgacgcctatgggccaccctctaactttctggagatcgacatatttaacccccaaacggttggagtcggaagagctcgctttacgacatacgagacgaacctgcccatctttaagcttaaggagagctgcgtgcggagacggtattcagattttgaatggttaaagaatgagcttgaacgcgactccaagattgtcgttcctccactcccaggaaaggctctgaagcggcagttaccatttagaggggacgaggggatcttcgaggagtctttcatagaagagagaaggcagggacttgagcaattcatcaacaagattgccggacatcctctggcccaaaatgagagatgcctgcatatgttcctccaagaggaagcaatcgatagaaactacgtgccaggaaaggtgagacaatag

SEQ ID NO: 89975 - DNA, 720 bp, Artificial Sequence
  derived and/or modified sequence
gctagttattttgcaagcgggaggggccgtgcgcgctcctgcctcaggcctctgtcccccaccccctttccccggtcccaggctctccttcggaaagatgtcggacacggcagtagctgatacccggcgccttaactcgaagccgcaggacctgaccgacgcttacgggccgccaagtaacttcctggagatcgacatctttaatcctcagacggtgggcgtgggacgcgcgcgcttcaccacctatgagacaaacctacctatcttcaagctaaaggagtcctgcgtacggcggcgctacagtgactttgagtggctgaaaaatgagctggagagagatagcaagattgtagtaccaccactgcctgggaaagccttgaagcggcagctccctttccgaggagatgaagggatctttgaggagtctttcatcgaagaaaggaggcagggcctcgagcagtttattaacaaaattgctgggcacccactggctcagaatgaacgctgcctacacatgttcctgcaagaggaggcaattgacaggaactacgtcccggggaaggtgcgccagtaggagcccctctcaccacctgccctctactttcctgctgaaatgacattggtttttacactaagcctctctctgtctttgatctgaagttggctgcccatctcctggcctgatagactgtctggcattgtgctccctggtacctgact

SEQ ID NO: 89976 - DNA, 561 bp, Artificial Sequence
  derived and/or modified sequence
atggagccccccagaggcccccccgccaacggcgccgagcccagcagagccgtgggcaccgtgaaggtgtacctgcccaacaagcagagaaccgtggtgaccgtgagagacggcatgagcgtgtacgacagcctggacaaggccctgaaggtgagaggcctgaaccaggactgctgcgtggtgtacagactgatcaagggcagaaagaccgtgaccgcctgggacaccgccatcgcccccctggacggcgaggagctgatcgtggaggtgctggaggacgtgcccctgaccatgcacaacttcgtgagaaagaccttcttcagcctggccttctgcgacttctgcctgaagttcctgttccacggcttcagatgccagacctgcggctacaagttccaccagcactgcagcagcaaggtgcccaccgtgtgcgtggacatgagcaccaacagacagcagttctaccacagcgtgcaggacctgagcggcggcagcagacagcacgaggcccccagcaacagacccctgaacgagctgctgaccccccagggccccagatag

SEQ ID NO: 89977 - DNA, 567 bp, Artificial Sequence
  derived and/or modified sequence
atggagcccccccgcggacctccagccaatggtgccgagccttcaagggccgtgggcaccgttaaagtttatctcccaaataaacagcggactgtggtgaccgtgagggacgggatgtctgtgtacgatagccttgataaggccctgaaggtgcggggcttgaaccaagactgttgtgtggtgtaccgactgataaagggaaggaaaacagtcacagcctgggataccgctatcgctccactcgacggagaagaactgattgtagaagtgctggaggacgtgcccctcaccatgcataacttcgtgcgcaagacctttttctcactggctttttgcgatttttgtctgaaattcttgttccatggctttcggtgccagacctgcggctataagttccatcaacattgctcatccaaggttcccactgtctgtgtcgacatgtctactaaccggcagcagttctaccacagtgtgcaggacttatcgggcggctcccggcaacatgaggcacccagcaataggcccctcaatgaactcctgacgccacagggtccgagttgtagatag

SEQ ID NO: 89978 - DNA, 561 bp, Artificial Sequence
  derived and/or modified sequence
atggagcccccccgaggaccaccagctaacggagctgagccaagcagggctgtgggcactgtcaaggtctaccttcctaacaagcagcgaacggtagtgactgtgcgcgatggcatgagtgtctacgactcccttgacaaagctctcaaggtgcgagggctgaatcaggactgttgcgtcgtctatcgtctgattaaaggtcgcaagaccgtaacagcttgggatactgctatcgctccgttagatggtgaggaattgatagtggaggtgctggaggacgtgcccctaaccatgcacaatttcgtaagaaaaacctttttcagcttggcattctgcgatttttgcctaaagttcctgttccacgggtttaggtgccagacatgcggctataagtttcaccaacactgcagtagcaaagtgccaacagtgtgcgtggacatgagtacaaaccgacagcaattctaccattcagtacaagatctcagcggcggcagcaggcagcatgaagccccaagcaacaggcctttgaatgaactgctcacaccccagggtccacgttag

SEQ ID NO: 89979 - DNA, 567 bp, Artificial Sequence
  derived and/or modified sequence
atggagcccccccggggccccccagccaacggggctgagcccagcagagctgtgggcaccgtgaaggtgtacctgcccaacaagcagaggacagtggtgacagtgagagatggcatgtctgtgtatgacagcctggacaaggccctgaaggtgcggggcctgaaccaggactgctgcgtggtgtaccgcctcatcaagggcaggaagacagtgacagcctgggacacagccatcgcccccctggatggagaggagctgattgtggaggtgctggaggatgtgcccctgaccatgcacaactttgtgaggaagaccttcttcagcctggccttctgtgacttctgcctgaagttcctgttccacggcttccgctgccagacctgtggctacaagttccaccagcactgcagcagcaaggtgcccaccgtgtgtgtggacatgagcaccaaccggcagcagttctaccacagcgtgcaggacctgagcggcggcagccggcagcacgaggcccccagcaaccggcccctgaatgagctgctgaccccccagggccccagctgcaggtag

SEQ ID NO: 89980 - DNA, 978 bp, Artificial Sequence
  derived and/or modified sequence
gagacggcggcggctgtagcggcgtgacaggagccccatggcacctgcccagccccacctcagcccatcttgacaaaatctaaggctccatggagccaccacggggcccccctgccaatggggccgagccatcccgggcagtgggcaccgtcaaagtatacctgcccaacaagcaacgcacggtggtgactgtccgggatggcatgagtgtctacgactctctagacaaggccctgaaggtgcggggtctaaatcaggactgctgtgtggtctaccgactcatcaagggacgaaagacggtcactgcctgggacacagccattgctcccctggatggcgaggagctcattgtcgaggtccttgaagatgtcccgctgaccatgcacaattttgtacggaagaccttcttcagcctggcgttctgtgacttctgccttaagtttctgttccatggcttccgttgccaaacctgtggctacaagttccaccagcattgttcctccaaggtccccacagtctgtgttgacatgagtaccaaccgccaacagttctaccacagtgtccaggatttgtccggaggctccagacagcatgaggctccctcgaaccgccccctgaatgagttgctaaccccccagggtcccaggtagggatgccttagctgaagagctgctgggggagaaaaagatcttggggctcttgtagaccacgagccatactttattcatttgtttacttgacaaacatttattgagcacctacaagtgtgagtaagggcatgaaactgggaccttgggcaagtcacctcatttctctgggcctcagttttctcatctgtaaagaggggatgatgatactttctaccatataaaggttctggtgaggcttaaatgagttaagacatgttcagtgcctagaacaggatctggtacagtgtaaataatcaatttttttgttattaattataaatatatttat

SEQ ID NO: 89981 - DNA, 561 bp, Artificial Sequence
  derived and/or modified sequence
atggagcccccccggggccccccagccaacggggctgagcccagcagagctgtgggcaccgtgaaggtgtacctgcccaacaagcagaggacagtggtgacagtgagagatggcatgtctgtgtatgacagcctggacaaggccctgaaggtgcggggcctgaaccaggactgctgcgtggtgtaccgcctcatcaagggcaggaagacagtgacagcctgggacacagccatcgcccccctggatggagaggagctgattgtggaggtgctggaggatgtgcccctgaccatgcacaactttgtgaggaagaccttcttcagcctggccttctgtgacttctgcctgaagttcctgttccacggcttccgctgccagacctgtggctacaagttccaccagcactgcagcagcaaggtgcccaccgtgtgtgtggacatgagcaccaaccggcagcagttctaccacagcgtgcaggacctgagcggcggcagccggcagcacgaggcccccagcaaccggcccctgaatgagctgctgaccccccagggccccaggtag

SEQ ID NO: 89982 - DNA, 567 bp, Artificial Sequence
  derived and/or modified sequence
atggagcccccccggggcccccccgccaacggcgccgagcccagcagagccgtaggtacagtgaaggtctatctgccaaataagcagcgcacagtggttacagtacgggacggaatgagcgtatatgactctttggataaggcccttaaagtacgaggactgaatcaagattgctgcgtggtttataggctgattaagggccggaagaccgtaacagcatgggacaccgcaatcgctcccctggacggcgaagagctcatcgttgaggtgctcgaagacgtgccgttgacgatgcacaacttcgtgcgaaaaacctttttcagtctggccttttgcgacttctgcctgaagttcctgtttcacggattcaggtgccagacctgcggctataagttccaccagcactgcagctctaaagttccaaccgtgtgtgttgatatgtcaacgaataggcagcagttctaccattccgttcaagacctgtccgggggcagccggcaacacgaggccccttcaaaccggcctcttaatgagctgctcactccacaagggccatcctgccggtag

SEQ ID NO: 89983 - DNA, 561 bp, Artificial Sequence
  derived and/or modified sequence
atggagcccccccggggcccccccgccaacggcgccgagcccagcagagccgtggggaccgtgaaggtatacctcccgaacaagcagcggacagtggtgacagtgcgagacggaatgtccgtgtatgactcactcgataaggccttgaaggtcagaggcctcaatcaggattgctgcgtcgtctatcgccttattaaagggcggaagaccgtcacagcttgggacaccgcaatcgcccccctggatggagaggaacttattgtggaggtactcgaagatgttcccctaacgatgcataacttcgtgagaaaaactttcttttcattagctttttgtgacttctgcctgaagtttctttttcatgggtttagatgccagacctgtggttacaagttccaccaacattgttcgagcaaagtccctaccgtctgtgttgatatgtctacaaatcgccagcagttctatcacagcgtccaggacctctctggagggagcagacaacacgaagcaccttccaatcgccccttaaatgagttgctaacaccccagggccccagatag

SEQ ID NO: 89984 - DNA, 567 bp, Artificial Sequence
  derived and/or modified sequence
atggaaccgcctaggggaccacctgcaaatggcgctgagcctagtcgtgccgtagggacagtgaaggtttacctaccaaataagcagcggaccgtggtgaccgtacgggatgggatgtctgtttacgactctttggacaaggccttgaaggtacgcggactcaatcaggactgttgcgtggtctaccggttgatcaagggacggaagacagtcaccgcctgggacaccgctattgcgcctctcgatggcgaggagttaatagttgaggtgctcgaggacgtgccactcacaatgcataacttcgtgcggaaaactttcttttccctcgccttttgcgatttttgcctgaaattcctttttcacggctttcggtgccagacgtgcggctacaagttccatcaacactgttcctccaaagtgcccacagtatgcgtggatatgtcaaccaacagacagcaattttatcactcggttcaggaccttagcggcggaagtagacagcatgaagccccttctaatcggcctctgaatgaactcctgacccctcagggaccgagttgcagatag

SEQ ID NO: 89985 - DNA, 561 bp, Artificial Sequence
  derived and/or modified sequence
atggaacctcctaggggacctccggctaacggcgcagagccaagcagggccgtcggcacagtgaaagtgtacctcccgaataagcaacgaaccgttgttactgtcagagatggcatgtccgtgtatgactccctggacaaggccctcaaagtgaggggactgaaccaggactgctgcgtggtttatcgcttaattaaagggaggaagactgtcactgcatgggataccgccatcgctccgttggacggagaagagctgattgtggaggtgctagaagatgtccccttgactatgcataatttcgtgaggaagaccttcttctctctggcattctgtgatttctgcctgaagtttctgttccacggattcaggtgccagacttgcggttataagttccaccagcactgttcttcaaaagtgccaactgtttgtgttgacatgtccacaaacaggcagcagttctatcacagcgttcaggacctgtccggtggttcccgccagcatgaggccccttccaataggcccctgaatgagctgctgactcctcaagggccaaggtag

SEQ ID NO: 89986 - DNA, 1161 bp, Artificial Sequence
  derived and/or modified sequence
gagaggcccaagatggagacggcggcggctgtagcggcgtgacaggagccccatggcacctgcccagccccacctcagcccatcttgacaaaatctaaggctccatggagccaccacggggcccccctgccaatggggccgagccatcccgggcagtgggcaccgtcaaagtatacctgcccaacaagcaacgcacggtggtgactgtccgggatggcatgagtgtctacgactctctagacaaggccctgaaggtgcggggtctaaatcaggactgctgtgtggtctaccgactcatcaagggacgaaagacggtcactgcctgggacacagccattgctcccctggatggcgaggagctcattgtcgaggtccttgaagatgtcccgctgaccatgcacaattttgtacggaagaccttcttcagcctggcgttctgtgacttctgccttaagtttctgttccatggcttccgttgccaaacctgtggctacaagttccaccagcattgttcctccaaggtccccacagtctgtgttgacatgagtaccaaccgccaacagttctaccacagtgtccaggatttgtccggaggctccagacagcatgaggctccctcgaaccgccccctgaatgagttgctaaccccccagggtcccagctgccggtagtagaggaggtagtgatggaaccccccgggggagccccagcccagccagcgtgtcctcggggaggaagtccccacattccaagtcaccagcagagcagcgcgagcggaagtccttggccgatgacaagaagaaagtgaagaacctggggtaccgggactcaggctattactgggaggtaccacccagtgaggtgcagctgctgaagaggatcgggacgggctcgtttggcaccgtgtttcgagggcggtggcatggcgatgtggccgtgaaggtgctcaaggtgtcccagcccacagctgagcaggcccaggctttcaagaatgagatgcaggtgctcaggaagacgcgacatgtcaacatcttgctgtttatgggcttcatgacccggccgggatttgccatcatcacacagtggtgtgagggctccagcctctaccatcacctgcatgtggccgacacacgcttcgacatggtccagctcatcgacgtg

SEQ ID NO: 89987 - DNA, 567 bp, Artificial Sequence
  derived and/or modified sequence
atggagccccccagaggcccccccgccaacggcgccgagcccagcagagccgtgggcaccgtgaaggtgtacctgcccaacaagcagagaaccgtggtgaccgtgagagacggcatgagcgtgtacgacagcctggacaaggccctgaaggtgagaggcctgaaccaggactgctgcgtggtgtacagactgatcaagggcagaaagaccgtgaccgcctgggacaccgccatcgcccccctggacggcgaggagctgatcgtggaggtgctggaggacgtgcccctgaccatgcacaacttcgtgagaaagaccttcttcagcctggccttctgcgacttctgcctgaagttcctgttccacggcttcagatgccagacctgcggctacaagttccaccagcactgcagcagcaaggtgcccaccgtgtgcgtggacatgagcaccaacagacagcagttctaccacagcgtgcaggacctgagcggcggcagcagacagcacgaggcccccagcaacagacccctgaacgagctgctgaccccccagggccccagctgcagatag

SEQ ID NO: 89988 - protein, 1024 aa, Artificial Sequence
  derived and/or modified sequence
MGGWEEERNRRATDKKDDKDSPKKNKGKERRDLDDLKKEVAMTEHKMSVEEVCRKYNTDCVQGLTHSKAQEILARDGPNALTPPPTTPEWVKFCRQLFGGFSILLWIGAILCFLAYGIQAGTEDDPSGDNLYLGIVLAAVVIITGCFSYYQEAKSSKIMESFKNMVPQQALVIREGEKMQVNAEEVVVGDLVEIKGGDRVPADLRIISAHGCKVDNSSLTGESEPQTRSPDCTHDNPLETRNITFFSTNCVEGTARGVVVATGDRTVMGRIATLASGLEVGKTPIAIEIEHFIQLITGVAVFLGVSFFILSLILGYTWLEAVIFLIGIIVANVPEGLLATVTVCLTLTAKRMARKNCLVKNLEAVETLGSTSTICSDKTGTLTQNRMTVAHMWFDNQIHEADTTEDQSGTSFDKSSHTWVALSHIAGLCNRAVFKGGQDNIPVLKRDVAGDASESALLKCIELSSGSVKLMRERNKKVAEIPFNSTNKYQLSIHETEDPNDNRYLLVMKGAPERILDRCSTILLQGKEQPLDEEMKEAFQNAYLELGGLGERVLGFCHYYLPEEQFPKGFAFDCDDVNFTTDNLCFVGLMSMIDPPRAAVPDAVGKCRSAGIKVIMVTGDHPITAKAIAKGVGIISEGNETVEDIAARLNIPVSQVNPRDAKACVIHGTDLKDFTSEQIDEILQNHTEIVFARTSPQQKLIIVEGCQRQGAIVAVTGDGVNDSPALKKADIGVAMGIAGSDVSKQAADMILLDDNFASIVTGVEEGRLIFDNLKKSIAYTLTSNIPEITPFLLFIMANIPLPLGTITILCIDLGTDMVPAISLAYEAAESDIMKRQPRNPRTDKLVNERLISMAYGQIGMIQALGGFFSYFVILAENGFLPGNLVGIRLNWDDRTVNDLEDSYGQQWTYEQRKVVEFTCHTAFFVSIVVVQWADLIICKTRRNSVFQQGMKNKILIFGLFEETALAAFLSYCPGMDVALRMYPLKPSWWFCAFPYSFLIFVYDEIRKLILRRNPGGWVEKETYY

SEQ ID NO: 89989 - DNA, 3075 bp, Artificial Sequence
  derived and/or modified sequence
atgggcggctgggaggaagagcgcaaccgccgagccaccgacaaaaaagatgataaggatagtccgaaaaaaaacaagggcaaggaacgcagggacttagacgacctgaagaaggaagttgccatgaccgaacataagatgtccgttgaagaggtttgtagaaagtataacacagactgcgtgcagggtctaacacattctaaagcccaagagatcctggcacgggacggtccaaatgcactgactcccccgcctaccacacctgagtgggtaaagttttgtaggcagctgtttggcggcttttcaatattgctctggattggcgcaatcctctgtttcctggcatacggcattcaggcaggcacagaggacgatccctcaggagataacctctacctcggcatcgtcctggcagctgttgtgataatcacaggctgctttagttattatcaggaggcgaaaagcagcaagatcatggagtcctttaagaacatggtcccccagcaggcactggtgattagagagggcgagaaaatgcaagtgaatgcagaggaggtggtggtgggggacttggtggaaatcaaggggggtgaccgagtccctgcagacctgagaattatttcagctcacggttgcaaagtcgacaacagctccctgaccggtgagtcagaaccacagacacgctccccggattgtacacacgataatccccttgaaacacgtaacatcacgttcttttctacaaattgcgtggaagggacagctcggggggttgtagtggctacaggcgatcggaccgtgatgggaaggattgctacccttgcctccggtctcgaagtgggtaaaacccccattgctattgagattgaacacttcatccagttgataacaggagtggccgtattcctaggcgtgtcattcttcatcctctcgttgatcttaggatacacatggttggaagctgttatttttctgatcgggatcattgtagcgaacgtgcccgaaggcttgttggctacagtgaccgtttgcctcaccctgactgccaaacgcatggcgcggaagaactgtctcgtgaagaacttggaggctgtggaaacccttggatctacatcaaccatctgttccgacaaaaccggaaccctgacccagaatagaatgaccgtcgctcacatgtggttcgacaatcaaattcacgaagctgataccacggaggatcagtcaggcacctcgttcgataaatccagtcatacttgggtggctttaagtcacattgcaggcctctgtaaccgcgccgtgttcaaaggcggccaagacaacattccagtcctgaaaagggacgtggccggagatgctagcgagtcagccttactgaaatgcatcgaactgagctccggttccgttaagctgatgagagaacggaataaaaaagtcgccgaaattccctttaatagcaccaataaatatcagctatctatccatgagactgaggaccctaatgacaatcgctacctgttggttatgaagggagcaccggagaggatcctggatcgttgcagtacgatactgttgcagggaaaggaacagccactcgatgaggaaatgaaagaagccttccaaaatgcatatcttgagctgggcggtctgggagagcgtgtgctcggattttgccattactatctgcccgaagagcagttccctaagggattcgcctttgactgtgatgatgttaattttacgactgataacctttgttttgttggtctgatgagcatgattgatccacctcgcgcggctgtgcccgatgccgtgggaaagtgtagaagcgccggaatcaaagttattatggtcacaggcgatcacccaatcaccgcaaaggctattgcaaagggggtcggtataatatccgagggcaacgagaccgttgaagacatcgccgctcgccttaacatccccgtgtctcaggtgaacccccgggacgctaaggcttgtgtaatccacggaacagatcttaaagactttacttcggagcaaattgatgaaattctacagaaccacactgagatagttttcgcccgtacttcaccacagcagaagcttattatcgtcgaaggatgccagaggcaaggagccatagttgccgtgactggtgacggcgtgaatgatagtccagctttgaaaaaggcggacataggcgtggccatgggtattgccggaagcgacgtttctaagcaggctgccgatatgattctactggatgacaatttcgcctctatcgtgaccggtgttgaggaaggccgactgatcttcgacaatctaaaaaaaagcattgcatacactctcacatccaacatcccggagattaccccgtttctcctctttatcatggcgaatattcctcttcccctcggtaccatcaccatcttatgtatcgacctcggtactgatatggttcccgctatctccctcgcttacgaagctgccgagtcagacatcatgaaaagacagcccaggaatccacgaaccgataagctggtgaatgagcggctcataagtatggcctatgggcagattggtatgatccaggcccttggtggctttttttcatatttcgtcatcctggctgaaaatggctttctccctggtaatctggtggggattcgcctgaactgggatgatagaaccgttaatgatctggaggattcttacgggcagcaatggacctatgaacagcgtaaagtagtcgaattcacatgccacacggcgttcttcgtgagcatagtcgtggttcagtgggcagatcttatcatatgcaagactcgccggaacagtgtgtttcaacagggtatgaaaaacaaaatcctgatttttgggctgttcgaagagactgcccttgccgcgtttctgtcatattgtccaggtatggatgttgctttgcggatgtatccattgaaaccctcctggtggttctgcgcattcccttacagcttcctcattttcgtttacgatgagatcaggaagttaatacttcgaagaaaccctggtgggtgggtcgaaaaagaaacctactattag

SEQ ID NO: 89990 - DNA, 3075 bp, Artificial Sequence
  derived and/or modified sequence
atgggcggctgggaggaggagaggaacagaagagccacagacaagaaggatgacaaggacagccccaagaagaacaagggcaaggagcggcgggacctggatgacctgaagaaggaggtggccatgacagagcacaagatgtctgtggaggaggtgtgcaggaagtacaacacagactgtgtgcagggcctgacccacagcaaggcccaggagatcctggccagagatggccccaatgccctgaccccaccacccaccaccccagagtgggtgaagttctgccggcagctgtttggaggcttcagcatcctgctgtggattggagccatcctgtgcttcctggcctacggcatccaggccggcacagaagatgaccccagcggggacaacctgtacctgggcatcgtgctggccgctgtggtgatcatcaccggctgcttctcctactaccaggaggccaagagcagcaagatcatggagagcttcaagaacatggtgccccagcaggccctggtgatccgggagggggagaagatgcaggtgaatgctgaggaggtggtggtgggggacctggtggagatcaagggcggggacagagtgcctgctgacctgcgcatcatcagcgcccacggctgcaaggtggacaacagcagcctgaccggggagagcgagccccagaccaggagcccagactgcacccatgacaaccccctggagaccaggaacatcaccttcttcagcaccaactgtgtggagggcacagcccggggcgtggtggtggccaccggggacagaacagtgatgggcagaattgccaccctggccagcggcctggaggtgggcaagacccccatcgccattgaaattgagcacttcatccagctgatcactggagtggccgtgttcctgggcgtgtccttcttcatcctgagcctcatcctgggctacacctggctggaggccgtcatcttcctgattggcatcatcgtggccaacgtgcctgagggcctgctggccaccgtgacagtgtgcctgaccctgacagccaagaggatggccaggaagaactgcctggtgaagaacctggaggccgtggagaccctgggcagcaccagcaccatctgcagcgacaagacaggcaccctgacccagaacaggatgacagtggcccacatgtggtttgacaaccagatccatgaagctgacaccacagaggaccagagcggcaccagctttgacaagagcagccacacctgggtggccctgagccacatcgccggcctgtgcaacagagctgtgttcaagggcggccaggacaacatccctgtgctgaagagagatgtggccggagatgccagcgagagcgccctgctgaagtgcatcgagctgagcagcggctctgtgaagctgatgagggagaggaacaagaaggtggccgagatccccttcaacagcaccaacaagtaccagctgagcatccacgagacagaggaccccaatgacaaccgctacctgctggtgatgaagggggcccctgagcgcatcctggaccgctgcagcaccatcctgctgcagggcaaggagcagcccctggatgaggagatgaaggaggccttccagaatgcctacctggagctgggcggcctgggggagcgggtgctgggcttctgccactactacctgcctgaggagcagttccccaagggctttgcctttgactgtgatgatgtgaacttcaccacagacaacctgtgctttgtgggcctgatgtccatgattgatcctcccagggctgctgtgcctgatgctgtgggcaagtgccgctctgctggcatcaaggtgatcatggtgactggagaccaccccatcacagccaaggccatcgccaagggcgtgggcatcatcagcgagggcaatgaaacagtggaggacattgctgcccggctgaacatccctgtgtcccaggtgaaccccagagatgccaaggcctgcgtcatccatggaacagacctgaaggacttcaccagcgagcagattgatgagatcctgcagaaccacacagaaattgtgtttgcccggaccagcccccagcagaagctgatcatcgtggagggctgccagaggcagggcgccatcgtggccgtgactggagatggagtgaatgacagccctgccctgaagaaggctgacattggagtggccatgggcattgctggcagtgatgtgtccaagcaggccgctgacatgatcctgctggatgacaactttgccagcatcgtgactggagtggaggagggccgcctcatctttgacaacctgaagaagagcatcgcctacaccctgaccagcaacatccctgagatcacccccttcctgctcttcatcatggccaacatccccctgcccctgggcaccatcaccatcctgtgcatcgacctgggcacagacatggtgcctgccatcagcctggcctatgaagctgctgagagtgacatcatgaagaggcagcccaggaaccccaggacagacaagctggtgaatgaaagactcatctccatggcctacggccagatcggcatgatccaggccctgggcggcttcttctcctactttgtgatcctggccgagaatggcttcctgcccggcaacctggtgggcatccggctgaactgggatgacagaacagtgaatgacctggaggacagctatggccagcagtggacctatgagcagaggaaggtggtggagttcacctgccacacagccttctttgtgtccatcgtggtggtgcagtgggccgacctgatcatctgcaagaccaggaggaacagcgtcttccagcagggcatgaagaacaagatcctgatcttcggcctgtttgaggagacagccctggccgccttcctgagctactgccccggcatggatgtggccctgaggatgtaccccctgaagcccagctggtggttctgtgccttcccctacagcttcctgatctttgtgtatgatgagatcaggaagctgatcctgcggaggaaccctgggggctgggtggagaaggagacctactactag

SEQ ID NO: 89991 - DNA, 3075 bp, Artificial Sequence
  derived and/or modified sequence
atgggcggctgggaggaggagcggaaccggcgggccaccgacaagaaggacgacaaagattcccccaaaaaaaataaaggaaaggagaggcgcgacttagacgacctcaaaaaggaggtggcaatgactgaacacaaaatgtcagtggaggaggtgtgcagaaagtataataccgactgcgtccaagggttaacccactcaaaagcacaggaaatcttggcccgtgatgggccaaacgcactcaccccccccccaacaacacccgagtgggtgaaattctgccgccaactgtttggtggcttctctatattgctgtggataggtgccatactctgtttcttagcttacggaatccaggcggggaccgaggacgatccatctggcgataatctttaccttggcatagtgttagccgcggtggtgatcataacagggtgtttctcttattatcaggaagccaagagttccaagattatggaatcctttaagaacatggttcctcagcaggccctcgtgattagagaaggcgagaagatgcaagtgaatgctgaggaggttgttgtaggggacctggtggagatcaaaggcggcgacagagtgccagcggacctgagaataatcagcgcacacggctgcaaggttgacaattcttcactgactggcgagagcgaacctcaaaccagaagcccagactgcacccacgataatcccctggaaactcgcaacattactttcttttccaccaactgtgtagagggaactgcccgcggcgtggtggtagcgacaggtgaccgaaccgtcatggggcgcattgctacactcgcatccggccttgaagtggggaaaactcctatcgctatcgagatcgaacacttcattcagttaattactggcgtcgcggtttttctgggcgtttcattttttattcttagtcttatactggggtatacctggttggaagccgtgatttttctgatcggaatcattgtcgcaaacgtgcctgaaggactgctggcgactgtaacagtctgcctcacgctcacggccaagagaatggcccgcaagaattgcctggtcaagaatctggaggctgttgagacactaggttccacctcaacaatttgtagcgacaaaactggtactctcacgcagaatagaatgacagtggcccacatgtggttcgataatcaaatccatgaagctgacaccaccgaggaccagagcggaacgagttttgataaaagctcccatacctgggttgctctcagccacatagcgggtctctgcaatcgggccgtgttcaaaggaggtcaggacaacatccctgtcctgaagcgcgacgtcgcaggcgatgcatccgagtcggcccttctgaaatgtatcgaactctccagcggaagcgtgaagctgatgagagagagaaataagaaggtggcagagatcccttttaacagcaccaacaagtaccaactgtcaatccacgaaaccgaagatccgaatgacaaccgatatctcctggtgatgaaaggagctcctgaaagaatcctggaccgttgctcaaccattctgcttcagggcaaagaacagcctcttgatgaagagatgaaggaggcttttcaaaacgcctatctggaacttggaggacttggtgaacgcgtcttgggtttctgccactattacctacccgaagaacagttccctaaagggtttgcgttcgattgtgatgatgtgaattttacaacggacaacctctgctttgtaggattgatgagcatgatcgaccctcctagagcagctgtgcctgacgctgttggcaaatgtcggtcagccggtatcaaggtcatcatggttactggggaccacccaatcacagcaaaggcaattgccaaaggggtgggcatcatctcagaagggaatgagaccgtggaggacatagccgcgcggctgaatatacccgtatctcaggtcaaccctagggacgccaaggcttgtgtgattcacggtacagatttgaaggactttacctcggaacagatcgatgaaattttgcagaaccacactgaaattgtgttcgccagaacatctccccagcagaagttgatcattgttgaaggatgtcagcgacagggggcgattgtggctgtcaccggagacggtgtcaacgattcacccgccctcaaaaaagctgatattggagtggcaatgggcatagcgggatcagacgtaagtaaacaggctgcggatatgattttgttggatgacaacttcgcatctatcgtgacgggagtggaggagggaagactgatattcgacaacctgaagaaatcaatcgcatatacgctgacatctaacattcccgaaataacccctttcctgttatttattatggccaacatcccactgccactgggaactattactattttatgcatagatctgggaacagatatggtccccgccatcagcctcgcttatgaggcggccgagagcgatataatgaaacggcagcccaggaatccccggacggataagttggtgaacgagcgtctgattagtatggcctacggccaaatcggcatgatacaggcgctcggggggttcttctcatattttgtcattttggcggagaacggctttctgcctggcaatcttgtgggtatccgcttgaattgggatgatagaaccgtcaacgacttagaagattcttatggccagcagtggacatacgaacagagaaaagtggtggagtttacttgccacactgcgttcttcgtttcaattgtggtcgtccaatgggctgacttgataatctgtaagaccagacgtaactcagtgttccagcagggcatgaagaataagatcctcatttttgggctcttcgaggaaacagcccttgcggcatttctcagctactgcccagggatggacgttgccctccggatgtatcccttgaagcctagctggtggttctgtgcctttccgtattccttcctgattttcgtatatgacgagattagaaagctgatcctcaggaggaatcctggaggttgggttgagaaggaaacctactattag

SEQ ID NO: 89992 - DNA, 3075 bp, Artificial Sequence
  derived and/or modified sequence
atggggggttgggaggaagaacgaaacagaagagccaccgacaagaaggatgacaaagactctccaaagaaaaataaaggtaaggagagaagagacttagatgatctcaagaaagaagttgctatgactgagcacaagatgtcagttgaggaagtctgccggaagtataataccgactgtgtgcagggactgacccactctaaggctcaggagatattagccagagatggaccaaatgccttgactccccctccgaccacccctgaatgggtgaagttctgccggcaactctttggaggcttcagcatactgctgtggatcggggcaatactgtgtttcctcgcctacggaatacaagccggaacagaagacgatccatcgggagataacttgtatctgggaatcgtgcttgccgcagtagtaatcatcactggatgcttctcttattatcaggaggcaaaatccagtaagatcatggagagcttcaagaacatggttccccagcaggccctggtgattcgggaaggggagaagatgcaggtgaacgccgaggaggtcgtggttggcgatctggtggagatcaaaggcggtgatcgcgttccggcagacctcaggattatctccgctcacggctgtaaagttgacaatagttccctcacaggtgagtcagagccgcagacccgcagtcctgactgtactcacgacaatccattagagactaggaacattacctttttcagcacgaattgtgtcgagggcaccgccagaggtgtcgttgttgctacaggcgataggactgtgatgggtcggatagccaccctggcttccggtctcgaggttggcaagacgcccatcgcaatagagattgagcacttcatccagttgatcaccggagtggctgttttccttggcgtttcattctttattttatcgctcattctaggctatacctggttagaagctgtgatcttcctgatcggcatcatcgtcgcaaatgttccagaaggactgctcgccaccgtcacagtctgcctaaccctgaccgcaaagcgcatggcgcgaaaaaactgcctggtcaagaacctggaagccgtggagaccctgggatctacgtccaccatatgcagcgacaagactgggaccctcacacaaaataggatgaccgtggcacacatgtggtttgacaaccagattcacgaagccgacaccaccgaagatcagtctggaaccagctttgataagtcttctcatacatgggtggctctgtcccatatcgcaggcttgtgcaaccgtgctgtgttcaagggagggcaggacaatatcccggtgttgaagcgcgatgtggcaggagacgctagtgaaagcgcactgctgaaatgcatagagctatctagtggcagcgtaaaattgatgcgggagaggaacaaaaaggtggcagagatcccattcaatagcaccaacaagtaccagttgtccatccacgagaccgaagatcctaatgataacagatatctcctggtgatgaagggggcaccggaaaggattctcgacagatgttcaactattctgctccaaggcaaagaacagccgctagacgaagaaatgaaagaggccttccagaatgcatacctcgaattgggtggcctgggcgagcgtgtgttgggcttttgtcactattacctgccggaggaacagttccccaaaggcttcgcctttgactgtgacgacgtgaattttacaaccgacaatttatgcttcgttgggctaatgtcaatgatcgacccccctagggctgcagtcccggacgccgtgggcaagtgccgttccgcaggcatcaaggtaatcatggtaacgggggatcacccaatcaccgcgaaggccatagccaagggcgtgggcatcatttctgaaggaaatgaaaccgtcgaggatatcgctgctcgtctgaacatcccagtgagccaggtcaatcctagggatgcgaaggcctgcgtgatccacggcaccgatctgaaggatttcacctccgagcagattgatgaaattctccagaaccataccgagatagtcttcgctagaacgtctcctcaacagaaattgattatcgttgaaggatgtcaaagacagggagcaattgtggccgtcaccggggacggagttaacgattctccagccctgaagaaagctgatatcggggtcgccatgggcatcgcgggtagcgatgtgagcaagcaggccgcagacatgatcttactggacgacaatttcgcatctatagttaccggggtggaggaaggaagattgatctttgataatcttaaaaagtcaatagcctacactctaacaagcaacatccccgagattaccccattcctgctttttatcatggccaacatccctctgcccctaggaacaataacaatcttatgtattgatcttggaaccgacatggtgccagccattagtctggcgtatgaagctgcagagagcgacattatgaagagacagccacggaatcctcggactgataaactagtcaatgaacgactgatttccatggcctatgggcagatcggcatgatccaggcattgggtggctttttttcatacttcgtgatcctggctgaaaacggtttcctgccgggaaatctcgtaggtatccgccttaattgggacgaccgaaccgtgaatgacctggaagacagttacgggcaacaatggacttatgaacagaggaaagtggtcgagtttacatgccacacagccttcttcgtctccatcgtcgttgtccagtgggcagatctgatcatctgcaaaacgaggcggaatagtgtctttcaacagggcatgaaaaacaagatccttattttcgggctgttcgaggaaacagccctggcagctttcctgagctattgtccaggcatggatgttgctctcaggatgtaccctctgaagcctagttggtggttttgtgcatttccatactccttcctcatatttgtgtacgacgagataagaaaactcattttgaggcgcaacccgggaggttgggtagagaaggagacttattactag

SEQ ID NO: 89993 - DNA, 3427 bp, Artificial Sequence
  derived and/or modified sequence
gtgtgtgtgtgcagcccctcatgtaggggagcaggcatgggaggctgggaggaggagaggaacaggagagccacggacaagaaagatgacaaggactcacccaagaagaacaagggcaaggagcgccgggacctggatgacctcaagaaggaggtggctatgacagagcacaagatgtcagtggaagaggtctgccggaaatacaacacagactgtgtgcagggtttgacccacagcaaagcccaggagatcctggcccgggatgggcctaacgcactcacgccaccgcctaccaccccagagtgggtcaagttttgccggcagctcttcgggggcttctccatcctgctgtggatcggggctatcctctgcttcctggcctacggtatccaggcgggcaccgaggacgacccctctggtgacaacctgtacctgggcatcgtgctggcggccgtggtgatcatcactggctgcttctcctactaccaggaggccaagagctccaagatcatggagtccttcaagaacatggtgccccagcaagccctggtgatccgggaaggtgagaagatgcaggtgaacgctgaggaggtggtggtcggggacctggtggagatcaagggtggagaccgagtgccagctgacctgcggatcatctcagcccacggctgcaaggtggacaactcctccctgactggcgaatccgagccccagactcgctctcccgactgcactcacgacaaccccttggagactcggaacatcaccttcttttccaccaactgtgtggaaggcacggctcggggcgtggtggtggccacgggcgaccgcactgtcatgggccgtatcgccaccctggcatcagggctggaggtgggcaagacgcccatcgccatcgagattgagcacttcatccagctcatcaccggcgtggctgtcttcctgggtgtctccttcttcatcctctccctcattctcggatacacctggcttgaggctgtcatcttcctcatcggcatcatcgtggccaatgtcccagagggtctgctggccactgtcactgtgtgtctgacgctgaccgccaagcgcatggcccggaagaactgcctggtgaagaacctggaggctgtagaaaccctgggctccacgtccaccatctgctcagataagacagggaccctcactcagaaccgcatgacagtcgcccacatgtggtttgacaaccagatccacgaggctgacaccactgaggaccagtcagggacctcatttgacaagagttcgcacacctgggtggccctgtctcacatcgctgggctctgcaatcgcgctgtcttcaagggtggtcaggacaacatccctgtgctcaagagggatgtggctggggatgcgtctgagtctgccctgctcaagtgcatcgagctgtcctctggctccgtgaagctgatgcgtgaacgcaacaagaaagtggctgagattcccttcaattccaccaacaaataccagctctccatccatgagaccgaggaccccaacgacaaccgatacctgctggtgatgaagggtgcccccgagcgcatcctggaccgctgctccaccatcctgctacagggcaaggagcagcctctggacgaggaaatgaaggaggccttccagaatgcctaccttgagctcggtggcctgggcgagcgcgtgcttggtttctgccattattacctgcccgaggagcagttccccaagggctttgccttcgactgtgatgacgtgaacttcaccacggacaacctctgctttgtgggcctcatgtccatgatcgacccaccccgggcagccgtccctgacgcggtgggcaagtgtcgcagcgcaggcatcaaggtcatcatggtcaccggcgatcaccccatcacggccaaggccattgccaagggtgtgggcatcatctctgagggcaacgagactgtggaggacatcgccgcccggctcaacattcccgtcagccaggttaacccccgggatgccaaggcctgcgtgatccacggcaccgacctcaaggacttcacctccgagcaaatcgacgagatcctgcagaatcacaccgagatcgtcttcgcccgcacatccccccagcagaagctcatcattgtggagggctgtcagagacagggtgcaattgtggctgtgaccggggatggtgtgaacgactcccccgctctgaagaaggccgacattggggtggccatgggcatcgctggctctgacgtctccaagcaggcagctgacatgatcctgctggacgacaactttgcctccatcgtcacaggggtggaggagggccgcctgatcttcgacaacctaaagaagtccattgcctacaccctgaccagcaatatcccggagatcacgcccttcctgctgttcatcatggccaacatcccgctgcccctgggcaccatcaccatcctctgcatcgatctgggcactgacatggtccctgccatctcactggcgtacgaggctgccgaaagcgacatcatgaagagacagcccaggaacccgcggacggacaaattggtcaatgagagactcatcagcatggcctacgggcagattggaatgatccaggctctcggtggcttcttctcttactttgtgatcctggcagaaaatggcttcttgcccggcaacctggtgggcatccggctgaactgggatgaccgcaccgtcaatgacctggaagacagttacgggcagcagtggacatacgagcagaggaaggtggtggagttcacctgccacacggccttctttgtgagcatcgttgtcgtccagtgggccgatctgatcatctgcaagacccggaggaactcggtcttccagcagggcatgaagaacaagatcctgatcttcgggctgtttgaggagacggccctggctgccttcctgtcctactgccccggcatggacgtggccctgcgcatgtaccctctcaagcccagctggtggttctgtgccttcccctacagtttcctcatcttcgtctacgacgaaatccgcaaactcatcctgcgcaggaacccagggggttgggtggagaaggaaacctactactgacctcagccccaccacatcgcccatctcttccccgtcccccaggcccaggaccgcccctgtcagtccccccaattttgtattctggggggaggagccctctcttcctgtggccccaccttggcccccaccccctccactatctcctgccgcccccactctggctggcttctctcccctgccccaaacctctctcctctctcttttctgtgtcagtttctctccctctcctcacccctctatccattcctcccgccccagccacctccctgggctcttttttactccccttcagccccccggctgatgccatctctgg

SEQ ID NO: 89994 - DNA, 3075 bp, Artificial Sequence
  derived and/or modified sequence
atgggcggctgggaggaggagagaaacagaagagccaccgacaagaaggacgacaaggacagccccaagaagaacaagggcaaggagagaagagacctggacgacctgaagaaggaggtggccatgaccgagcacaagatgagcgtggaggaggtgtgcagaaagtacaacaccgactgcgtgcagggcctgacccacagcaaggcccaggagatcctggccagagacggccccaacgccctgacccccccccccaccacccccgagtgggtgaagttctgcagacagctgttcggcggcttcagcatcctgctgtggatcggcgccatcctgtgcttcctggcctacggcatccaggccggcaccgaggacgaccccagcggcgacaacctgtacctgggcatcgtgctggccgccgtggtgatcatcaccggctgcttcagctactaccaggaggccaagagcagcaagatcatggagagcttcaagaacatggtgccccagcaggccctggtgatcagagagggcgagaagatgcaggtgaacgccgaggaggtggtggtgggcgacctggtggagatcaagggcggcgacagagtgcccgccgacctgagaatcatcagcgcccacggctgcaaggtggacaacagcagcctgaccggcgagagcgagccccagaccagaagccccgactgcacccacgacaaccccctggagaccagaaacatcaccttcttcagcaccaactgcgtggagggcaccgccagaggcgtggtggtggccaccggcgacagaaccgtgatgggcagaatcgccaccctggccagcggcctggaggtgggcaagacccccatcgccatcgagatcgagcacttcatccagctgatcaccggcgtggccgtgttcctgggcgtgagcttcttcatcctgagcctgatcctgggctacacctggctggaggccgtgatcttcctgatcggcatcatcgtggccaacgtgcccgagggcctgctggccaccgtgaccgtgtgcctgaccctgaccgccaagagaatggccagaaagaactgcctggtgaagaacctggaggccgtggagaccctgggcagcaccagcaccatctgcagcgacaagaccggcaccctgacccagaacagaatgaccgtggcccacatgtggttcgacaaccagatccacgaggccgacaccaccgaggaccagagcggcaccagcttcgacaagagcagccacacctgggtggccctgagccacatcgccggcctgtgcaacagagccgtgttcaagggcggccaggacaacatccccgtgctgaagagagacgtggccggcgacgccagcgagagcgccctgctgaagtgcatcgagctgagcagcggcagcgtgaagctgatgagagagagaaacaagaaggtggccgagatccccttcaacagcaccaacaagtaccagctgagcatccacgagaccgaggaccccaacgacaacagatacctgctggtgatgaagggcgcccccgagagaatcctggacagatgcagcaccatcctgctgcagggcaaggagcagcccctggacgaggagatgaaggaggccttccagaacgcctacctggagctgggcggcctgggcgagagagtgctgggcttctgccactactacctgcccgaggagcagttccccaagggcttcgccttcgactgcgacgacgtgaacttcaccaccgacaacctgtgcttcgtgggcctgatgagcatgatcgacccccccagagccgccgtgcccgacgccgtgggcaagtgcagaagcgccggcatcaaggtgatcatggtgaccggcgaccaccccatcaccgccaaggccatcgccaagggcgtgggcatcatcagcgagggcaacgagaccgtggaggacatcgccgccagactgaacatccccgtgagccaggtgaaccccagagacgccaaggcctgcgtgatccacggcaccgacctgaaggacttcaccagcgagcagatcgacgagatcctgcagaaccacaccgagatcgtgttcgccagaaccagcccccagcagaagctgatcatcgtggagggctgccagagacagggcgccatcgtggccgtgaccggcgacggcgtgaacgacagccccgccctgaagaaggccgacatcggcgtggccatgggcatcgccggcagcgacgtgagcaagcaggccgccgacatgatcctgctggacgacaacttcgccagcatcgtgaccggcgtggaggagggcagactgatcttcgacaacctgaagaagagcatcgcctacaccctgaccagcaacatccccgagatcacccccttcctgctgttcatcatggccaacatccccctgcccctgggcaccatcaccatcctgtgcatcgacctgggcaccgacatggtgcccgccatcagcctggcctacgaggccgccgagagcgacatcatgaagagacagcccagaaaccccagaaccgacaagctggtgaacgagagactgatcagcatggcctacggccagatcggcatgatccaggccctgggcggcttcttcagctacttcgtgatcctggccgagaacggcttcctgcccggcaacctggtgggcatcagactgaactgggacgacagaaccgtgaacgacctggaggacagctacggccagcagtggacctacgagcagagaaaggtggtggagttcacctgccacaccgccttcttcgtgagcatcgtggtggtgcagtgggccgacctgatcatctgcaagaccagaagaaacagcgtgttccagcagggcatgaagaacaagatcctgatcttcggcctgttcgaggagaccgccctggccgccttcctgagctactgccccggcatggacgtggccctgagaatgtaccccctgaagcccagctggtggttctgcgccttcccctacagcttcctgatcttcgtgtacgacgagatcagaaagctgatcctgagaagaaaccccggcggctgggtggagaaggagacctactactag

SEQ ID NO: 89995 - protein, 983 aa, Artificial Sequence
  derived and/or modified sequence
MTEHKMSVEEVCRKYNTDCVQGLTHSKAQEILARDGPNALTPPPTTPEWVKFCRQLFGGFSILLWIGAILCFLAYGIQAGTEDDPSGDNLYLGIVLAAVVIITGCFSYYQEAKSSKIMESFKNMVPQQALVIREGEKMQVNAEEVVVGDLVEIKGGDRVPADLRIISAHGCKVDNSSLTGESEPQTRSPDCTHDNPLETRNITFFSTNCVEGTARGVVVATGDRTVMGRIATLASGLEVGKTPIAIEIEHFIQLITGVAVFLGVSFFILSLILGYTWLEAVIFLIGIIVANVPEGLLATVTVCLTLTAKRMARKNCLVKNLEAVETLGSTSTICSDKTGTLTQNRMTVAHMWFDNQIHEADTTEDQSGTSFDKSSHTWVALSHIAGLCNRAVFKGGQDNIPVLKRDVAGDASESALLKCIELSSGSVKLMRERNKKVAEIPFNSTNKYQLSIHETEDPNDNRYLLVMKGAPERILDRCSTILLQGKEQPLDEEMKEAFQNAYLELGGLGERVLGFCHYYLPEEQFPKGFAFDCDDVNFTTDNLCFVGLMSMIDPPRAAVPDAVGKCRSAGIKVIMVTGDHPITAKAIAKGVGIISEGNETVEDIAARLNIPVSQVNPRDAKACVIHGTDLKDFTSEQIDEILQNHTEIVFARTSPQQKLIIVEGCQRQGAIVAVTGDGVNDSPALKKADIGVAMGIAGSDVSKQAADMILLDDNFASIVTGVEEGRLIFDNLKKSIAYTLTSNIPEITPFLLFIMANIPLPLGTITILCIDLGTDMVPAISLAYEAAESDIMKRQPRNPRTDKLVNERLISMAYGQIGMIQALGGFFSYFVILAENGFLPGNLVGIRLNWDDRTVNDLEDSYGQQWTYEQRKVVEFTCHTAFFVSIVVVQWADLIICKTRRNSVFQQGMKNKILIFGLFEETALAAFLSYCPGMDVALRMYPLKPSWWFCAFPYSFLIFVYDEIRKLILRRNPGGWVEKETYY

SEQ ID NO: 89996 - protein, 147 aa, Artificial Sequence
  derived and/or modified sequence
MGSGGSDSYRIATSQDKKDDKDSPKKNKGKERRDLDDLKKEVAMTEHKMSVEEVCRKYNTDCVQGLTHSKAQEILARDGPNALTPPPTTPEWVKFCRQLFGGFSILLWIGAILCFLAYGIQAGTEDDPSGDNLYLGIVLAAVVIITG

SEQ ID NO: 89997 - protein, 682 aa, Artificial Sequence
  derived and/or modified sequence
MGRIATLASGLEVGKTPIAIEIEHFIQLITGVAVFLGVSFFILSLILGYTWLEAVIFLIGIIVANVPEGLLATVTVCLTLTAKRMARKNCLVKNLEAVETLGSTSTICSDKTGTLTQNRMTVAHMWFDNQIHEADTTEDQSGTSFDKSSHTWVALSHIAGLCNRAVFKGGQDNIPVLKRDVAGDASESALLKCIELSSGSVKLMRERNKKVAEIPFNSTNKYQLSIHETEDPNDNRYLLVMKGAPERILDRCSTILLQGKEQPLDEEMKEAFQNAYLELGGLGERVLGFCHYYLPEEQFPKGFAFDCDDVNFTTDNLCFVGLMSMIDPPRAAVPDAVGKCRSAGIKVIMVTGDHPITAKAIAKGVGIISEGNETVEDIAARLNIPVSQVNPRDAKACVIHGTDLKDFTSEQIDEILQNHTEIVFARTSPQQKLIIVEGCQRQGAIVAVTGDGVNDSPALKKADIGVAMGIAGSDVSKQAADMILLDDNFASIVTGVEEGRLIFDNLKKSIAYTLTSNIPEITPFLLFIMANIPLPLGTITILCIDLGTDMVPAISLAYEAAESDIMKRQPRNPRTDKLVNERLISMAYGQIGMIQALGGFFSYFVILAENGFLPGNLVGIRLNWDDRTVNDLEDSYGQQWTYEQRKVVEFTCHTAFFVSIVVVQWADLIICKTRRTRSSSRA

SEQ ID NO: 89998 - protein, 1026 aa, Artificial Sequence
  derived and/or modified sequence
MGSGGSDSYRIATSQDKKDDKDSPKKNKGKERRDLDDLKKEVAMTEHKMSVEEVCRKYNTDCVQGLTHSKAQEILARDGPNALTPPPTTPEWVKFCRQLFGGFSILLWIGAILCFLAYGIQAGTEDDPSGDNLYLGIVLAAVVIITGCFSYYQEAKSSKIMESFKNMVPQQALVIREGEKMQVNAEEVVVGDLVEIKGGDRVPADLRIISAHGCKVDNSSLTGESEPQTRSPDCTHDNPLETRNITFFSTNCVEGTARGVVVATGDRTVMGRIATLASGLEVGKTPIAIEIEHFIQLITGVAVFLGVSFFILSLILGYTWLEAVIFLIGIIVANVPEGLLATVTVCLTLTAKRMARKNCLVKNLEAVETLGSTSTICSDKTGTLTQNRMTVAHMWFDNQIHEADTTEDQSGTSFDKSSHTWVALSHIAGLCNRAVFKGGQDNIPVLKRDVAGDASESALLKCIELSSGSVKLMRERNKKVAEIPFNSTNKYQLSIHETEDPNDNRYLLVMKGAPERILDRCSTILLQGKEQPLDEEMKEAFQNAYLELGGLGERVLGFCHYYLPEEQFPKGFAFDCDDVNFTTDNLCFVGLMSMIDPPRAAVPDAVGKCRSAGIKVIMVTGDHPITAKAIAKGVGIISEGNETVEDIAARLNIPVSQVNPRDAKACVIHGTDLKDFTSEQIDEILQNHTEIVFARTSPQQKLIIVEGCQRQGAIVAVTGDGVNDSPALKKADIGVAMGIAGSDVSKQAADMILLDDNFASIVTGVEEGRLIFDNLKKSIAYTLTSNIPEITPFLLFIMANIPLPLGTITILCIDLGTDMVPAISLAYEAAESDIMKRQPRNPRTDKLVNERLISMAYGQIGMIQALGGFFSYFVILAENGFLPGNLVGIRLNWDDRTVNDLEDSYGQQWTYEQRKVVEFTCHTAFFVSIVVVQWADLIICKTRRNSVFQQGMKNKILIFGLFEETALAAFLSYCPGMDVALRMYPLKPSWWFCAFPYSFLIFVYDEIRKLILRRNPGGWVEKETYY

SEQ ID NO: 89999 - DNA, 3042 bp, Artificial Sequence
  derived and/or modified sequence
atgggtgacaagaaggatgataaggacagccccaagaaaaataagggcaaggaacgtcgggacctcgatgacctgaagaaggaagtggcaatgacagagcataaaatgagcgtggaggaggtgtgcagaaagtacaacaccgattgtgtacagggtttaacccacagtaaggctcaggaaattctcgcaagggatggcccaaatgcactgacccccccacctaccacccccgaatgggttaaattttgccgacagctgttcggaggtttttcaattctgctgtggatcggtgccattctgtgctttttggcatatggaattcaggctggtaccgaggacgacccgtctggcgacaatctctatttgggcattgtcttggctgctgttgtgatcataacaggatgcttctcatattatcaggaggccaagagctctaagatcatggaatccttcaagaatatggttccccagcaggccctggtcataagggagggggagaagatgcaggtgaacgccgaagaggttgttgtgggagacctcgtcgaaatcaagggaggtgacagagtgcctgcggatctgcgtataatcagcgcccatggctgcaaggttgacaactcctctcttacaggcgaaagcgaaccacaaaccagatcacctgattgtactcacgacaatccgctagagacaagaaacatcacctttttctccactaattgtgtggagggcactgctaggggcgtggtagtcgcgactggagaccggacagtgatgggcaggatcgcaactctggctagcggtctggaggttggtaagactcccatagcgattgaaattgaacattttatacagctcatcacaggggtcgctgtctttcttggtgtgtccttcttcatactgtctctgattttgggctacacttggttagaggccgtcatattcttgatcggtataatagtggctaacgtacctgagggtctgctagccacggtaacggtctgtctaacactgacagcgaagaggatggccaggaaaaattgtctggtgaagaatctggaggcagtggagactctcggtagtacgtcaaccatctgctctgacaagaccgggacgctcacacagaaccggatgacagtagcccacatgtggttcgataaccaaattcacgaagccgacactaccgaggaccagtctgggacatctttcgataaaagcagtcacacctgggttgctctcagtcatattgcaggtttatgcaaccgtgctgtcttcaagggcgggcaggacaacattccagtgctcaaacgggatgtagccggtgacgcgtcagaaagtgctttgttaaagtgcatcgagctgtcatccggttctgtgaagctgatgcgcgagcgcaataaaaaggtcgctgaaattccatttaactctacaaataaataccagctgagcattcacgagacggaagacccaaacgacaatagatatctcctcgtgatgaaaggggcaccagaacgaatcctggaccggtgttctaccatactcctccaaggcaaggaacaaccgttggatgaggagatgaaagaggcctttcagaacgcctatcttgagctggggggcctgggagaaagggtgctgggcttttgtcactattatctacctgaggaacaatttcccaagggctttgcttttgactgtgacgatgtgaatttcaccacagacaacctctgcttcgtgggactgatgtcgatgattgaccctccaagggctgcagtccccgatgcagttggaaagtgcagaagcgccggcatcaaagttattatggtgactggcgaccatccaataaccgccaaggccattgcaaagggcgtgggaataattagtgaagggaacgagaccgtggaggacatagctgcccgtctcaacattccagtgagtcaagtgaatccaagagacgctaaggcgtgtgttatccacggaactgacctgaaggattttactagtgaacagattgacgaaatcctccagaatcacaccgagattgtatttgcaagaacatcccctcagcaaaagctgatcatcgtagaagggtgccagagacagggcgccatcgtggcagtgacaggggatggcgttaacgacagccctgccttgaaaaaagctgacatcggtgtcgccatgggcatcgcaggctccgatgtatctaagcaagccgccgacatgatcctccttgacgataacttcgcatccatcgttacaggcgtagaagagggaagactgatcttcgataatcttaaaaagagcatagcatacaccctgacctctaacattcccgaaattaccccattcctgctcttcatcatggctaacattcccttaccattgggaaccattacaattctctgcatcgatttgggtactgacatggtccctgccatttccctggcatacgaggcagctgagtccgacataatgaagagacagcccagaaatcctagaactgacaaattagtgaatgagagacttatatccatggcatacggacagatcggcatgatccaggcacttggggggttcttttcctacttcgtgatcttggccgagaacggatttcttccagggaatttggtgggcatcagactgaactgggatgacaggacggttaatgacctggaggacagctacggacagcagtggacttatgaacaaagaaaggtggtagaattcacgtgccataccgcatttttcgtgagtatcgtggttgtccagtgggccgatctgatcatatgtaagactcgcagaaatagtgtgttccagcagggaatgaaaaataaaatcttgatcttcgggctgtttgaggagacagcattggcggctttcttaagttattgcccgggcatggacgtcgcactgcggatgtaccccctgaaaccaagctggtggttttgcgcgtttccatatagtttcttgatatttgtgtatgatgaaattcgaaagctgattctgcggaggaatcctggcggatgggtcgagaaagaaacctactattag

SEQ ID NO: 90000 - DNA, 3681 bp, Artificial Sequence
  derived and/or modified sequence
atgggagacaagaaagatgataaagattcccctaagaagaacaaaggaaaggagcgccgggacttggacgaccttaaaaaggaagtggccatgacggaacataagatgtccgtcgaggaggtctgccggaaatacaataccgactgcgtccaaggattaacccattccaaggctcaagaaattctagccagagacggaccgaacgctcttacacccccaccgacaaccccagaatgggtgaaattctgccgtcaattatttggagggttcagtatcctgctgtggatcggcgccatcctttgcttcctggcctacggaatccaagccggcactgaggatgaccccagcggggataatttatatcttgggatcgtgcttgctgctgtggttattatcaccggctgttttagctattatcaagaagctaaatcaagtaagatcatggagtccttcaagaatatggtcccgcagcaggctctggtgatcagggaaggggagaaaatgcaagtcaatgcggaagaggtggtggtaggagatctagtagagataaagggcggcgaccgcgtgccagctgacctcaggatcatatccgcccatgggtgcaaagtagacaactcctccttaacaggcgaaagcgaacctcagacacgctccccagattgtactcacgataaccctctcgagacccggaacattacgttcttctctacgaactgtgtggagggcacagctaggggcgtggttgtcgccaccggggacaggaccgtcatggggcgaattgccacattggccagcggcctcgaagtaggaaagactcctatagcgatcgagatcgagcacttcatccagttaatcaccggagtggctgtctttctgggagtgtcttttttcatcctctctcttatcctaggctatacatggctggaggccgttatatttctgataggcatcatcgtggcaaacgttcctgagggattgttggcaaccgtaaccgtctgcctcaccctgacagccaaacgcatggcgcggaaaaattgcctcgtgaagaacttggaggccgtggagaccctgggctccacgtccacaatttgctccgacaagaccggaaccttgacacaaaaccggatgactgtagcacatatgtggttcgacaaccaaatccacgaggccgacacaaccgaagaccagtcaggcacatcattcgataagagctctcacacttgggtggccctgtcacatattgccggcctttgtaaccgggccgtcttcaagggaggtcaggataacattccagtgctgaagcgtgacgttgccggggatgcatctgagtccgccctcctcaagtgcatcgaactctcttctgggagcgtaaagttaatgcgggagcgaaacaaaaaagtggctgaaattcctttcaatagcaccaacaagtaccagctcagtatccacgaaaccgaggaccctaacgacaatcgttatctgttggtgatgaagggggccccagagcggattctggacaggtgcagcactattctgcttcagggaaaggagcagcccctggacgaggaaatgaaggaggcatttcagaatgcctatctggaactgggcgggttaggtgagagagtactaggattctgccactattatttacctgaggagcaattcccgaagggctttgcgtttgattgcgacgatgtaaatttcactacggataatctctgttttgtaggcctgatgagcatgatcgaccctccacgggcagctgttcccgatgccgtcggcaagtgccgtagcgctggcattaaagtgatcatggtcaccggcgaccacccaatcacggccaaagctatagccaaaggggtcggaatcatttcggagggcaacgagaccgtggaggacattgccgccagactgaatatccccgtgtctcaggtgaatccccgcgatgccaaggcctgtgttatccacggtaccgatctcaaggattttactagcgagcagattgatgaaatcctgcagaatcatacggaaatagtgttcgctcggaccagcccacagcaaaaactcatcattgtcgaagggtgtcaacggcagggtgccattgtggcagttaccggagatggtgtgaacgacagtcccgcactgaagaaagctgatatcggggtggctatggggattgccggatccgacgtatcgaagcaggccgcggacatgatattgctcgatgataactttgccagtattgttaccggggtagaagagggcagactgatatttgacaaccttaagaaatcaattgcttatacactcacctccaatatccccgaaatcacacctttcctgttgtttattatggctaatatccctctgcccctgggaactatcacaattttgtgcatcgatctgggcacagacatggtacccgctatatccttggcttacgaggcagccgaaagtgatattatgaaaaggcagcctcggaaccccaggactgacaagctagtgaacgaaaggcttatctccatggcctatggacaaatcggaatgattcaggcgctgggcgggttcttcagctactttgtgatcctggccgaaaacggttttctgccgggtaatctcgtgggaataaggctgaattgggatgatcggacagtgaacgatctggaagattcctatgggcagcagtggacctacgaacagcgcaaagttgttgagtttacttgccataccgcattctttgtcagcatcgtagtcgttcagtgggccgatctgattatatgcaaaacccggagaaattcagtgttccagcaggggatgaaaaataaaattctcatcttcggtctgttcgaggagacagcactggcagcctttctgagctattgtccgggcatggacgtggctcttagaatgtacccgttaaaaccatcgtggtggttttgcgcctttccctactcattcttaatatttgtgtacgatgagatccggaagttgattctaagaaggaacccagggggggaaggagcaagacagggttcccgcggcgggaggggcgcggccggctcacaggccgcagggcctcgccttccttccccttgttggatggccctacctccagggtcccattcaagcctgtcatcccatctgtctggccatcccttgtgtctactgacaggtctgtgtctttgtgggtttctggtctccttgccactgtgcccatcactgtgctgggcggcccgcctggcctgcctctcccccagcttgactctgtccctgtccttcttactttgcctatctaggctggggggagagggtaacctgttgctgaccagtgccccacctcatcgtccgagtttgcctagacctcccggacctggcccacctctgtccgttccccctatactgtatagcggtggcaggagccctttgttcctgtggccacacctggggccccatcccctgcattacttactgcccccacctctgtggctggcttctttaccctgcccaaaaccactgtcaagcctcttttccgtgtctgtaagccttccactactgacccccctctctatccctcctgcaccggctaccagcttgggctcttttttactgcctttctcaccaccagcggatgccatcagtggttctggacagctctccaacatttccgttggtcgggaatag

SEQ ID NO: 90001 - DNA, 444 bp, Artificial Sequence
  derived and/or modified sequence
atggggagtgggggttccgattcataccgcatagctaccagccaggataagaaggacgataaagacagccccaagaagaacaagggaaaggaaaggagagatctcgatgacctgaaaaaggaggtggcgatgacggagcataagatgagtgtcgaggaggtatgccgcaagtacaacaccgattgtgtgcaaggcttgacacactccaaagctcaggaaatactcgcccgcgatggcccgaacgcactaacaccaccacctacaacacctgagtgggtcaagttctgcagacagctgtttggagggttttcaatactgctgtggattggcgctattctttgcttcctcgcctacgggatccaggcaggcacagaggacgacccttccggcgacaacttgtacctgggtatcgtgctcgcagctgtggtgataataacagggtag

SEQ ID NO: 90002 - DNA, 3081 bp, Artificial Sequence
  derived and/or modified sequence
atgggctccggcggatccgacagctatcgcatcgcgacatctcaggacaagaaagatgacaaagacagcccgaagaaaaacaaaggaaaagaacgcagggacttggacgatctgaaaaaggaagtggcaatgacagagcacaagatgtctgtggaggaggtctgccggaagtacaacactgactgcgtccaaggactgacccactcaaaggcccaagaaatcctagccagagacggcccaaatgcgctcacacccccgcctacgacacccgagtgggtgaaattttgtcggcagctcttcggtggctttagcattctactttggattggggccatactgtgctttctcgcctacggtattcaggccggcactgaggatgacccttcgggtgacaatctctatctgggcattgtcttagcggcagttgtcatcattactggttgcttctcctattaccaggaggccaagagctctaagatcatggagtccttcaagaacatggtaccacagcaagctcttgtcatcagggagggagagaaaatgcaagtgaacgcagaagaagtcgtcgttggcgacctggtggagatcaagggtggcgatcgagtgccagctgacctcagaattatttctgcacatggatgcaaggtcgacaactcaagcctcacaggtgagtcagaaccacagacacgatctcccgattgtacccacgataatccactggagacccgaaatatcacttttttttcaactaattgcgtagagggcaccgctcgcggcgtcgttgtggctactggggacagaaccgtgatggggagaatcgcaactctggcttccgggctcgaagttggcaaaactcccattgcaatagaaatagagcattttatccagctaattaccggcgtggctgttttcttgggagtgagcttttttattctctcactgatactcggctacacctggctcgaagctgtgatctttctcattggcataatagtggcaaatgtgcccgaggggttgttggccaccgtgactgtgtgcctgaccctaactgctaaaaggatggcacgcaagaactgcctggtgaagaacctggaagccgtggagacgctggggtcaacatctaccatctgtagtgacaagactggcacactcactcaaaatcggatgaccgtggctcacatgtggttcgacaaccaaatccatgaagctgacactaccgaagatcagagtggaacaagctttgataagtctagccatacttgggttgcactctcccatatcgcaggactgtgtaaccgggcggtgtttaagggaggtcaggacaacataccggtgctgaaacgtgatgtcgccggggacgcaagtgaaagcgccctgttaaaatgcattgagctgagcagtggcagtgtgaagcttatgagggagcgcaataaaaaagttgctgagataccatttaacagcactaacaaataccaattgagcatacatgaaacggaggatcctaacgataacagatacctgctggtgatgaagggagcccctgaacgcatactggataggtgcagtactatcctgctccagggcaaagagcagcctttggacgaagagatgaaggaagcgttccaaaacgcataccttgaacttgggggcctgggggagagggttctcgggttttgccactattatctgcccgaagagcagttccccaaaggcttcgcattcgactgcgatgacgtcaacttcacaacggataatctgtgctttgtggggctcatgagcatgatagacccaccaagggccgccgtgccagatgccgtgggcaaatgccggtctgccggaattaaagtgattatggtgacaggcgaccacccaatcaccgcgaaggcgatcgcaaagggcgtcggaattatctccgaggggaatgagacggttgaggatatagcggcaagacttaacatccccgtgagccaggtgaatccacgcgacgccaaggcgtgcgtgatccatgggacggacctgaaagatttcacctcggagcaaatagatgagattctccagaatcatacggagatagtcttcgcacgcacctccccccaacagaagctcatcattgtggagggctgccagcgccagggtgccatcgttgccgtaaccggcgatggagtgaacgactcccccgctctgaaaaaagccgatattggcgttgcgatgggcattgctggctcggacgtaagcaaacaggctgctgacatgattctgttagacgacaattttgcttcaatcgttaccggggtcgaggaagggaggctgatattcgataacctgaagaagtctatcgcctatactttgacctccaacatccccgaaataaccccattcttgctgtttatcatggcaaatatccccctccccttggggacaatcacgatcttgtgtatcgatctgggcacagatatggtgcccgcaatcagtctggcttacgaggctgcagaaagtgacattatgaaacgtcagccaaggaatccccgcactgataagctggtgaacgaacggcttatatccatggcatatggccagattggaatgattcaggctctgggaggcttcttttcttatttcgtgatcctcgcagagaatggtttcttgccaggcaacctggttggtattcgattaaactgggatgaccgcacggtcaacgatctggaggactcttatggacagcagtggacttatgaacagcgtaaggtcgtggagtttacctgtcacaccgctttcttcgtcagcatcgtcgtggtgcagtgggccgatctgattatttgtaagacacggaggaattccgtgtttcagcagggtatgaagaacaagattctgatattcgggctgtttgaggaaactgcattagctgcttttctgagctactgccccggtatggatgtggccctaaggatgtacccactcaagccttcctggtggttttgtgccttcccgtattctttcttaattttcgtgtatgatgaaatccggaagctgattctcagaaggaatccgggcggctgggtcgagaaggagacatactactag

SEQ ID NO: 90003 - DNA, 3042 bp, Artificial Sequence
  derived and/or modified sequence
atgggagacaagaaggatgacaaggacagccccaagaagaacaagggcaaggagcggcgggacctggatgacctgaagaaggaggtggccatgacagagcacaagatgtctgtggaggaggtgtgcaggaagtacaacacagactgtgtgcagggcctgacccacagcaaggcccaggagatcctggccagagatggccccaatgccctgaccccaccacccaccaccccagagtgggtgaagttctgccggcagctgtttggaggcttcagcatcctgctgtggattggagccatcctgtgcttcctggcctacggcatccaggccggcacagaagatgaccccagcggggacaacctgtacctgggcatcgtgctggccgctgtggtgatcatcaccggctgcttctcctactaccaggaggccaagagcagcaagatcatggagagcttcaagaacatggtgccccagcaggccctggtgatccgggagggggagaagatgcaggtgaatgctgaggaggtggtggtgggggacctggtggagatcaagggcggggacagagtgcctgctgacctgcgcatcatcagcgcccacggctgcaaggtggacaacagcagcctgactggagagagcgagccccagaccaggagcccagactgcacccatgacaaccccctggagaccaggaacatcaccttcttcagcaccaactgtgtggagggcacagcccggggcgtggtggtggccactggagacagaacagtgatgggccgcatcgccaccctggccagcggcctggaggtgggcaagacccccatcgccatcgagattgagcacttcatccagctgatcaccggggtggccgtgttcctgggcgtgtccttcttcatcctgagcctcatcctgggctacacctggctggaggccgtcatcttcctgattggcatcatcgtggccaacgtgcctgagggcctgctggccaccgtgacagtgtgcctgaccctgacagccaagaggatggccaggaagaactgcctggtgaagaacctggaggccgtggagaccctgggcagcaccagcaccatctgcagcgacaagacaggcaccctgacccagaacaggatgacagtggcccacatgtggtttgacaaccagatccacgaggccgacaccacagaggaccagagcggcaccagctttgacaagagcagccacacctgggtggccctgagccacatcgccggcctgtgcaacagagctgtgttcaagggcggccaggacaacatccctgtgctgaagagagatgtggccggagatgccagcgagagcgccctgctgaagtgcatcgagctgagcagcggctctgtgaagctgatgagggagaggaacaagaaggtggccgagatccccttcaacagcaccaacaagtaccagctgagcatccatgaaacagaggaccccaatgacaaccgctacctgctggtgatgaagggggcccctgagcgcatcctggaccgctgcagcaccatcctgctgcagggcaaggagcagcccctggatgaggagatgaaggaggccttccagaatgcctacctggagctgggcggcctgggggagcgggtgctgggcttctgccactactacctgcctgaggagcagttccccaagggctttgcctttgactgtgatgatgtgaacttcaccacagacaacctgtgctttgtgggcctgatgtccatgattgacccccccagggctgctgtgcctgatgctgtgggcaaatgtagatctgctggcatcaaggtgatcatggtgactggagaccaccccatcacagccaaggccatcgccaagggcgtgggcatcatcagcgagggcaatgagaccgtggaggacattgctgcccggctgaacatccctgtgtcccaggtgaaccccagagatgccaaggcctgtgtgatccacggcacagacctgaaggacttcaccagcgagcagattgatgagatcctgcagaaccacacagagatcgtgtttgcccggaccagcccccagcagaagctgatcatcgtggagggctgccagaggcagggcgccatcgtggccgtgactggagatggagtgaatgacagccctgccctgaagaaggctgacatcggcgtggccatgggcattgctggcagtgatgtgtccaagcaggccgctgacatgatcctgctggatgacaactttgccagcatcgtgactggagtggaggagggccgcctcatctttgacaacctgaagaagagcatcgcctacaccctgaccagcaacatccctgagatcacccccttcctgctcttcatcatggccaacatccccctgcccctgggcaccatcaccatcctgtgcatcgacctgggcacagacatggtgcctgccatcagcctggcctatgaggccgctgagagtgacatcatgaagaggcagcccaggaaccccaggacagacaagctggtgaatgaaagactcatctccatggcctacggccagatcggcatgatccaggccctgggcggcttcttctcctacttcgtcatcctggctgaaaatggcttcctgcccggcaacctggtgggcatccggctgaactgggatgacagaacagtgaatgacctggaggacagctatggccagcagtggacctatgagcagaggaaggtggtggagttcacctgccacacagccttctttgtgtccatcgtggtggtgcagtgggccgacctgatcatctgcaagaccaggagaaattctgtgttccagcagggcatgaagaacaagatcctgatcttcggcctgtttgaggagacagccctggccgccttcctgagctactgccccggcatggatgtggccctgaggatgtaccccctgaagcccagctggtggttctgtgccttcccctacagcttcctgatctttgtgtatgatgagatcaggaagctgatcctgcggagaaatcctgggggctgggtggagaaggagacctactactag

SEQ ID NO: 90004 - DNA, 3681 bp, Artificial Sequence
  derived and/or modified sequence
atgggagacaagaaggatgacaaggacagccccaagaagaacaagggcaaggagcggcgggacctggatgacctgaagaaggaggtggccatgacagagcacaagatgtctgtggaggaggtgtgcaggaagtacaacacagactgtgtgcagggcctgacccacagcaaggcccaggagatcctggccagagatggccccaatgccctgaccccaccacccaccaccccagagtgggtgaagttctgccggcagctgtttggaggcttcagcatcctgctgtggattggagccatcctgtgcttcctggcctacggcatccaggccggcacagaagatgaccccagcggggacaacctgtacctgggcatcgtgctggccgctgtggtgatcatcaccggctgcttctcctactaccaggaggccaagagcagcaagatcatggagagcttcaagaacatggtgccccagcaggccctggtgatccgggagggggagaagatgcaggtgaatgctgaggaggtggtggtgggggacctggtggagatcaagggcggggacagagtgcctgctgacctgcgcatcatcagcgcccacggctgcaaggtggacaacagcagcctgactggagagagcgagccccagaccaggagcccagactgcacccatgacaaccccctggagaccaggaacatcaccttcttcagcaccaactgtgtggagggcacagcccggggcgtggtggtggccactggagacagaacagtgatgggccgcatcgccaccctggccagcggcctggaggtgggcaagacccccatcgccatcgagattgagcacttcatccagctgatcaccggggtggccgtgttcctgggcgtgtccttcttcatcctgagcctcatcctgggctacacctggctggaggccgtcatcttcctgattggcatcatcgtggccaacgtgcctgagggcctgctggccaccgtgacagtgtgcctgaccctgacagccaagaggatggccaggaagaactgcctggtgaagaacctggaggccgtggagaccctgggcagcaccagcaccatctgcagcgacaagacaggcaccctgacccagaacaggatgacagtggcccacatgtggtttgacaaccagatccacgaggccgacaccacagaggaccagagcggcaccagctttgacaagagcagccacacctgggtggccctgagccacatcgccggcctgtgcaacagagctgtgttcaagggcggccaggacaacatccctgtgctgaagagagatgtggccggagatgccagcgagagcgccctgctgaagtgcatcgagctgagcagcggctctgtgaagctgatgagggagaggaacaagaaggtggccgagatccccttcaacagcaccaacaagtaccagctgagcatccatgaaacagaggaccccaatgacaaccgctacctgctggtgatgaagggggcccctgagcgcatcctggaccgctgcagcaccatcctgctgcagggcaaggagcagcccctggatgaggagatgaaggaggccttccagaatgcctacctggagctgggcggcctgggggagcgggtgctgggcttctgccactactacctgcctgaggagcagttccccaagggctttgcctttgactgtgatgatgtgaacttcaccacagacaacctgtgctttgtgggcctgatgtccatgattgacccccccagggctgctgtgcctgatgctgtgggcaaatgtagatctgctggcatcaaggtgatcatggtgactggagaccaccccatcacagccaaggccatcgccaagggcgtgggcatcatcagcgagggcaatgagaccgtggaggacattgctgcccggctgaacatccctgtgtcccaggtgaaccccagagatgccaaggcctgtgtgatccacggcacagacctgaaggacttcaccagcgagcagattgatgagatcctgcagaaccacacagagatcgtgtttgcccggaccagcccccagcagaagctgatcatcgtggagggctgccagaggcagggcgccatcgtggccgtgactggagatggagtgaatgacagccctgccctgaagaaggctgacatcggcgtggccatgggcattgctggcagtgatgtgtccaagcaggccgctgacatgatcctgctggatgacaactttgccagcatcgtgactggagtggaggagggccgcctcatctttgacaacctgaagaagagcatcgcctacaccctgaccagcaacatccctgagatcacccccttcctgctcttcatcatggccaacatccccctgcccctgggcaccatcaccatcctgtgcatcgacctgggcacagacatggtgcctgccatcagcctggcctatgaggccgctgagagtgacatcatgaagaggcagcccaggaaccccaggacagacaagctggtgaatgaaagactcatctccatggcctacggccagatcggcatgatccaggccctgggcggcttcttctcctacttcgtcatcctggctgaaaatggcttcctgcccggcaacctggtgggcatccggctgaactgggatgacagaacagtgaatgacctggaggacagctatggccagcagtggacctatgagcagaggaaggtggtggagttcacctgccacacagccttctttgtgtccatcgtggtggtgcagtgggccgacctgatcatctgcaagaccaggagaaattctgtgttccagcagggcatgaagaacaagatcctgatcttcggcctgtttgaggagacagccctggccgccttcctgagctactgccccggcatggatgtggccctgaggatgtaccccctgaagcccagctggtggttctgtgccttcccctacagcttcctgatctttgtgtatgatgagatcaggaagctgatcctgcggagaaatcctggaggagagggcgcccggcagggcagccggggcggccgcggggctgctggcagccaggccgccggcccccggctgcccagcccctgctggatggccctgcccccaggcagccacagcagcctgagcagccacctgagcggccaccccctgtgcctgctgaccggcctgtgcctgtgtggcttcctggtgtccctgcccctgtgccccagcctgtgctgggccgcccggctggcctgcctgagccccagcctgaccctgagcctgtccttcctgctgtgcctgagccggctgggcggggagggcaacctgctgctgaccagcgccccaccccaccggcccagcctgcccaggcctcctggccctggcccccccctgtctgtgccccccatcctgtacagcggcggccgcagccccctcttcctgtggccccacctgggcccccaccccctgcactacctgctgcccccacccctgtggctggccagcctgccctgccccaagcccctgagcagcctcttctctgtgtctgtgtccctgcccctgctgacccccctgagcatccccccagccccagccaccagcctgggcagcttcctgctgcccttcagccccccagcagatgccatcagcggcagcggccagctgagcaacatctctgtgggccgggagtag

SEQ ID NO: 90005 - DNA, 444 bp, Artificial Sequence
  derived and/or modified sequence
atgggcagcggcggcagtgacagctacagaattgccaccagccaggacaagaaggatgacaaggacagccccaagaagaacaagggcaaggagcggcgggacctggatgacctgaagaaggaggtggccatgacagagcacaagatgtctgtggaggaggtgtgcaggaagtacaacacagactgtgtgcagggcctgacccacagcaaggcccaggagatcctggccagagatggccccaatgccctgaccccaccacccaccaccccagagtgggtgaagttctgccggcagctgtttggaggcttcagcatcctgctgtggattggagccatcctgtgcttcctggcctacggcatccaggccggcacagaagatgaccccagcggggacaacctgtacctgggcatcgtgctggccgctgtggtgatcatcaccggctag

SEQ ID NO: 90006 - DNA, 3081 bp, Artificial Sequence
  derived and/or modified sequence
atgggcagcggcggcagtgacagctacagaattgccaccagccaggacaagaaggatgacaaggacagccccaagaagaacaagggcaaggagcggcgggacctggatgacctgaagaaggaggtggccatgacagagcacaagatgtctgtggaggaggtgtgcaggaagtacaacacagactgtgtgcagggcctgacccacagcaaggcccaggagatcctggccagagatggccccaatgccctgaccccaccacccaccaccccagagtgggtgaagttctgccggcagctgtttggaggcttcagcatcctgctgtggattggagccatcctgtgcttcctggcctacggcatccaggccggcacagaagatgaccccagcggggacaacctgtacctgggcatcgtgctggccgctgtggtgatcatcaccggctgcttctcctactaccaggaggccaagagcagcaagatcatggagagcttcaagaacatggtgccccagcaggccctggtgatccgggagggggagaagatgcaggtgaatgctgaggaggtggtggtgggggacctggtggagatcaagggcggggacagagtgcctgctgacctgcgcatcatcagcgcccacggctgcaaggtggacaacagcagcctgaccggggagagcgagccccagaccaggagcccagactgcacccatgacaaccccctggagaccaggaacatcaccttcttcagcaccaactgtgtggagggcacagcccggggcgtggtggtggccaccggggacagaacagtgatgggcagaattgccaccctggccagcggcctggaggtgggcaagacccccatcgccattgaaattgagcacttcatccagctgatcactggagtggccgtgttcctgggcgtgtccttcttcatcctgagcctcatcctgggctacacctggctggaggccgtcatcttcctgattggcatcatcgtggccaacgtgcctgagggcctgctggccaccgtgacagtgtgcctgaccctgacagccaagaggatggccaggaagaactgcctggtgaagaacctggaggccgtggagaccctgggcagcaccagcaccatctgcagcgacaagacaggcaccctgacccagaacaggatgacagtggcccacatgtggtttgacaaccagatccatgaagctgacaccacagaggaccagagcggcaccagctttgacaagagcagccacacctgggtggccctgagccacatcgccggcctgtgcaacagagctgtgttcaagggcggccaggacaacatccctgtgctgaagagagatgtggccggagatgccagcgagagcgccctgctgaagtgcatcgagctgagcagcggctctgtgaagctgatgagggagaggaacaagaaggtggccgagatccccttcaacagcaccaacaagtaccagctgagcatccacgagacagaggaccccaatgacaaccgctacctgctggtgatgaagggggcccctgagcgcatcctggaccgctgcagcaccatcctgctgcagggcaaggagcagcccctggatgaggagatgaaggaggccttccagaatgcctacctggagctgggcggcctgggggagcgggtgctgggcttctgccactactacctgcctgaggagcagttccccaagggctttgcctttgactgtgatgatgtgaacttcaccacagacaacctgtgctttgtgggcctgatgtccatgattgatcctcccagggctgctgtgcctgatgctgtgggcaagtgccgctctgctggcatcaaggtgatcatggtgactggagaccaccccatcacagccaaggccatcgccaagggcgtgggcatcatcagcgagggcaatgaaacagtggaggacattgctgcccggctgaacatccctgtgtcccaggtgaaccccagagatgccaaggcctgcgtcatccatggaacagacctgaaggacttcaccagcgagcagattgatgagatcctgcagaaccacacagaaattgtgtttgcccggaccagcccccagcagaagctgatcatcgtggagggctgccagaggcagggcgccatcgtggccgtgactggagatggagtgaatgacagccctgccctgaagaaggctgacattggagtggccatgggcattgctggcagtgatgtgtccaagcaggccgctgacatgatcctgctggatgacaactttgccagcatcgtgactggagtggaggagggccgcctcatctttgacaacctgaagaagagcatcgcctacaccctgaccagcaacatccctgagatcacccccttcctgctcttcatcatggccaacatccccctgcccctgggcaccatcaccatcctgtgcatcgacctgggcacagacatggtgcctgccatcagcctggcctatgaagctgctgagagtgacatcatgaagaggcagcccaggaaccccaggacagacaagctggtgaatgaaagactcatctccatggcctacggccagatcggcatgatccaggccctgggcggcttcttctcctactttgtgatcctggccgagaatggcttcctgcccggcaacctggtgggcatccggctgaactgggatgacagaacagtgaatgacctggaggacagctatggccagcagtggacctatgagcagaggaaggtggtggagttcacctgccacacagccttctttgtgtccatcgtggtggtgcagtgggccgacctgatcatctgcaagaccaggaggaacagcgtcttccagcagggcatgaagaacaagatcctgatcttcggcctgtttgaggagacagccctggccgccttcctgagctactgccccggcatggatgtggccctgaggatgtaccccctgaagcccagctggtggttctgtgccttcccctacagcttcctgatctttgtgtatgatgagatcaggaagctgatcctgcggaggaaccctgggggctgggtggagaaggagacctactactag

SEQ ID NO: 90007 - DNA, 3042 bp, Artificial Sequence
  derived and/or modified sequence
atgggcgacaagaaggacgacaaggacagccccaagaagaacaaggggaaggaacgtcgcgaccttgatgatctgaagaaagaagttgcaatgactgagcacaaaatgtcagttgaggaagtctgtcgaaagtacaatacggactgtgtccaggggctcacccactcaaaagcccaggagatcctagcccgggacgggccaaatgccttgacgccacctcctaccacgccagagtgggtgaaattctgccgacaactatttggtggattcagtatattactgtggattggagccatcctctgctttctggcctatggaattcaggccggaaccgaagacgatcccagcggtgacaatctgtacctcgggatcgtgttggcagcagtagtaattatcaccggttgcttcagttactatcaggaagctaagagtagtaaaatcatggagagcttcaagaatatggtcccccaacaggcgctagtgattagagaaggggaaaaaatgcaagtaaatgccgaagaggtggtggtgggcgacctggtggaaataaaaggcggtgacagagtgcccgctgacctccggatcatttcagcccatggctgcaaggtggataattcatctctaaccggcgagtctgaaccacagacccggagccccgactgtacccatgacaatcccctcgaaactcggaacattactttcttcagtacaaactgcgtggaaggcacggccagaggggtcgttgtcgctacaggagaccgaactgttatgggaagaatcgctacactagcgtcagggctggaggtcggaaagactcccatcgccatcgagattgaacatttcatacagctaattactggcgttgccgtcttcctgggcgtctccttcttcatcctttccttgattctgggttacacctggcttgaggccgttatctttctgatcggcatcatagtcgcaaacgtgcccgaaggtttgcttgctacagtcaccgtctgccttactctgacagctaagcgaatggctagaaagaattgtttagtgaagaacctcgaggcggtcgagaccctaggcagcacaagcaccatctgtagcgataagacggggaccctgacgcaaaatagaatgaccgtcgcgcacatgtggttcgataaccagattcatgaggccgataccaccgaggatcagagtggtacctcctttgataaatcttcccatacctgggtagcactgagccacatcgcagggttgtgcaacagggctgtcttcaagggcggccaggataacattccagtgcttaagcgcgatgtggctggggacgcttccgaatctgcgctgttaaagtgtattgaattgtctagtggcagtgtgaagctaatgagggagcgcaataaaaaagtggccgagattccatttaacagtacgaataaataccagctgagtatacacgagaccgaggacccgaatgataaccgatatcttctggtgatgaaaggcgctccagagcgaattttagaccggtgcagtaccatcttgcttcaagggaaggagcaacccctggatgaagaaatgaaggaagcattccagaacgcttacctcgaattgggaggccttggtgagcgggtgcttggcttttgccattattacctccctgaagaacaatttcctaaaggattcgcctttgactgcgacgacgtcaattttactacggataatttgtgtttcgtcggtttaatgtcaatgatcgaccctcctcgagctgctgtaccggacgcagtggggaagtgcaggtctgctggaattaaggtcattatggtgacaggcgatcacccaataacggcaaaggcgatcgccaagggagtgggtattatcagtgaaggaaacgagactgtggaagatattgccgctagacttaacatccctgtgagtcaggttaatccccgggatgccaaagcttgcgtgattcacggaactgacttgaaagatttcacctcggaacagatcgacgaaatcttgcagaaccacaccgaaatcgttttcgctagaacctcaccccagcaaaagctgatcattgttgaaggttgccagagacagggcgccattgttgcagtgaccggggacggagtaaatgattccccggccctcaaaaaagccgatatcggcgtagcgatggggatcgctggatcagatgtgtccaagcaggctgccgacatgattctgctggatgacaacttcgcgtcgatagtgacaggagtggaagaaggtcgtctgatattcgacaacttaaaaaaaagtatcgcatacaccctgacctcgaacatcccagagatcaccccatttctgttatttatcatggccaacatcccacttcctctgggtacgattactatcctttgtatcgacctggggacggacatggttcccgcaatctcccttgcctacgaggccgcagagtcagacattatgaagcggcagccaagaaaccctcgtaccgataagttggtaaatgaacgccttatctccatggcctacggacaaattgggatgatacaggcgttgggggggttcttcagctatttcgtgatactcgctgagaacggcttcttacccggcaacttggtagggatccgtcttaattgggatgacaggactgtcaatgacttggaagacagttatgggcaacagtggacctacgaacagaggaaggttgtggaatttacatgtcacaccgccttctttgtctccatcgtagtggtccaatgggctgatctcatcatctgtaagacaaggcggaatagtgtctttcagcaggggatgaagaataagatacttatctttgggctttttgaggagacagcactggctgcatttttgagttattgccccggaatggatgtggcactcagaatgtaccccctgaaaccatcttggtggttctgtgccttcccttactcattcctcattttcgtctatgatgagattcgcaaactgatattgcgaaggaaccctggcggctgggtggagaaggagacctattactag

SEQ ID NO: 90008 - DNA, 3681 bp, Artificial Sequence
  derived and/or modified sequence
atgggcgacaagaaggacgacaaggacagccccaagaagaacaagggaaaggagcgccgagaccttgacgatctgaagaaggaagtagccatgacggagcacaaaatgagcgttgaggaggtgtgccgcaagtacaataccgattgtgtgcagggtttgacacactcaaaggcccaagaaatactcgccagagacgggcccaatgccctcacccctccacccaccactcccgagtgggtgaagttctgtaggcagctgttcggcggtttcagtatactgctgtggatcggggccattttgtgcttccttgcttatggcatccaggcaggaactgaggatgaccctagtggggacaacctgtacctcggtatcgttctggcagcagtggtgatcatcactggatgcttctcttattatcaggaagctaaatctagcaaaatcatggagtcttttaaaaatatggtgccccagcaggccctcgtcatccgtgagggcgaaaaaatgcaggtaaacgccgaggaggtcgtcgtgggagacctagtggagataaaggggggcgacagagtaccagccgacctccgtattatatccgcacatggatgcaaggtggacaattccagcctgaccggcgagagtgagccacagacacggagtcccgactgtacccatgataacccgcttgaaaccagaaacatcacctttttctccaccaactgcgtagaagggacagcacgtggcgtggtcgttgctacaggggatcgaacagtgatgggccggatcgctacactagcatccggactcgaggtgggaaagactcccatcgcgatcgaaatcgagcactttatacagttgattactggggtggcagtatttctgggtgtcagtttcttcatcctgagtctgatcctcggttacacctggctggaggctgtgatcttcctgatcggaatcatagtcgccaacgtgcccgaaggactgcttgctaccgtaaccgtgtgcttgaccctcacggccaagaggatggcccgcaagaattgcctcgtgaagaacttggaagccgtcgaaacgctgggctccacctccactatttgcagcgacaagaccggcacgttgacacagaacaggatgacagtcgcacacatgtggtttgacaaccagattcacgaggccgatactaccgaggaccagagcggcacaagcttcgataagagcagtcatacgtgggtcgcactttcccacattgcaggactgtgtaatagggcagtgtttaaaggcggacaggacaatataccagtgttgaagcgggatgtggccggggacgctagcgaaagcgcactactgaaatgtatagagctttctagcggctcggtgaaacttatgagagagaggaataagaaagtcgccgagattcctttcaattccactaacaagtaccagctctcaattcatgaaacagaggaccctaatgacaaccggtacctcttggtgatgaagggcgcccccgagcgtattctggaccgctgttcgactattctcctacaagggaaagaacagcctcttgacgaagaaatgaaagaggccttccagaacgcctatcttgaactaggtggacttggcgagagagtgctaggtttctgtcattattatcttccagaagaacagttccctaaaggcttcgccttcgactgcgatgatgttaacttcactactgataacctatgttttgttggactgatgtcgatgatcgaccccccccgggccgcggtcccagatgccgttggtaagtgccgtagcgccggcatcaaagtgatcatggtcacaggtgatcaccctattacagctaaggctatagccaagggcgtggggataatctccgaaggcaatgagaccgtggaagacatcgctgcccggctcaatatccccgtgtcccaagtcaacccgcgggacgccaaagcgtgcgtaatacacggaactgatctgaaggattttacttcagaacaaattgatgaaatacttcagaatcataccgaaatagtgttcgcgcgaacctcaccgcagcaaaaactaatcattgtggaggggtgccagagacaaggggccattgtggccgttacaggggacggggtcaacgatagtcccgctctgaagaaagccgacatcggggtggccatgggaattgctggcagcgatgtgagtaagcaggccgctgacatgatcctcttggacgacaactttgcgtccattgtcacaggcgtcgaggaaggacgactgatttttgataacctcaagaaatcaattgcatatacgcttacgtcgaacatacctgagataacaccatttctgctgtttattatggcaaatatccctttgcccctcggcacaattacaatcttgtgcatcgacttggggactgatatggtgccggcaatatctctggcttatgaggccgccgagagtgatattatgaaaaggcagcctaggaatcccagaacggacaaacttgtgaacgagcgcctgatctcaatggcctatggccagatagggatgatccaggccctgggcgggttcttttcatactttgtaatcctcgcagagaatgggttcctgccaggcaacctcgttggcatccgcctaaattgggacgacaggactgtgaacgacctagaagattcatatggtcagcagtggacctatgaacagcgtaaggtggtggagtttacctgtcacactgctttctttgtttctatcgtggtagtccagtgggcagaccttattatctgtaagactagaaggaattcagtgtttcagcaagggatgaaaaacaaaatcctaatcttcgggctgtttgaggaaactgccctcgcagccttcctcagttactgcccgggaatggacgtggccctgaggatgtaccctttgaagccctcttggtggttctgcgcattcccatactctttcttaatcttcgtgtacgacgaaatacgcaaactaatcttgcgcagaaaccctggcggagagggtgctcggcagggctccagagggggccggggagctgccggatcccaggccgccggacctcgtttaccttctccttgctggatggcacttccccctggcagccactccagcttgagttcacatctgagcgggcatcctctttgtctattaaccggcctgtgcctctgtgggttcctggtgtctctgccactgtgcccaagcctttgttgggccgcccgactcgcttgtttgtcaccctcactgactctgagcctttcttttctgctgtgtctcagccgacttggcggggagggcaatctgctgctcaccagtgcccctcctcaccgcccgtcactcccacgtcctcctggtcctgggcctcccctttccgtgcccccgatcttgtactcagggggccgctccccgttgttcctttggccacacctcggcccccaccccctgcactacttgctgcccccacccttgtggctagcaagcctaccttgcccaaagcctctgtcgagtctgttctccgtctcagtaagcttgccacttttaacccccctgtcaattccaccagctcccgccacttccttgggatctttcctgttacctttctccccccccgcagacgccatttctggaagcgggcaactgtctaacatctccgtcggacgggagtag

SEQ ID NO: 90009 - DNA, 444 bp, Artificial Sequence
  derived and/or modified sequence
atgggcagcggcggcagcgacagctaccggatcgccaccagccaggacaagaaggatgacaaggactcaccgaagaagaacaagggtaaagagcgacgcgatctggacgatcttaagaaggaggtggctatgactgaacacaagatgtctgtggaagaggtttgcagaaagtataatacagactgcgtgcagggcttgacacactccaaggcccaggaaatactggctcgagatggccccaatgctttgacaccccctcccacaacccctgagtgggttaagttttgcaggcaactgttcgggggattttctatcctactgtggatcggggccattttgtgctttctggcttacgggatccaggcaggaaccgaagacgaccctagtggggacaatttgtacctgggaattgtgctggcggcggttgtgattataaccgggtag

SEQ ID NO: 90010 - DNA, 3081 bp, Artificial Sequence
  derived and/or modified sequence
atgggcagcggcggcagcgacagctaccggatcgccaccagccaggataagaaggatgacaaagattctccaaagaaaaacaaaggcaaagagcgacgggatctcgacgacctcaagaaagaagttgccatgaccgaacataagatgagtgttgaagaggtgtgtaggaagtacaatacagactgtgttcagggcctcacacacagcaaggcacaggaaatcctggcgcgcgacggcccaaatgctttaactcctccccctaccacgccagagtgggtgaaattttgccggcagctgttcggaggattcagtattcttctgtggattggcgcaatcctgtgcttcttggcctacgggatccaagctggtaccgaggatgatccatcaggggataatctgtatctgggcattgtgcttgctgcagtggtaattatcaccggctgtttttcctactaccaggaggcaaagtcatccaaaataatggagtcctttaagaacatggttccgcaacaggctttagtgatccgtgagggagaaaagatgcaggtgaatgctgaagaggtcgtggttggagatctggtggagattaaaggaggcgaccgcgtgccagcggaccttaggatcatctcagcccacggctgtaaggttgacaatagtagcctgaccggggagtcagaaccgcagaccaggagccccgactgcacccacgacaaccctctggaaacccgcaacattaccttctttagcacgaattgcgtagagggaacagcccgcggcgtagtggtagcaactggtgatagaacagtcatgggaagaatcgctactctggcatccggcctcgaggtcgggaagacgcctattgcaatagaaattgaacattttattcagctgatcaccggggtcgccgtgttcctgggagtgtccttctttattttgagcctcatcttggggtacacttggctggaggctgttatctttctgattggcatcatcgtagcaaatgtacccgagggactgttggctactgttaccgtctgtttgactctgacggctaaacggatggcaaggaaaaattgcctggtgaaaaatcttgaggcagtcgaaaccctaggcagcaccagcacaatatgctccgataagacgggcactctgacccagaaccggatgactgtggcccacatgtggtttgacaatcagatccacgaagcagacactactgaagatcagtccggtacttcgttcgataagtctagtcatacctgggtcgccctttcccacattgccggtttgtgtaaccgtgctgtttttaagggaggccaagacaacatccccgtgctcaagagggatgtggccggcgatgcaagcgagtcagcactgctcaaatgtatcgaactctcatctggctcagtcaaactgatgagagagcgcaacaaaaaggtcgccgaaatacctttcaactccaccaataagtaccagctgagcatccacgagactgaggaccccaatgacaataggtaccttttagtgatgaagggcgctccagaaaggatcctagatagatgctctaccattttactacagggtaaggagcagcctctcgatgaggaaatgaaagaggccttccagaatgcttatttagaactgggaggacttggggaacgtgtcttgggtttttgtcactattatctgcctgaggagcagttcccaaaaggttttgccttcgactgcgatgatgtgaactttaccactgacaacttgtgtttcgttggcctcatgagtatgatcgacccgcctcgcgctgccgtcccggatgctgtgggcaagtgccgctcagctggcatcaaggtgattatggtgaccggggatcatccaatcaccgctaaggctatcgcaaagggcgtagggataataagtgaaggaaacgaaactgtggaggacattgcagcacgactaaatattcccgtgagccaggtcaaccctcgtgacgccaaggcttgcgtgattcatggcaccgatctcaaagatttcacgtccgagcagatcgacgaaatactgcagaaccacacagagatcgtgttcgcacgaaccagcccacagcagaagctcatcatcgttgagggctgtcagaggcagggcgctattgttgcagttaccggcgatggcgtcaatgactccccagccctcaaaaaggctgacattggggtagcgatgggtattgcagggtctgatgtaagtaaacaggctgctgacatgatccttctcgacgacaatttcgcctccatcgttactggagtggaggagggacgtctgatctttgacaatctgaaaaagagcattgcctacaccttgacttcgaatatacctgagattacaccattcctacttttcatcatggccaatataccactgccactgggcacaataacgattctttgtatcgatctgggaactgacatggttccggctatctcactcgcctacgaagctgccgagtccgatattatgaaacgccagccccggaaccctagaaccgacaagctggtgaatgaacggctcattagcatggcctatggacagattggcatgatccaggccctaggggggttcttctcttactttgtaatactagcagaaaatggctttctgcccggcaatctggtggggattcgcctgaattgggatgatagaactgttaatgacctcgaagattcctacggccagcagtggacctacgaacaacgcaaagtggtggaatttacatgtcatacagctttttttgtctccatagtagtggttcaatgggctgacctgatcatatgcaaaacaagacgaaacagtgtgtttcagcaggggatgaaaaacaagatactcatattcggattgttcgaagagaccgcactggccgccttcttgtcatattgtccagggatggacgtggctctacgaatgtatccccttaaaccttcctggtggttctgcgcatttccttactctttcctcatattcgtgtatgacgaaatcagaaagttgatcctgcgcaggaatcccggaggctgggtggagaaggaaacctattattag

SEQ ID NO: 90011 - DNA, 3042 bp, Artificial Sequence
  derived and/or modified sequence
atgggagataaaaaagatgacaaagacagccctaagaaaaacaagggaaaggaacggagagatttagatgatctcaaaaaagaggtggccatgacagagcacaaaatgagtgtagaggaagtgtgccgtaagtacaacacggactgcgtgcagggactgactcatagcaaggcgcaggaaattctggcccgagacgggccaaacgcccttacccctccccctaccacccccgagtgggtgaagttttgtcggcagctattcgggggtttttcaatcttgttgtggatcggagcaatcctgtgtttcctggcctacggaattcaagcaggcactgaggatgacccgtctggagacaatctctacctcggaatcgtgttagctgccgtcgttattataaccgggtgtttttcatactaccaggaggccaagtccagcaagatcatggaatcgttcaagaatatggtccctcaacaagccttggttatcagggagggtgagaaaatgcaggtaaacgccgaggaagtggtggtgggcgatctggtcgagatcaaggggggtgacagagtgccagccgacctgagaattattagtgcacatggctgcaaagtagacaactcttctctgactggcgagtcagaacctcagacccggagccccgattgtactcacgacaacccattggagactaggaacatcactttcttcagtaccaactgtgttgagggtactgcgagaggcgtggttgtggccactggagatcgcaccgttatgggacgaatcgccacccttgcatccggtctggaggtcgggaaaactcctattgcgattgagatcgaacacttcattcaactgataacaggagttgctgtgttcttgggggtgagctttttcatcttgtccttaatcctggggtacacctggctggaagctgtcatcttcctgattggaattatagtggcaaacgtccccgaggggttactcgcgacggtaactgtgtgtctgactttgaccgctaaacgtatggccagaaagaattgtctggtgaaaaatctggaggccgtcgaaactctgggtagcaccagcactatttgcagcgataaaaccggcaccttgactcagaatagaatgaccgtggcccatatgtggttcgacaaccaaattcacgaggccgacaccacggaggatcagtcagggacctctttcgacaaaagctctcatacttgggtcgcgctgtcgcatatagctggtctttgtaatagagctgttttcaagggaggccaggacaacatccctgtactcaaaagggacgtggccggagacgcgagtgaaagcgccctgctcaagtgcatcgaactgagctctggtagtgttaaactgatgagggaacggaacaagaaggtggccgagatcccgttcaactcgacgaacaagtaccagctgtcaattcacgagacggaggacccgaatgataaccggtatttgttagtgatgaaaggggctcccgagagaatcctggaccgatgcagcacaatattgctgcagggaaaggaacaacccctcgacgaagaaatgaaggaggcctttcagaacgcctacctcgagctgggtggtctgggcgagagagttctgggattctgccactattacctccccgaggagcagtttccaaagggattcgcgtttgattgtgatgatgtcaatttcaccacagacaacctctgctttgttggcctgatgagtatgattgacccaccacgtgcggctgtaccagacgccgtgggcaaatgcagaagcgcaggcatcaaggtcattatggtcaccggggaccaccccatcacagccaaagccattgcgaaaggcgtgggcatcatcagcgaaggtaatgagactgtcgaggatatagctgctcggctgaatatccctgtgtcacaagtaaaccccagggatgcaaaggcctgcgtgattcacggaacagatcttaaagatttcacctcggagcagatagatgaaattctacagaatcatactgaaatcgtattcgcccgtacttcaccccagcagaagcttattatcgtggagggctgtcagagacagggcgctatagtggcagtgaccggtgatggcgtcaacgattcccctgcccttaagaaagcagatataggcgtggccatgggtattgccggtagtgacgtgtcgaagcaggcagccgacatgattcttctggatgataattttgcatcaatcgtaacaggcgtcgaagaagggaggcttatttttgacaacttgaaaaagtcaattgcatacaccctgaccagcaacatcccagaaatcacgcccttcctccttttcatcatggcaaacatacctctgcctctaggtacgataaccattctctgcattgatctcggaacagatatggttcctgctatatccctggcatatgaagcagcagagtccgacattatgaagagacagccgaggaacccacgaacagataaattagtcaacgaaaggctcatctctatggcctatggccagatcggcatgattcaggccctcggaggctttttctcctattttgttatcttagccgaaaacgggttcctgcctggaaatctggtgggtatcaggcttaattgggatgaccggaccgtaaacgacctggaggattcttacgggcaacagtggacatatgagcagagaaaggtggtagaatttacctgtcataccgcctttttcgtttccattgtagtggttcaatgggctgaccttattatctgcaaaacccgacgcaacagtgtttttcagcagggaatgaaaaacaaaatcctgatcttcggcctattcgaggaaactgccttggcagccttcctttcatattgccccggtatggatgttgctttaagaatgtatcctctgaagccctcctggtggttctgcgcctttccctatagtttcctcatatttgtgtacgacgagattaggaagctaatattaaggcgaaaccctgggggttgggtagagaaggaaacgtactattag

SEQ ID NO: 90012 - DNA, 3681 bp, Artificial Sequence
  derived and/or modified sequence
atgggtgataagaaggatgacaaggatagtcccaagaaaaataaaggcaaggaaaggagagatttggacgacttaaaaaaggaagttgccatgactgagcataaaatgtctgtggaagaggtttgtcggaagtataatacagactgtgtgcagggccttactcactccaaagctcaggagatcctcgcacgcgacggccctaacgcgcttaccccgccacctacgacgccagaatgggttaagttttgccggcagctattcgggggtttctcaatcctactgtggatcggagctatcctctgcttcttggcctacgggatccaagctggtaccgaggatgacccctctggcgataacctatatttgggaattgtcctggcagccgtggtgatcatcactggttgtttctcatactaccaggaagccaaaagtagcaaaattatggagtcattcaaaaatatggttccacagcaggccctggtgattagggagggggagaaaatgcaggtgaatgcagaggaagttgtggttggagatttggtcgagatcaagggtggcgacagggtgccagccgacctgcgcatcatctcagcgcatggatgtaaggtcgacaactcaagcctgactggagagtctgagccacagactagaagccccgactgtacccacgataatccgttggagaccagaaacatcaccttcttttccacaaactgcgttgagggaactgcacggggtgtggttgtcgccacaggggaccgtacagtgatgggtcggattgcaaccctggcctcagggctcgaggtgggtaagacgccaatcgccatcgagatcgaacatttcatccagttgatcaccggcgtagcagttttcctaggggtatccttcttcatcctgtcgctgattctgggatacacttggctggaggcggtcatattcctcatcggcatcattgtagctaacgtgcccgaggggttgcttgccactgtcacagtgtgtctgactctcactgcaaaacgcatggctagaaaaaactgtctggtgaagaacttagaggccgtagaaacactgggatccacttccactatctgtagtgataagacagggaccctgacacaaaatagaatgactgtggcccatatgtggtttgataaccagattcatgaagccgatacaaccgaagaccagtctggcactagcttcgacaaatcatcacacacctgggtggctctatcgcatatcgccggtctctgtaaccgggcagtttttaaaggcggacaggataacatccctgtgcttaaacgggacgttgccggagacgccagtgaatcagcactactgaaatgtatcgagctgagttccggttctgtgaagctcatgcgcgaacgtaataaaaaagtggccgagatcccttttaattccactaacaaatatcagctctccattcacgagacagaggacccaaacgataatagatatctgctcgtgatgaagggtgctcctgagaggatcctggacaggtgttccaccattctgttgcagggcaaggaacaacctctcgacgaagaaatgaaagaggcctttcagaatgcatacctagagctgggcggacttggcgaacgagtgctgggtttctgccattattacctgcccgaggaacagttcccaaaagggtttgccttcgactgcgacgatgtgaacttcaccaccgataacttgtgctttgtagggttgatgagtatgatcgatccacctagggccgcagtccctgacgcagtaggcaagtgcaggtcagcagggattaaagtaatcatggtgactggggatcatcccataaccgcaaaggcaattgccaaaggcgtgggtattattagcgagggaaacgagactgtggaagatatagctgccaggctgaacattcccgttagccaggtaaatcccagagatgccaaggcctgtgttattcacggaacggaccttaaagattttacatcagaacagatagatgaaattctgcagaaccatactgagattgtttttgcaaggacgagtccccagcagaagctgatcattgtggaaggctgtcagcgtcagggtgccatcgtggctgtgactggcgatggagtgaatgattctccagccctgaagaaagcagacatcggggtggcgatgggcatagcaggctccgacgtgagcaagcaggcagccgacatgatcctgctcgacgataacttcgcctcaatagtcacaggcgttgaggagggccgtctgatctttgacaatctcaagaagagcattgcttacaccctgactagcaacattcccgaaattacacctttcctattgttcattatggccaacatacccttgcctctaggcactataactattctgtgtatagatctgggcactgatatggttccagccataagcctcgcgtacgaagcagccgaatcagatattatgaagcgccagccgcgaaatcctaggacagataaattggttaatgagaggctgatctccatggcctacggccaaatcgggatgatccaagcgctcggagggttttttagctattttgtcatcctggccgagaatgggtttctgcctggcaacttagtgggcatccggttgaactgggacgatagaaccgtcaatgatttagaggacagctacggccagcagtggacatatgaacagcgcaaggtcgtggagtttacttgtcatacagcattcttcgttagcattgtagtggtccagtgggccgatctgatcatttgtaaaacacgcaggaacagtgtcttccagcagggtatgaagaataagatcctcatattcggtctgttcgaagagacagctctggcggcttttctgtcctactgccccggaatggacgtggccctgaggatgtatcctcttaagccaagttggtggttctgtgcattcccgtatagtttcctgatctttgtatacgacgaaatccgaaaattgatactccgcaggaaccctggcggagagggagcacggcagggatctaggggaggcagaggcgcagcgggatctcaggccgctgggcctcggttgccatctccgtgctggatggcactgcccccaggaagccattcgtccctctcatcacacctgtccgggcatcccctatgtctgcttacaggactgtgcctatgtggattcttagtgagcctccctctctgcccttccctgtgttgggccgctaggctagcatgcctcagcccttctctgacattgtctctgtcttttctcctgtgtctgagcagactaggcggtgagggaaacttactgcttaccagtgcgcctcctcatagaccaagtctccctcgcccaccaggcccaggacctcctctttccgtcccccctatcttatactccggaggtagatccccccttttcttatggccccaccttggaccgcatcccctgcactatctcttaccccctccgttgtggctggcctcgcttccatgtccaaagccactgagttctctgttttccgtgtccgtgagcctcccactgctcaccccccttagcattccgcctgcccctgctacttccctgggttcattcctgctgcccttctccccccctgcagacgcgattagtgggtccgggcagctgagcaacattagtgttggacgcgaatag

SEQ ID NO: 90013 - DNA, 444 bp, Artificial Sequence
  derived and/or modified sequence
atgggatctggtggaagcgattcatacagaatcgctacttctcaagacaagaaggacgataaagattccccaaaaaaaaacaaagggaaagaaaggcgcgatctggacgacctaaagaaggaggtggctatgacggagcacaagatgtccgtggaggaagtatgtcggaagtacaacaccgactgtgttcaaggattgacccattcaaaagcccaggagattctagccagagatgggcctaatgcgctgactccacctcccactacacctgagtgggtgaagttttgccgacagttgttcgggggtttcagcattttgctctggataggagcaatcttgtgctttctggcatatggaattcaggccggaacagaggacgatccttccggcgacaatctgtacctgggtattgtgctagcagccgtcgtgattataactgggtag

SEQ ID NO: 90014 - DNA, 3081 bp, Artificial Sequence
  derived and/or modified sequence
atgggctccggcggaagtgactcgtacaggattgctacctcacaagacaagaaagacgataaagactcacccaaaaaaaacaaagggaaagagcggcgtgacctcgacgacctgaagaaggaggtagcgatgaccgagcataaaatgtctgtggaggaagtctgccgcaagtacaatacggactgtgtgcaggggctgactcactcgaaagcccaggagatcctggcacgggacggacctaatgctctcacccccccacctacaactcccgaatgggtgaagttttgcagacagctgtttggcggatttagtatccttctgtggatcggagccatcctgtgcttcctggcttatggaatccaggcaggaaccgaggacgacccatccggagataacctatacctcgggatagtcctggccgcagtggtcataattaccgggtgcttctcctattatcaagaggctaaaagcagtaagatcatggagagtttcaagaatatggtcccccagcaggccttggttattagggaaggagagaagatgcaggtcaacgctgaggaagtggtggtgggagacttggtcgaaataaagggaggcgatagagtccccgcagatcttcgcattatctccgcccacggctgtaaggttgataattccagcctgaccggtgaaagtgagccccagacaaggagccctgattgtacccatgataatcctctggaaacccgaaacattaccttcttctcaacaaattgcgtggagggaacagccagaggagtggttgtggctacaggtgatcgaactgttatggggcgtatcgccaccctggcgagcggcctggaagtcggaaagacaccgatcgcaattgaaatagagcattttatccagctgataacgggtgtggccgttttcttgggcgtcagtttctttatcctatcgctaattttgggctatacatggctggaggctgtgatttttctgattggcataatcgtcgccaacgtccccgagggtctcctagcaactgtgaccgtgtgcctcacactgactgccaaaaggatggctcggaagaattgcctcgtcaagaatctggaggccgtcgaaacactgggatccacgagcaccatttgctccgataaaacaggcacactgacacagaaccgtatgactgtcgcccacatgtggtttgataaccagatacatgaagcagatactacggaggaccagtcaggcacgagtttcgataaaagttcccacacctgggttgcacttagtcacatcgccggactgtgtaacagggccgtgttcaaggggggacaggataatatacctgttcttaagagggacgtggccggtgacgcttccgaaagtgctctcctgaaatgtatcgaactgtcctctggcagcgttaagctgatgagggagagaaacaagaaagtcgctgaaattcccttcaactctaccaacaagtatcagctgtcaatccacgaaacggaggacccaaatgacaatagatacctgctcgttatgaagggcgctccagaacggattttagacaggtgctctacgatactgcttcagggtaaagaacagccactggatgaggaaatgaaagaggcgttccagaatgcttacctagaactgggtgggctgggagagcgggtgcttggcttttgtcactactatctgcccgaagagcagtttccaaagggctttgccttcgattgtgacgacgtgaacttcactacggataatctgtgttttgtggggttgatgtctatgattgacccccctcgcgctgctgtgcccgacgccgttgggaagtgtcgctccgccggaattaaggtgataatggtgacgggggatcacccgattactgcaaaggccattgccaaaggcgttggtattatctctgagggtaatgagacagtcgaggatattgctgcccgtctgaatatccctgtatctcaagtgaatcctcgagatgccaaagcatgcgtgatccatggaacagatctcaaggactttacctcggaacaaattgatgaaattctgcagaatcacacagagatcgtgtttgccagaacttctccccagcagaagctgatcatagtcgaagggtgtcagaggcagggcgcaatcgttgcagtaacaggggatggagtgaacgatagcccagctctgaagaaagctgacatcggggtggccatgggcattgctggctcagacgtctccaaacaggcagcggacatgatcctgctggatgataacttcgcctctatcgttaccggggttgaggagggacgccttatctttgacaatctcaagaaatccatcgcatatactcttacttcaaacattccggaaattactccctttttactgttcatcatggctaacataccgctcccactgggaacaataacaatcctgtgtatcgatctggggaccgacatggtgccggctatttccttggcatacgaagccgctgaatcagatattatgaagcgacagccaagaaatccccgtactgataagcttgtgaacgagcgcctcatcagcatggcttatgggcagattggcatgatccaggccctgggaggattcttctcatattttgtgatactggcggagaacggattccttcccggtaatttagtgggaattcgcctgaactgggatgaccgaacagtgaatgatctagaagactcctacgggcaacagtggacgtacgagcagcggaaggtggtcgaatttacgtgccatactgcatttttcgtgtcaattgtagtggtgcagtgggctgatctgatcatatgcaagactcgcagaaattcagtattccagcaaggcatgaagaataaaatcttaatcttcggcctgttcgaggagacagccctggcagcctttctgtcctattgccccggaatggacgtcgccctgcggatgtacccgttaaaacccagttggtggttctgcgcattcccttattccttcctcatcttcgtgtacgacgaaattcgaaagctgatcctgaggcgaaacccagggggatgggtcgagaaggagacctattactag

SEQ ID NO: 90015 - DNA, 3548 bp, Artificial Sequence
  derived and/or modified sequence
ctctgtgcggtgggaccaacggacggacggacggacgcgcgcacctaccgaggcgcgggcgctgcagaggctcccagcccaagcctgagcctgagcccgccccgaggtccccgccccgcccgcctggctctctcgccgcggagccgccaagatgggggacaagaaagatgacaaggactcacccaagaagaacaagggcaaggagcgccgggacctggatgacctcaagaaggaggtggctatgacagagcacaagatgtcagtggaagaggtctgccggaaatacaacacagactgtgtgcagggtttgacccacagcaaagcccaggagatcctggcccgggatgggcctaacgcactcacgccaccgcctaccaccccagagtgggtcaagttttgccggcagctcttcgggggcttctccatcctgctgtggatcggggctatcctctgcttcctggcctacggtatccaggcgggcaccgaggacgacccctctggtgacaacctgtacctgggcatcgtgctggcggccgtggtgatcatcactggctgcttctcctactaccaggaggccaagagctccaagatcatggagtccttcaagaacatggtgccccagcaagccctggtgatccgggaaggtgagaagatgcaggtgaacgctgaggaggtggtggtcggggacctggtggagatcaagggtggagaccgagtgccagctgacctgcggatcatctcagcccacggctgcaaggtggacaactcctccctgactggcgaatccgagccccagactcgctctcccgactgcactcacgacaaccccttggagactcggaacatcaccttcttttccaccaactgtgtggaaggcacggctcggggcgtggtggtggccacgggcgaccgcactgtcatgggccgtatcgccaccctggcatcagggctggaggtgggcaagacgcccatcgccatcgagattgagcacttcatccagctcatcaccggcgtggctgtcttcctgggtgtctccttcttcatcctctccctcattctcggatacacctggcttgaggctgtcatcttcctcatcggcatcatcgtggccaatgtcccagagggtctgctggccactgtcactgtgtgtctgacgctgaccgccaagcgcatggcccggaagaactgcctggtgaagaacctggaggctgtagaaaccctgggctccacgtccaccatctgctcagataagacagggaccctcactcagaaccgcatgacagtcgcccacatgtggtttgacaaccagatccacgaggctgacaccactgaggaccagtcagggacctcatttgacaagagttcgcacacctgggtggccctgtctcacatcgctgggctctgcaatcgcgctgtcttcaagggtggtcaggacaacatccctgtgctcaagagggatgtggctggggatgcgtctgagtctgccctgctcaagtgcatcgagctgtcctctggctccgtgaagctgatgcgtgaacgcaacaagaaagtggctgagattcccttcaattccaccaacaaataccagctctccatccatgagaccgaggaccccaacgacaaccgatacctgctggtgatgaagggtgcccccgagcgcatcctggaccgctgctccaccatcctgctacagggcaaggagcagcctctggacgaggaaatgaaggaggccttccagaatgcctaccttgagctcggtggcctgggcgagcgcgtgcttggtttctgccattattacctgcccgaggagcagttccccaagggctttgccttcgactgtgatgacgtgaacttcaccacggacaacctctgctttgtgggcctcatgtccatgatcgacccaccccgggcagccgtccctgacgcggtgggcaagtgtcgcagcgcaggcatcaaggtcatcatggtcaccggcgatcaccccatcacggccaaggccattgccaagggtgtgggcatcatctctgagggcaacgagactgtggaggacatcgccgcccggctcaacattcccgtcagccaggttaacccccgggatgccaaggcctgcgtgatccacggcaccgacctcaaggacttcacctccgagcaaatcgacgagatcctgcagaatcacaccgagatcgtcttcgcccgcacatccccccagcagaagctcatcattgtggagggctgtcagagacagggtgcaattgtggctgtgaccggggatggtgtgaacgactcccccgctctgaagaaggccgacattggggtggccatgggcatcgctggctctgacgtctccaagcaggcagctgacatgatcctgctggacgacaactttgcctccatcgtcacaggggtggaggagggccgcctgatcttcgacaacctaaagaagtccattgcctacaccctgaccagcaatatcccggagatcacgcccttcctgctgttcatcatggccaacatcccgctgcccctgggcaccatcaccatcctctgcatcgatctgggcactgacatggtccctgccatctcactggcgtacgaggctgccgaaagcgacatcatgaagagacagcccaggaacccgcggacggacaaattggtcaatgagagactcatcagcatggcctacgggcagattggaatgatccaggctctcggtggcttcttctcttactttgtgatcctggcagaaaatggcttcttgcccggcaacctggtgggcatccggctgaactgggatgaccgcaccgtcaatgacctggaagacagttacgggcagcagtggacatacgagcagaggaaggtggtggagttcacctgccacacggccttctttgtgagcatcgttgtcgtccagtgggccgatctgatcatctgcaagacccggaggaactcggtcttccagcagggcatgaagaacaagatcctgatcttcgggctgtttgaggagacggccctggctgccttcctgtcctactgccccggcatggacgtggccctgcgcatgtaccctctcaagcccagctggtggttctgtgccttcccctacagtttcctcatcttcgtctacgacgaaatccgcaaactcatcctgcgcaggaacccagggggttgggtggagaaggaaacctactactgacctcagccccaccacatcgcccatctcttccccgtcccccaggcccaggaccgcccctgtcagtccccccaattttgtattctggggggaggagccctctcttcctgtggccccaccttggcccccaccccctccactatctcctgccgcccccactctggctggcttctctcccctgccccaaacctctctcctctctcttttctgtgtcagtttctctccctctcctcacccctctatccattcctcccgccccagccacctccctgggctcttttttactccccttcagccccccggctgatgccatctctggttctggacaattatcaaatatatcagtggggagagagaa

SEQ ID NO: 90016 - DNA, 3418 bp, Artificial Sequence
  derived and/or modified sequence
gtaggtgctgagccggctgggcgccgcttccgtgtgacattgtggggccggtgacattgggacaagaaagatgacaaggactcacccaagaagaacaagggcaaggagcgccgggacctggatgacctcaagaaggaggtggctatgacagagcacaagatgtcagtggaagaggtctgccggaaatacaacacagactgtgtgcagggtttgacccacagcaaagcccaggagatcctggcccgggatgggcctaacgcactcacgccaccgcctaccaccccagagtgggtcaagttttgccggcagctcttcgggggcttctccatcctgctgtggatcggggctatcctctgcttcctggcctacggtatccaggcgggcaccgaggacgacccctctggtgacaacctgtacctgggcatcgtgctggcggccgtggtgatcatcactggctgcttctcctactaccaggaggccaagagctccaagatcatggagtccttcaagaacatggtgccccagcaagccctggtgatccgggaaggtgagaagatgcaggtgaacgctgaggaggtggtggtcggggacctggtggagatcaagggtggagaccgagtgccagctgacctgcggatcatctcagcccacggctgcaaggtggacaactcctccctgactggcgaatccgagccccagactcgctctcccgactgcactcacgacaaccccttggagactcggaacatcaccttcttttccaccaactgtgtggaaggcacggctcggggcgtggtggtggccacgggcgaccgcactgtcatgggccgtatcgccaccctggcatcagggctggaggtgggcaagacgcccatcgccatcgagattgagcacttcatccagctcatcaccggcgtggctgtcttcctgggtgtctccttcttcatcctctccctcattctcggatacacctggcttgaggctgtcatcttcctcatcggcatcatcgtggccaatgtcccagagggtctgctggccactgtcactgtgtgtctgacgctgaccgccaagcgcatggcccggaagaactgcctggtgaagaacctggaggctgtagaaaccctgggctccacgtccaccatctgctcagataagacagggaccctcactcagaaccgcatgacagtcgcccacatgtggtttgacaaccagatccacgaggctgacaccactgaggaccagtcagggacctcatttgacaagagttcgcacacctgggtggccctgtctcacatcgctgggctctgcaatcgcgctgtcttcaagggtggtcaggacaacatccctgtgctcaagagggatgtggctggggatgcgtctgagtctgccctgctcaagtgcatcgagctgtcctctggctccgtgaagctgatgcgtgaacgcaacaagaaagtggctgagattcccttcaattccaccaacaaataccagctctccatccatgagaccgaggaccccaacgacaaccgatacctgctggtgatgaagggtgcccccgagcgcatcctggaccgctgctccaccatcctgctacagggcaaggagcagcctctggacgaggaaatgaaggaggccttccagaatgcctaccttgagctcggtggcctgggcgagcgcgtgcttggtttctgccattattacctgcccgaggagcagttccccaagggctttgccttcgactgtgatgacgtgaacttcaccacggacaacctctgctttgtgggcctcatgtccatgatcgacccaccccgggcagccgtccctgacgcggtgggcaagtgtcgcagcgcaggcatcaaggtcatcatggtcaccggcgatcaccccatcacggccaaggccattgccaagggtgtgggcatcatctctgagggcaacgagactgtggaggacatcgccgcccggctcaacattcccgtcagccaggttaacccccgggatgccaaggcctgcgtgatccacggcaccgacctcaaggacttcacctccgagcaaatcgacgagatcctgcagaatcacaccgagatcgtcttcgcccgcacatccccccagcagaagctcatcattgtggagggctgtcagagacagggtgcaattgtggctgtgaccggggatggtgtgaacgactcccccgctctgaagaaggccgacattggggtggccatgggcatcgctggctctgacgtctccaagcaggcagctgacatgatcctgctggacgacaactttgcctccatcgtcacaggggtggaggagggccgcctgatcttcgacaacctaaagaagtccattgcctacaccctgaccagcaatatcccggagatcacgcccttcctgctgttcatcatggccaacatcccgctgcccctgggcaccatcaccatcctctgcatcgatctgggcactgacatggtccctgccatctcactggcgtacgaggctgccgaaagcgacatcatgaagagacagcccaggaacccgcggacggacaaattggtcaatgagagactcatcagcatggcctacgggcagattggaatgatccaggctctcggtggcttcttctcttactttgtgatcctggcagaaaatggcttcttgcccggcaacctggtgggcatccggctgaactgggatgaccgcaccgtcaatgacctggaagacagttacgggcagcagtggacatacgagcagaggaaggtggtggagttcacctgccacacggccttctttgtgagcatcgttgtcgtccagtgggccgatctgatcatctgcaagacccggaggaactcggtcttccagcagggcatgaagaacaagatcctgatcttcgggctgtttgaggagacggccctggctgccttcctgtcctactgccccggcatggacgtggccctgcgcatgtaccctctcaagcccagctggtggttctgtgccttcccctacagtttcctcatcttcgtctacgacgaaatccgcaaactcatcctgcgcaggaacccagggggttgggtggagaaggaaacctactactgacctcagccccaccacatcgcccatctcttccccgtcccccaggcccaggaccgcccctgtcagtccccccaattttgtattctggggggaggagccctctcttcctgtggccccaccttggcccccaccccctccactatctcctgccgcccccactctctcctctctcttttctgtgtcagtttctctccctctcctcacccctctatccattcctcccgccccagccacctccctgggctcttttttactccccttcagccccccggctgatgccatctctggttctggacaattatcaaatatatcagtggggagagag

SEQ ID NO: 90017 - DNA, 3818 bp, Artificial Sequence
  derived and/or modified sequence
gaccaacggacggacggacggacgcgcgcacctaccgaggcgcgggcgctgcagaggctcccagcccaagcctgagcctgagcccgccccgaggtccccgccccgcccgcctggctctctcgccgcggagccgccaagatgggggacaagaaagatgacaaggactcacccaagaagaacaagggcaaggagcgccgggacctggatgacctcaagaaggaggtggctatgacagagcacaagatgtcagtggaagaggtctgccggaaatacaacacagactgtgtgcagggtttgacccacagcaaagcccaggagatcctggcccgggatgggcctaacgcactcacgccaccgcctaccaccccagagtgggtcaagttttgccggcagctcttcgggggcttctccatcctgctgtggatcggggctatcctctgcttcctggcctacggtatccaggcgggcaccgaggacgacccctctggtgacaacctgtacctgggcatcgtgctggcggccgtggtgatcatcactggctgcttctcctactaccaggaggccaagagctccaagatcatggagtccttcaagaacatggtgccccagcaagccctggtgatccgggaaggtgagaagatgcaggtgaacgctgaggaggtggtggtcggggacctggtggagatcaagggtggagaccgagtgccagctgacctgcggatcatctcagcccacggctgcaaggtggacaactcctccctgactggcgaatccgagccccagactcgctctcccgactgcactcacgacaaccccttggagactcggaacatcaccttcttttccaccaactgtgtggaaggcacggctcggggcgtggtggtggccacgggcgaccgcactgtcatgggccgtatcgccaccctggcatcagggctggaggtgggcaagacgcccatcgccatcgagattgagcacttcatccagctcatcaccggcgtggctgtcttcctgggtgtctccttcttcatcctctccctcattctcggatacacctggcttgaggctgtcatcttcctcatcggcatcatcgtggccaatgtcccagagggtctgctggccactgtcactgtgtgtctgacgctgaccgccaagcgcatggcccggaagaactgcctggtgaagaacctggaggctgtagaaaccctgggctccacgtccaccatctgctcagataagacagggaccctcactcagaaccgcatgacagtcgcccacatgtggtttgacaaccagatccacgaggctgacaccactgaggaccagtcagggacctcatttgacaagagttcgcacacctgggtggccctgtctcacatcgctgggctctgcaatcgcgctgtcttcaagggtggtcaggacaacatccctgtgctcaagagggatgtggctggggatgcgtctgagtctgccctgctcaagtgcatcgagctgtcctctggctccgtgaagctgatgcgtgaacgcaacaagaaagtggctgagattcccttcaattccaccaacaaataccagctctccatccatgagaccgaggaccccaacgacaaccgatacctgctggtgatgaagggtgcccccgagcgcatcctggaccgctgctccaccatcctgctacagggcaaggagcagcctctggacgaggaaatgaaggaggccttccagaatgcctaccttgagctcggtggcctgggcgagcgcgtgcttggtttctgccattattacctgcccgaggagcagttccccaagggctttgccttcgactgtgatgacgtgaacttcaccacggacaacctctgctttgtgggcctcatgtccatgatcgacccaccccgggcagccgtccctgacgcggtgggcaagtgtcgcagcgcaggcatcaaggtcatcatggtcaccggcgatcaccccatcacggccaaggccattgccaagggtgtgggcatcatctctgagggcaacgagactgtggaggacatcgccgcccggctcaacattcccgtcagccaggttaacccccgggatgccaaggcctgcgtgatccacggcaccgacctcaaggacttcacctccgagcaaatcgacgagatcctgcagaatcacaccgagatcgtcttcgcccgcacatccccccagcagaagctcatcattgtggagggctgtcagagacagggtgcaattgtggctgtgaccggggatggtgtgaacgactcccccgctctgaagaaggccgacattggggtggccatgggcatcgctggctctgacgtctccaagcaggcagctgacatgatcctgctggacgacaactttgcctccatcgtcacaggggtggaggagggccgcctgatcttcgacaacctaaagaagtccattgcctacaccctgaccagcaatatcccggagatcacgcccttcctgctgttcatcatggccaacatcccgctgcccctgggcaccatcaccatcctctgcatcgatctgggcactgacatggtccctgccatctcactggcgtacgaggctgccgaaagcgacatcatgaagagacagcccaggaacccgcggacggacaaattggtcaatgagagactcatcagcatggcctacgggcagattggaatgatccaggctctcggtggcttcttctcttactttgtgatcctggcagaaaatggcttcttgcccggcaacctggtgggcatccggctgaactgggatgaccgcaccgtcaatgacctggaagacagttacgggcagcagtggacatacgagcagaggaaggtggtggagttcacctgccacacggccttctttgtgagcatcgttgtcgtccagtgggccgatctgatcatctgcaagacccggaggaactcggtcttccagcagggcatgaagaacaagatcctgatcttcgggctgtttgaggagacggccctggctgccttcctgtcctactgccccggcatggacgtggccctgcgcatgtaccctctcaagcccagctggtggttctgtgccttcccctacagtttcctcatcttcgtctacgacgaaatccgcaaactcatcctgcgcaggaacccagggggtgagggagctcggcaaggcagccgaggggggcggggggcagcagggtctcaggcagctggtcccaggctcccctcgccctgctggatggctctgccacctggttcccactcttctctctcttcccatctctccgggcacccactctgtcttctcacgggtctctgtctgtgtggtttccttgtctctctccctctctgtccctctctctgctgggcggctcgccttgcctgtctctctccatctcttactctgtctctttctttccttctttgtctctccaggttgggtggagaaggaaacctactactgacctcagccccaccacatcgcccatctcttccccgtcccccaggcccaggaccgcccctgtcagtccccccaattttgtattctggggggaggagccctctcttcctgtggccccaccttggcccccaccccctccactatctcctgccgcccccactctggctggcttctctcccctgccccaaacctctctcctctctcttttctgtgtcagtttctctccctctcctcacccctctatccattcctcccgccccagccacctccctgggctcttttttactccccttcagccccccggctgatgccatctctggttctggacaattatcaaatatatcagtggggagagagaa

SEQ ID NO: 90018 - DNA, 598 bp, Artificial Sequence
  derived and/or modified sequence
gcagcctctgtgcggtgggaccaacggacggacggacggacgcgcgcacctaccgaggcgcgggcgctgcagaggctcccagcccaagcctgagcctgagcccgccccgaggtccccgccccgcccgcctggctctctcgccgcggagccgccaagatggggtctggtggctctgacagctatcgtatcgccacctcgcaggacaagaaagatgacaaggactcacccaagaagaacaagggcaaggagcgccgggacctggatgacctcaagaaggaggtggctatgacagagcacaagatgtcagtggaagaggtctgccggaaatacaacacagactgtgtgcagggtttgacccacagcaaagcccaggagatcctggcccgggatgggcctaacgcactcacgccaccgcctaccaccccagagtgggtcaagttttgccggcagctcttcgggggcttctccatcctgctgtggatcggggctatcctctgcttcctggcctacggtatccaggcgggcaccgaggacgacccctctggtgacaacctgtacctgggcatcgtgctggcggccgtggtgatcatcactggct

SEQ ID NO: 90019 - DNA, 3588 bp, Artificial Sequence
  derived and/or modified sequence
agcctctgtgcggtgggaccaacggacggacggacggacgcgcgcacctaccgaggcgcgggcgctgcagaggctcccagcccaagcctgagcctgagcccgccccgaggtccccgccccgcccgcctggctctctcgccgcggagccgccaagatggggtctggtggctctgacagctatcgtatcgccacctcgcaggacaagaaagatgacaaggactcacccaagaagaacaagggcaaggagcgccgggacctggatgacctcaagaaggaggtggctatgacagagcacaagatgtcagtggaagaggtctgccggaaatacaacacagactgtgtgcagggtttgacccacagcaaagcccaggagatcctggcccgggatgggcctaacgcactcacgccaccgcctaccaccccagagtgggtcaagttttgccggcagctcttcgggggcttctccatcctgctgtggatcggggctatcctctgcttcctggcctacggtatccaggcgggcaccgaggacgacccctctggtgacaacctgtacctgggcatcgtgctggcggccgtggtgatcatcactggctgcttctcctactaccaggaggccaagagctccaagatcatggagtccttcaagaacatggtgccccagcaagccctggtgatccgggaaggtgagaagatgcaggtgaacgctgaggaggtggtggtcggggacctggtggagatcaagggtggagaccgagtgccagctgacctgcggatcatctcagcccacggctgcaaggtggacaactcctccctgactggcgaatccgagccccagactcgctctcccgactgcactcacgacaaccccttggagactcggaacatcaccttcttttccaccaactgtgtggaaggcacggctcggggcgtggtggtggccacgggcgaccgcactgtcatgggccgtatcgccaccctggcatcagggctggaggtgggcaagacgcccatcgccatcgagattgagcacttcatccagctcatcaccggcgtggctgtcttcctgggtgtctccttcttcatcctctccctcattctcggatacacctggcttgaggctgtcatcttcctcatcggcatcatcgtggccaatgtcccagagggtctgctggccactgtcactgtgtgtctgacgctgaccgccaagcgcatggcccggaagaactgcctggtgaagaacctggaggctgtagaaaccctgggctccacgtccaccatctgctcagataagacagggaccctcactcagaaccgcatgacagtcgcccacatgtggtttgacaaccagatccacgaggctgacaccactgaggaccagtcagggacctcatttgacaagagttcgcacacctgggtggccctgtctcacatcgctgggctctgcaatcgcgctgtcttcaagggtggtcaggacaacatccctgtgctcaagagggatgtggctggggatgcgtctgagtctgccctgctcaagtgcatcgagctgtcctctggctccgtgaagctgatgcgtgaacgcaacaagaaagtggctgagattcccttcaattccaccaacaaataccagctctccatccatgagaccgaggaccccaacgacaaccgatacctgctggtgatgaagggtgcccccgagcgcatcctggaccgctgctccaccatcctgctacagggcaaggagcagcctctggacgaggaaatgaaggaggccttccagaatgcctaccttgagctcggtggcctgggcgagcgcgtgcttggtttctgccattattacctgcccgaggagcagttccccaagggctttgccttcgactgtgatgacgtgaacttcaccacggacaacctctgctttgtgggcctcatgtccatgatcgacccaccccgggcagccgtccctgacgcggtgggcaagtgtcgcagcgcaggcatcaaggtcatcatggtcaccggcgatcaccccatcacggccaaggccattgccaagggtgtgggcatcatctctgagggcaacgagactgtggaggacatcgccgcccggctcaacattcccgtcagccaggttaacccccgggatgccaaggcctgcgtgatccacggcaccgacctcaaggacttcacctccgagcaaatcgacgagatcctgcagaatcacaccgagatcgtcttcgcccgcacatccccccagcagaagctcatcattgtggagggctgtcagagacagggtgcaattgtggctgtgaccggggatggtgtgaacgactcccccgctctgaagaaggccgacattggggtggccatgggcatcgctggctctgacgtctccaagcaggcagctgacatgatcctgctggacgacaactttgcctccatcgtcacaggggtggaggagggccgcctgatcttcgacaacctaaagaagtccattgcctacaccctgaccagcaatatcccggagatcacgcccttcctgctgttcatcatggccaacatcccgctgcccctgggcaccatcaccatcctctgcatcgatctgggcactgacatggtccctgccatctcactggcgtacgaggctgccgaaagcgacatcatgaagagacagcccaggaacccgcggacggacaaattggtcaatgagagactcatcagcatggcctacgggcagattggaatgatccaggctctcggtggcttcttctcttactttgtgatcctggcagaaaatggcttcttgcccggcaacctggtgggcatccggctgaactgggatgaccgcaccgtcaatgacctggaagacagttacgggcagcagtggacatacgagcagaggaaggtggtggagttcacctgccacacggccttctttgtgagcatcgttgtcgtccagtgggccgatctgatcatctgcaagacccggaggaactcggtcttccagcagggcatgaagaacaagatcctgatcttcgggctgtttgaggagacggccctggctgccttcctgtcctactgccccggcatggacgtggccctgcgcatgtaccctctcaagcccagctggtggttctgtgccttcccctacagtttcctcatcttcgtctacgacgaaatccgcaaactcatcctgcgcaggaacccagggggttgggtggagaaggaaacctactactgacctcagccccaccacatcgcccatctcttccccgtcccccaggcccaggaccgcccctgtcagtccccccaattttgtattctggggggaggagccctctcttcctgtggccccaccttggcccccaccccctccactatctcctgccgcccccactctggctggcttctctcccctgccccaaacctctctcctctctcttttctgtgtcagtttctctccctctcctcacccctctatccattcctcccgccccagccacctccctgggctcttttttactccccttcagccccccggctgatgccatctctggttctggacaattatcaaatatatcagtggggagagag

SEQ ID NO: 90020 - DNA, 3042 bp, Artificial Sequence
  derived and/or modified sequence
atgggcgacaagaaggacgacaaggacagccccaagaagaacaagggcaaggagagaagagacctggacgacctgaagaaggaggtggccatgaccgagcacaagatgagcgtggaggaggtgtgcagaaagtacaacaccgactgcgtgcagggcctgacccacagcaaggcccaggagatcctggccagagacggccccaacgccctgacccccccccccaccacccccgagtgggtgaagttctgcagacagctgttcggcggcttcagcatcctgctgtggatcggcgccatcctgtgcttcctggcctacggcatccaggccggcaccgaggacgaccccagcggcgacaacctgtacctgggcatcgtgctggccgccgtggtgatcatcaccggctgcttcagctactaccaggaggccaagagcagcaagatcatggagagcttcaagaacatggtgccccagcaggccctggtgatcagagagggcgagaagatgcaggtgaacgccgaggaggtggtggtgggcgacctggtggagatcaagggcggcgacagagtgcccgccgacctgagaatcatcagcgcccacggctgcaaggtggacaacagcagcctgaccggcgagagcgagccccagaccagaagccccgactgcacccacgacaaccccctggagaccagaaacatcaccttcttcagcaccaactgcgtggagggcaccgccagaggcgtggtggtggccaccggcgacagaaccgtgatgggcagaatcgccaccctggccagcggcctggaggtgggcaagacccccatcgccatcgagatcgagcacttcatccagctgatcaccggcgtggccgtgttcctgggcgtgagcttcttcatcctgagcctgatcctgggctacacctggctggaggccgtgatcttcctgatcggcatcatcgtggccaacgtgcccgagggcctgctggccaccgtgaccgtgtgcctgaccctgaccgccaagagaatggccagaaagaactgcctggtgaagaacctggaggccgtggagaccctgggcagcaccagcaccatctgcagcgacaagaccggcaccctgacccagaacagaatgaccgtggcccacatgtggttcgacaaccagatccacgaggccgacaccaccgaggaccagagcggcaccagcttcgacaagagcagccacacctgggtggccctgagccacatcgccggcctgtgcaacagagccgtgttcaagggcggccaggacaacatccccgtgctgaagagagacgtggccggcgacgccagcgagagcgccctgctgaagtgcatcgagctgagcagcggcagcgtgaagctgatgagagagagaaacaagaaggtggccgagatccccttcaacagcaccaacaagtaccagctgagcatccacgagaccgaggaccccaacgacaacagatacctgctggtgatgaagggcgcccccgagagaatcctggacagatgcagcaccatcctgctgcagggcaaggagcagcccctggacgaggagatgaaggaggccttccagaacgcctacctggagctgggcggcctgggcgagagagtgctgggcttctgccactactacctgcccgaggagcagttccccaagggcttcgccttcgactgcgacgacgtgaacttcaccaccgacaacctgtgcttcgtgggcctgatgagcatgatcgacccccccagagccgccgtgcccgacgccgtgggcaagtgcagaagcgccggcatcaaggtgatcatggtgaccggcgaccaccccatcaccgccaaggccatcgccaagggcgtgggcatcatcagcgagggcaacgagaccgtggaggacatcgccgccagactgaacatccccgtgagccaggtgaaccccagagacgccaaggcctgcgtgatccacggcaccgacctgaaggacttcaccagcgagcagatcgacgagatcctgcagaaccacaccgagatcgtgttcgccagaaccagcccccagcagaagctgatcatcgtggagggctgccagagacagggcgccatcgtggccgtgaccggcgacggcgtgaacgacagccccgccctgaagaaggccgacatcggcgtggccatgggcatcgccggcagcgacgtgagcaagcaggccgccgacatgatcctgctggacgacaacttcgccagcatcgtgaccggcgtggaggagggcagactgatcttcgacaacctgaagaagagcatcgcctacaccctgaccagcaacatccccgagatcacccccttcctgctgttcatcatggccaacatccccctgcccctgggcaccatcaccatcctgtgcatcgacctgggcaccgacatggtgcccgccatcagcctggcctacgaggccgccgagagcgacatcatgaagagacagcccagaaaccccagaaccgacaagctggtgaacgagagactgatcagcatggcctacggccagatcggcatgatccaggccctgggcggcttcttcagctacttcgtgatcctggccgagaacggcttcctgcccggcaacctggtgggcatcagactgaactgggacgacagaaccgtgaacgacctggaggacagctacggccagcagtggacctacgagcagagaaaggtggtggagttcacctgccacaccgccttcttcgtgagcatcgtggtggtgcagtgggccgacctgatcatctgcaagaccagaagaaacagcgtgttccagcagggcatgaagaacaagatcctgatcttcggcctgttcgaggagaccgccctggccgccttcctgagctactgccccggcatggacgtggccctgagaatgtaccccctgaagcccagctggtggttctgcgccttcccctacagcttcctgatcttcgtgtacgacgagatcagaaagctgatcctgagaagaaaccccggcggctgggtggagaaggagacctactactag

SEQ ID NO: 90021 - DNA, 3681 bp, Artificial Sequence
  derived and/or modified sequence
atgggcgacaagaaggacgacaaggacagccccaagaagaacaagggcaaggagagaagagacctggacgacctgaagaaggaggtggccatgaccgagcacaagatgagcgtggaggaggtgtgcagaaagtacaacaccgactgcgtgcagggcctgacccacagcaaggcccaggagatcctggccagagacggccccaacgccctgacccccccccccaccacccccgagtgggtgaagttctgcagacagctgttcggcggcttcagcatcctgctgtggatcggcgccatcctgtgcttcctggcctacggcatccaggccggcaccgaggacgaccccagcggcgacaacctgtacctgggcatcgtgctggccgccgtggtgatcatcaccggctgcttcagctactaccaggaggccaagagcagcaagatcatggagagcttcaagaacatggtgccccagcaggccctggtgatcagagagggcgagaagatgcaggtgaacgccgaggaggtggtggtgggcgacctggtggagatcaagggcggcgacagagtgcccgccgacctgagaatcatcagcgcccacggctgcaaggtggacaacagcagcctgaccggcgagagcgagccccagaccagaagccccgactgcacccacgacaaccccctggagaccagaaacatcaccttcttcagcaccaactgcgtggagggcaccgccagaggcgtggtggtggccaccggcgacagaaccgtgatgggcagaatcgccaccctggccagcggcctggaggtgggcaagacccccatcgccatcgagatcgagcacttcatccagctgatcaccggcgtggccgtgttcctgggcgtgagcttcttcatcctgagcctgatcctgggctacacctggctggaggccgtgatcttcctgatcggcatcatcgtggccaacgtgcccgagggcctgctggccaccgtgaccgtgtgcctgaccctgaccgccaagagaatggccagaaagaactgcctggtgaagaacctggaggccgtggagaccctgggcagcaccagcaccatctgcagcgacaagaccggcaccctgacccagaacagaatgaccgtggcccacatgtggttcgacaaccagatccacgaggccgacaccaccgaggaccagagcggcaccagcttcgacaagagcagccacacctgggtggccctgagccacatcgccggcctgtgcaacagagccgtgttcaagggcggccaggacaacatccccgtgctgaagagagacgtggccggcgacgccagcgagagcgccctgctgaagtgcatcgagctgagcagcggcagcgtgaagctgatgagagagagaaacaagaaggtggccgagatccccttcaacagcaccaacaagtaccagctgagcatccacgagaccgaggaccccaacgacaacagatacctgctggtgatgaagggcgcccccgagagaatcctggacagatgcagcaccatcctgctgcagggcaaggagcagcccctggacgaggagatgaaggaggccttccagaacgcctacctggagctgggcggcctgggcgagagagtgctgggcttctgccactactacctgcccgaggagcagttccccaagggcttcgccttcgactgcgacgacgtgaacttcaccaccgacaacctgtgcttcgtgggcctgatgagcatgatcgacccccccagagccgccgtgcccgacgccgtgggcaagtgcagaagcgccggcatcaaggtgatcatggtgaccggcgaccaccccatcaccgccaaggccatcgccaagggcgtgggcatcatcagcgagggcaacgagaccgtggaggacatcgccgccagactgaacatccccgtgagccaggtgaaccccagagacgccaaggcctgcgtgatccacggcaccgacctgaaggacttcaccagcgagcagatcgacgagatcctgcagaaccacaccgagatcgtgttcgccagaaccagcccccagcagaagctgatcatcgtggagggctgccagagacagggcgccatcgtggccgtgaccggcgacggcgtgaacgacagccccgccctgaagaaggccgacatcggcgtggccatgggcatcgccggcagcgacgtgagcaagcaggccgccgacatgatcctgctggacgacaacttcgccagcatcgtgaccggcgtggaggagggcagactgatcttcgacaacctgaagaagagcatcgcctacaccctgaccagcaacatccccgagatcacccccttcctgctgttcatcatggccaacatccccctgcccctgggcaccatcaccatcctgtgcatcgacctgggcaccgacatggtgcccgccatcagcctggcctacgaggccgccgagagcgacatcatgaagagacagcccagaaaccccagaaccgacaagctggtgaacgagagactgatcagcatggcctacggccagatcggcatgatccaggccctgggcggcttcttcagctacttcgtgatcctggccgagaacggcttcctgcccggcaacctggtgggcatcagactgaactgggacgacagaaccgtgaacgacctggaggacagctacggccagcagtggacctacgagcagagaaaggtggtggagttcacctgccacaccgccttcttcgtgagcatcgtggtggtgcagtgggccgacctgatcatctgcaagaccagaagaaacagcgtgttccagcagggcatgaagaacaagatcctgatcttcggcctgttcgaggagaccgccctggccgccttcctgagctactgccccggcatggacgtggccctgagaatgtaccccctgaagcccagctggtggttctgcgccttcccctacagcttcctgatcttcgtgtacgacgagatcagaaagctgatcctgagaagaaaccccggcggcgagggcgccagacagggcagcagaggcggcagaggcgccgccggcagccaggccgccggccccagactgcccagcccctgctggatggccctgccccccggcagccacagcagcctgagcagccacctgagcggccaccccctgtgcctgctgaccggcctgtgcctgtgcggcttcctggtgagcctgcccctgtgccccagcctgtgctgggccgccagactggcctgcctgagccccagcctgaccctgagcctgagcttcctgctgtgcctgagcagactgggcggcgagggcaacctgctgctgaccagcgcccccccccacagacccagcctgcccagaccccccggccccggcccccccctgagcgtgccccccatcctgtacagcggcggcagaagccccctgttcctgtggccccacctgggcccccaccccctgcactacctgctgcccccccccctgtggctggccagcctgccctgccccaagcccctgagcagcctgttcagcgtgagcgtgagcctgcccctgctgacccccctgagcatcccccccgcccccgccaccagcctgggcagcttcctgctgcccttcagcccccccgccgacgccatcagcggcagcggccagctgagcaacatcagcgtgggcagagagtag

SEQ ID NO: 90022 - DNA, 444 bp, Artificial Sequence
  derived and/or modified sequence
atgggcagcggcggcagcgacagctacagaatcgccaccagccaggacaagaaggacgacaaggacagccccaagaagaacaagggcaaggagagaagagacctggacgacctgaagaaggaggtggccatgaccgagcacaagatgagcgtggaggaggtgtgcagaaagtacaacaccgactgcgtgcagggcctgacccacagcaaggcccaggagatcctggccagagacggccccaacgccctgacccccccccccaccacccccgagtgggtgaagttctgcagacagctgttcggcggcttcagcatcctgctgtggatcggcgccatcctgtgcttcctggcctacggcatccaggccggcaccgaggacgaccccagcggcgacaacctgtacctgggcatcgtgctggccgccgtggtgatcatcaccggctag

SEQ ID NO: 90023 - DNA, 3081 bp, Artificial Sequence
  derived and/or modified sequence
atgggcagcggcggcagcgacagctacagaatcgccaccagccaggacaagaaggacgacaaggacagccccaagaagaacaagggcaaggagagaagagacctggacgacctgaagaaggaggtggccatgaccgagcacaagatgagcgtggaggaggtgtgcagaaagtacaacaccgactgcgtgcagggcctgacccacagcaaggcccaggagatcctggccagagacggccccaacgccctgacccccccccccaccacccccgagtgggtgaagttctgcagacagctgttcggcggcttcagcatcctgctgtggatcggcgccatcctgtgcttcctggcctacggcatccaggccggcaccgaggacgaccccagcggcgacaacctgtacctgggcatcgtgctggccgccgtggtgatcatcaccggctgcttcagctactaccaggaggccaagagcagcaagatcatggagagcttcaagaacatggtgccccagcaggccctggtgatcagagagggcgagaagatgcaggtgaacgccgaggaggtggtggtgggcgacctggtggagatcaagggcggcgacagagtgcccgccgacctgagaatcatcagcgcccacggctgcaaggtggacaacagcagcctgaccggcgagagcgagccccagaccagaagccccgactgcacccacgacaaccccctggagaccagaaacatcaccttcttcagcaccaactgcgtggagggcaccgccagaggcgtggtggtggccaccggcgacagaaccgtgatgggcagaatcgccaccctggccagcggcctggaggtgggcaagacccccatcgccatcgagatcgagcacttcatccagctgatcaccggcgtggccgtgttcctgggcgtgagcttcttcatcctgagcctgatcctgggctacacctggctggaggccgtgatcttcctgatcggcatcatcgtggccaacgtgcccgagggcctgctggccaccgtgaccgtgtgcctgaccctgaccgccaagagaatggccagaaagaactgcctggtgaagaacctggaggccgtggagaccctgggcagcaccagcaccatctgcagcgacaagaccggcaccctgacccagaacagaatgaccgtggcccacatgtggttcgacaaccagatccacgaggccgacaccaccgaggaccagagcggcaccagcttcgacaagagcagccacacctgggtggccctgagccacatcgccggcctgtgcaacagagccgtgttcaagggcggccaggacaacatccccgtgctgaagagagacgtggccggcgacgccagcgagagcgccctgctgaagtgcatcgagctgagcagcggcagcgtgaagctgatgagagagagaaacaagaaggtggccgagatccccttcaacagcaccaacaagtaccagctgagcatccacgagaccgaggaccccaacgacaacagatacctgctggtgatgaagggcgcccccgagagaatcctggacagatgcagcaccatcctgctgcagggcaaggagcagcccctggacgaggagatgaaggaggccttccagaacgcctacctggagctgggcggcctgggcgagagagtgctgggcttctgccactactacctgcccgaggagcagttccccaagggcttcgccttcgactgcgacgacgtgaacttcaccaccgacaacctgtgcttcgtgggcctgatgagcatgatcgacccccccagagccgccgtgcccgacgccgtgggcaagtgcagaagcgccggcatcaaggtgatcatggtgaccggcgaccaccccatcaccgccaaggccatcgccaagggcgtgggcatcatcagcgagggcaacgagaccgtggaggacatcgccgccagactgaacatccccgtgagccaggtgaaccccagagacgccaaggcctgcgtgatccacggcaccgacctgaaggacttcaccagcgagcagatcgacgagatcctgcagaaccacaccgagatcgtgttcgccagaaccagcccccagcagaagctgatcatcgtggagggctgccagagacagggcgccatcgtggccgtgaccggcgacggcgtgaacgacagccccgccctgaagaaggccgacatcggcgtggccatgggcatcgccggcagcgacgtgagcaagcaggccgccgacatgatcctgctggacgacaacttcgccagcatcgtgaccggcgtggaggagggcagactgatcttcgacaacctgaagaagagcatcgcctacaccctgaccagcaacatccccgagatcacccccttcctgctgttcatcatggccaacatccccctgcccctgggcaccatcaccatcctgtgcatcgacctgggcaccgacatggtgcccgccatcagcctggcctacgaggccgccgagagcgacatcatgaagagacagcccagaaaccccagaaccgacaagctggtgaacgagagactgatcagcatggcctacggccagatcggcatgatccaggccctgggcggcttcttcagctacttcgtgatcctggccgagaacggcttcctgcccggcaacctggtgggcatcagactgaactgggacgacagaaccgtgaacgacctggaggacagctacggccagcagtggacctacgagcagagaaaggtggtggagttcacctgccacaccgccttcttcgtgagcatcgtggtggtgcagtgggccgacctgatcatctgcaagaccagaagaaacagcgtgttccagcagggcatgaagaacaagatcctgatcttcggcctgttcgaggagaccgccctggccgccttcctgagctactgccccggcatggacgtggccctgagaatgtaccccctgaagcccagctggtggttctgcgccttcccctacagcttcctgatcttcgtgtacgacgagatcagaaagctgatcctgagaagaaaccccggcggctgggtggagaaggagacctactactag

SEQ ID NO: 90024 - protein, 315 aa, Artificial Sequence
  derived and/or modified sequence
MYQVPLPLDRDGTLVRLRFTMVALVTVCCPLVAFLFCILWSLLFHFKETTATHCGATPCRMFSAASQPLDPDGTLFRLRFTAMVWWAITFPVFGFFFCIIWSLVFHFEYTVATDCGVPNYLPSVSSAIGGEVPQRYVWRFCIGLHSAPRFLVAFAYWNHYLSCTSPCSCYRPLCRLNFGLNVVENLALLVLTYVSSSEDFTIHENAFIVFIASSLGHMLLTCILWRLTKKHTVSQEDRKSYSWKQRLFIINFISFFSALAVYFRHNMYCEAGVYTIFAILEYTVVLTNMAFHMTAWWDFGNKELLITSQPEEKRF

SEQ ID NO: 90025 - protein, 345 aa, Artificial Sequence
  derived and/or modified sequence
  misc_feature (1)..(1): Xaa can be any naturally occurring amino acid
XRLGLRELGPIRGTAPEWHGRWNAAERSDKMYQVPLPLDRDGTLVRLRFTMVALVTVCCPLVAFLFCILWSLLFHFKETTATHCGATPCRMFSAASQPLDPDGTLFRLRFTAMVWWAITFPVFGFFFCIIWSLVFHFEYTVATDCGVPNYLPSVSSAIGGEVPQRYVWRFCIGLHSAPRFLVAFAYWNHYLSCTSPCSCYRPLCRLNFGLNVVENLALLVLTYVSSSEDFTIHENAFIVFIASSLGHMLLTCILWRLTKKHTVSQEDRKSYSWKQRLFIINFISFFSALAVYFRHNMYCEAGVYTIFAILEYTVVLTNMAFHMTAWWDFGNKELLITSQPEEKRF

SEQ ID NO: 90026 - DNA, 1038 bp, Artificial Sequence
  derived and/or modified sequence
tgaagactgggcctgagagagctgggccccatcagaggcaccgcccccgagtggcacggcagatggaacgccgccgagagaagcgacaagatgtaccaggtgcccctgcccctggacagagacggcaccctggtgagactgagattcaccatggtggccctggtgaccgtgtgctgccccctggtggccttcctgttctgcatcctgtggagcctgctgttccacttcaaggagaccaccgccacccactgcggcgccaccccctgcagaatgttcagcgccgccagccagcccctggaccccgacggcaccctgttcagactgagattcaccgccatggtgtggtgggccatcaccttccccgtgttcggcttcttcttctgcatcatctggagcctggtgttccacttcgagtacaccgtggccaccgactgcggcgtgcccaactacctgcccagcgtgagcagcgccatcggcggcgaggtgccccagagatacgtgtggagattctgcatcggcctgcacagcgcccccagattcctggtggccttcgcctactggaaccactacctgagctgcaccagcccctgcagctgctacagacccctgtgcagactgaacttcggcctgaacgtggtggagaacctggccctgctggtgctgacctacgtgagcagcagcgaggacttcaccatccacgagaacgccttcatcgtgttcatcgccagcagcctgggccacatgctgctgacctgcatcctgtggagactgaccaagaagcacaccgtgagccaggaggacagaaagagctacagctggaagcagagactgttcatcatcaacttcatcagcttcttcagcgccctggccgtgtacttcagacacaacatgtactgcgaggccggcgtgtacaccatcttcgccatcctggagtacaccgtggtgctgaccaacatggccttccacatgaccgcctggtgggacttcggcaacaaggagctgctgatcaccagccagcccgaggagaagagattctag

SEQ ID NO: 90027 - DNA, 1038 bp, Artificial Sequence
  derived and/or modified sequence
tgaagactggggctgagagagctgggccccatacgagggaccgcacccgagtggcatggcaggtggaacgccgccgaacggagtgataaaatgtatcaggtgcctcttcccctcgatagggatggtactctagtgcgcctgcggttcaccatggtggcactggtgactgtctgctgtcctctggttgcttttctgttctgcatcctgtggtccctgctgtttcatttcaaggagactacagccacgcactgcggggcaaccccatgtcgcatgttctccgctgcctctcaacccttggaccccgacgggacactctttagactccgcttcactgctatggtttggtgggctatcaccttccccgtgttcggtttcttcttttgcataatatggtccttagttttccacttcgaatacaccgttgcgactgattgcggagtacctaactacctcccttccgtgtcttccgctatcggaggggaggtccctcagcgttatgtgtggaggttttgcatcggattgcattccgctccacgatttctggtggcttttgcctattggaatcactacctcagttgtacctcaccttgttcttgctacaggccactgtgccgactcaactttggtctcaacgtcgtggagaatttggcactgcttgtcctcacttacgtcagcagctccgaggattttaccatacatgaaaatgctttcatcgtgtttatcgcctctagtttaggacatatgctgttgacctgcattctctggcggttgaccaagaagcacaccgtgtcccaagaggacaggaagtcctattcatggaaacaacgcttgttcataattaactttatatccttcttttctgctctcgctgtatactttcgacataatatgtattgtgaagccggcgtgtatactatcttcgctatccttgaatacacagtcgtgctgacaaacatggccttccacatgacggcctggtgggacttcgggaacaaggaacttctgatcacatcgcaacccgaggagaaaaggttttag

SEQ ID NO: 90028 - DNA, 1038 bp, Artificial Sequence
  derived and/or modified sequence
tgaagactgggcctgcgggagctgggccccatccggggcacagcccctgagtggcacggccgctggaatgctgctgagaggagtgacaagatgtaccaggtgcccctgcccctggacagagatggcaccctggtgcggctgcgcttcaccatggtggccctggtgacagtgtgctgccccctggtggccttcctgttctgcatcctgtggagcctgctcttccacttcaaggagaccacagccacccactgtggggccaccccctgcaggatgttttctgctgccagccagcccctggaccctgatggcaccctcttccggctgcgcttcaccgccatggtgtggtgggccatcaccttccctgtgtttggcttcttcttctgcatcatctggagcctggtgttccactttgagtacacagtggccacagactgtggggtgcccaactacctgcccagcgtgagcagcgccatcggcggggaggtgccccagcgctacgtgtggaggttctgcatcggcctgcacagcgccccccgcttcctggtggcctttgcctactggaaccactacctgagctgcaccagcccctgcagctgctaccggcccctgtgccgcctgaactttggcctgaatgtggtggagaacctggccctgctggtgctgacctacgtgagcagcagcgaggacttcaccatccatgaaaatgccttcatcgtgttcatcgccagcagcctgggccacatgctgctgacctgcatcctgtggaggctgaccaagaagcacacagtgtcccaggaggacaggaagagctacagctggaagcagaggctcttcatcatcaacttcatctccttcttcagcgccctggccgtgtacttccgccacaacatgtactgtgaggccggcgtgtacaccatctttgccatcctggagtacacagtggtgctgaccaacatggccttccacatgacagcctggtgggactttggaaacaaggagctgctgatcaccagccagcctgaggagaagcgcttctag

SEQ ID NO: 90029 - DNA, 1038 bp, Artificial Sequence
  derived and/or modified sequence
tgacggctgggcctgcgggagctgggccccatccggggcaccgcccctgagtggcacggcaggtggaacgctgcggaaaggagcgacaaaatgtatcaggtgccgctgccacttgacagagacggcaccttggtcaggttgcgatttaccatggtcgctttggttaccgtgtgttgccctctggttgctttcctgttctgcatactttggtctctgctctttcacttcaaggagactacagccacccactgcggtgcaacaccttgtcggatgttcagtgccgccagccagccgctcgaccctgacggcaccctgttcaggttgcggttcacagctatggtctggtgggccatcacctttcccgtatttggcttttttttctgtataatctggtccctcgttttccacttcgagtacacagtggctacggactgcggtgttcccaattatctcccgtccgtgagttctgctattgggggcgaggtgcctcagcgttatgtttggaggttctgcatcggcctgcacagtgcaccccgatttctggtggcgttcgcctattggaaccactatctatcttgtacctccccgtgctcgtgctaccggcccctgtgcagactaaatttcgggctaaatgtggttgagaacctggccctcttggtcctgacatatgtgagctcgtctgaagactttaccattcatgagaacgccttcatagtgtttatcgcctcctccctggggcacatgctgctgacttgcatcctttggagactcacgaagaagcataccgttagtcaggaggatcggaaatcctacagttggaagcagcgcttgtttattatcaatttcatctctttttttagtgcactcgctgtctatttcaggcataatatgtactgcgaagcaggtgtgtacactatttttgccatcctggagtacaccgtggtcctgacgaacatggccttccacatgacagcttggtgggatttcggcaacaaagagctgctgatcaccagtcagcccgaagaaaagagattttag

SEQ ID NO: 90030 - DNA, 2062 bp, Artificial Sequence
  derived and/or modified sequence
aggggtcggggtctccagaagcggggaggagccagcggaggatctgggcgcagtttcctctctaagttccgccccgagagcgccggccccgcccccgccgttcgcgctctgaccagcccgcagagccagcccccgaccccgggccacctgggcccccgggttccgccggcactctcgccaccaccgcgtgggtctgacaagatgtaccaggtcccactaccactggatcgggatgggaccctggtacggctccgcttcaccatggtggccctggtcacggtctgctgtccacttgtcgccttcctcttctgcatcctctggtccctgctcttccacttcaaggagacaacggccacacactgtggggccacgccctgcaggatgttctctgcggcctcccagcctttggaccccgatgggaccttgttccggcttcgcttcacagccatggtctggtgggccatcacttttcctgtgttcggcttcttcttctgcatcatctggtccctggtgttccactttgagtacacggtggccactgactgtggggtgcccaattacctgccctcggtgagctcagccatcggcggggaggtgccccagcgctacgtgtggcgtttctgcatcggcctgcactcggcgcctcgcttcttggtggccttcgcctactggaaccactacctcagctgcacctccccgtgttcctgctatcgcccgctctgccgcctcaacttcggcctcaatgtcgtggagaacctcgcgttgctagtgctcacttatgtctcctcctccgaggacttcaccatccacgaaaatgctttcattgtgttcattgcctcatccctcgggcacatgctcctcacctgcattctctggcggttgaccaagaagcacacagtaagtcaggaggatcgcaagtcctacagctggaaacagcggctcttcatcatcaacttcatctccttcttctcggcgctggctgtctactttcggcacaacatgtattgtgaggctggagtgtacaccatctttgccatcctggagtacactgttgtcttaaccaacatggcgttccacatgacggcctggtgggacttcgggaacaaggagctgctcataacctctcagcctgaggaaaagcgattctgaacccttcagtcctgcttgggaggacgcagcccactgcccagaaacaagaaacacgataccattctggccttccccaccccacatcctctcttggccttactgaagatgggggaagggtaagaaggaagggtgtaggccaaggctcaccccagtgctgctggcttctcctctccacccctcatatgggcgtggggtcctcaaacatcacctttacctgagaggccccaagaagctgagctggcagagagctccaccatttggtgctaaaaaaaaaaacgtcctgaggttcatgaccaccatccagtttctggcctttacacagtcacctttcactgaggtcaggagcccctgagcagtggctgctccctgacaaccacagccatttctctgcacgggggtcattcataggactaatgtatttcatgatctactgtgcacatccaggcctgtggccacagtcccctgctaaagttgctcaggtgttctagtcctgacttcacctttttgatttggtgtgtgccctagggtatgtacccttccccatctgagcctcggtgtgtccatgtgtctggcgggggatgggtggactgtatgatttccaaggactctaccagtcagtggttctgatgtcatcgggtggaggtggtgttctatacctaaaggatgacctgctccagaaacagcaccagcacagcatgtattttcttctcttctgaaagttctggcttgtagacccctcccctcctttgcaaaggtatgggatagaggggtcagatgcagatctctactgtaaaatgggctccctggtatctcctgtcttccctactgctccaaaccctaaattttggttgtacattttatttgaaaggaaaataaattttttttttgggccaacagttgcctaggcttgcta

SEQ ID NO: 90031 - DNA, 1953 bp, Artificial Sequence
  derived and/or modified sequence
actccgcccccttccttggagcgccgcgactcgggctgagggagctcgggccaatcagagggacggccccagaatggcatggtagatggaacgcagctgagaggtctgacaagatgtaccaggtcccactaccactggatcgggatgggaccctggtacggctccgcttcaccatggtggccctggtcacggtctgctgtccacttgtcgccttcctcttctgcatcctctggtccctgctcttccacttcaaggagacaacggccacacactgtggggccacgccctgcaggatgttctctgcggcctcccagcctttggaccccgatgggaccttgttccggcttcgcttcacagccatggtctggtgggccatcacttttcctgtgttcggcttcttcttctgcatcatctggtccctggtgttccactttgagtacacggtggccactgactgtggggtgcccaattacctgccctcggtgagctcagccatcggcggggaggtgccccagcgctacgtgtggcgtttctgcatcggcctgcactcggcgcctcgcttcttggtggccttcgcctactggaaccactacctcagctgcacctccccgtgttcctgctatcgcccgctctgccgcctcaacttcggcctcaatgtcgtggagaacctcgcgttgctagtgctcacttatgtctcctcctccgaggacttcaccatccacgaaaatgctttcattgtgttcattgcctcatccctcgggcacatgctcctcacctgcattctctggcggttgaccaagaagcacacagtaagtcaggaggatcgcaagtcctacagctggaaacagcggctcttcatcatcaacttcatctccttcttctcggcgctggctgtctactttcggcacaacatgtattgtgaggctggagtgtacaccatctttgccatcctggagtacactgttgtcttaaccaacatggcgttccacatgacggcctggtgggacttcgggaacaaggagctgctcataacctctcagcctgaggaaaagcgattctgaacccttcagtcctgcttgggaggacgcagcccactgcccagaaacaagaaacacgataccattctggccttccccaccccacatcctctcttggccttactgaagatgggggaagggtaagaaggaagggtgtaggccaaggctcaccccagtgctgctggcttctcctctccacccctcatatgggcgtggggtcctcaaacatcacctttacctgagaggccccaagaagctgagctggcagagagctccaccatttggtgctaaaaaaaaaaacgtcctgaggttcatgaccaccatccagtttctggcctttacacagtcacctttcactgaggtcaggagcccctgagcagtggctgctccctgacaaccacagccatttctctgcacgggggtcattcataggactaatgtatttcatgatctactgtgcacatccaggcctgtggccacagtcccctgctaaagttgctcaggtgttctagtcctgacttcacctttttgatttggtgtgtgccctagggtatgtacccttccccatctgagcctcggtgtgtccatgtgtctggcgggggatgggtggactgtatgatttccaaggactctaccagtcagtggttctgatgtcatcgggtggaggtggtgttctatacctaaaggatgacctgctccagaaacagcaccagcacagcatgtattttcttctcttctgaaagttctggcttgtagacccctcccctcctttgcaaaggtatgggatagaggggtcagatgcagatctctactgtaaaatgggctccctggtatctcctgtcttccctactgctccaaaccctaaattttggttgtacattttatttgaaaggaaaataaattttttttttgggcc

SEQ ID NO: 90032 - DNA, 1259 bp, Artificial Sequence
  derived and/or modified sequence
cgcgactcgggctgagggagctcgggccaatcagagggacggccccagaatggcatggtagatggaacgcagctgagaggtctgacaagatgtaccaggtcccactaccactggatcgggatgggaccctggtacggctccgcttcaccatggtggccctggtcacggtctgctgtccacttgtcgccttcctcttctgcatcctctggtccctgctcttccacttcaaggagacaacggccacacactgtggggccacgccctgcaggatgttctctgcggcctcccagcctttggaccccgatgggaccttgttccggcttcgcttcacagccatggtctggtgggccatcacttttcctgtgttcggcttcttcttctgcatcatctggtccctggtgttccactttgagtacacggtggccactgactgtggggtgcccaattacctgccctcggtgagctcagccatcggcggggaggtgccccagcgctacgtgtggcgtttctgcatcggcctgcactcggcgcctcgcttcttggtggccttcgcctactggaaccactacctcagctgcacctccccgtgttcctgctatcgcccgctctgccgcctcaacttcggcctcaatgtcgtggagaacctcgcgttgctagtgctcacttatgtctcctcctccgaggacttcaccatccacgaaaatgctttcattgtgttcattgcctcatccctcgggcacatgctcctcacctgcattctctggcggttgaccaagaagcacacagtaagtcaggaggatcgcaagtcctacagctggaaacagcggctcttcatcatcaacttcatctccttcttctcggcgctggctgtctactttcggcacaacatgtattgtgaggctggagtgtacaccatctttgccatcctggagtacactgttgtcttaaccaacatggcgttccacatgacggcctggtgggacttcgggaacaaggagctgctcataacctctcagcctgaggaaaagcgattctgaacccttcagtcctgcttgggaggacgcagcccactgcccagaaacaagaaacacgataccattctggccttccccaccccacatcctctcttggccttactgaagatgggggaagggtaagaaggaagggtgtaggccaaggctcaccccagtgctgctggcttctcctctccacccctcatatgggcgtggggtcctcaaacatcacctttacctgagagg

SEQ ID NO: 90033 - DNA, 1038 bp, Artificial Sequence
  derived and/or modified sequence
tgacgccttggcctaagagaattgggacccattcgcggaacagcccctgaatggcacggacgatggaacgccgctgagcgtagcgacaaaatgtatcaggttcccctgcctttagacagagacgggacactggtcaggctgcgctttactatggttgctttggtcactgtctgctgcccccttgtggccttcctgttctgtattctatggagtctgttatttcactttaaagaaaccacagccacccactgtggggctactccttgtaggatgtttagtgcagcctcccagccactcgaccctgacggtaccctcttccgcctgcgatttacggctatggtgtggtgggcaattacctttcctgtgttcggctttttcttttgtattatctggagtctggtgtttcactttgagtatacagtcgcaacggactgcggcgtcccaaactatctaccctccgtctctagcgccattgggggtgaggttccacagcgttatgtctggcggttttgtatcgggttgcacagcgcacctagatttttggtcgcctttgcctactggaatcactatctctcctgtacaagcccctgctcttgttacagacctctctgccgtctgaacttcggactgaacgtggtcgagaacctagccttactagtactcacctatgtgtcaagtagtgaagactttaccattcatgagaacgctttcatcgtattcattgcttcttctctcgggcacatgctcttgacatgtattctttggaggttaacaaagaagcacacggtttctcaggaagacaggaaatcctacagctggaagcaacgccttttcattatcaactttatctcttttttctcggcacttgccgtctattttcgccacaatatgtactgcgaggccggagtttataccatctttgctatcctcgagtataccgtggtcctcactaacatggcttttcacatgacagcgtggtgggattttggtaacaaggagctactgatcactagtcagcctgaggagaagcggttctag

SEQ ID NO: 90034 - DNA, 88 bp, Artificial Sequence
  derived and/or modified sequence
acacatttcaaggaaggaaacaagaacagacagaaacacaacatacttcatgaaaccacattttagcatcctggccgagtattcatca

SEQ ID NO: 90035 - protein, 56 aa, Artificial Sequence
  derived and/or modified sequence
MYQVPLPLDRDGTLVRLRFTMVALVTVCCPLVAFLFCILWSLLFHFKETTATHCGD

SEQ ID NO: 90036 - DNA, 1772 bp, Artificial Sequence
  derived and/or modified sequence
ccagagtttctgggatgtgcctcaccgggtctcactgcctgcaaaggtagatggaacgcagctgagaggtctgacaagatgtaccaggtcccactaccactggatcgggatgggaccctggtacggctccgcttcaccatggtggccctggtcacggtctgctgtccacttgtcgccttcctcttctgcatcctctggtccctgctcttccacttcaaggagacaacggccacacactgtggggtgcccaattacctgccctcggtgagctcagccatcggcggggaggtgccccagcgctacgtgtggcgtttctgcatcggcctgcactcggcgcctcgcttcttggtggccttcgcctactggaaccactacctcagctgcacctccccgtgttcctgctatcgcccgctctgccgcctcaacttcggcctcaatgtcgtggagaacctcgcgttgctagtgctcacttatgtctcctcctccgaggacttcaccatccacgaaaatgctttcattgtgttcattgcctcatccctcgggcacatgctcctcacctgcattctctggcggttgaccaagaagcacacagtaagtcaggaggtacggtctatccctagcgggggctccaaggcagcccagaagaaaatcaaggacatctgtcctcaggattcgggatcgcaagtcctacagctggaaacagcggctcttcatcatcaacttcatctccttcttctcggcgctggctgtctactttcggcacaacatgtattgtgaggctggagtgtacaccatctttgccatcctggagtacactgttgtcttaaccaacatggcgttccacatgacggcctggtgggacttcgggaacaaggagctgctcataacctctcagcctgaggaaaagcgattctgaacccttcagtcctgcttgggaggacgcagcccactgcccagaaacaagaaacacgataccattctggccttccccaccccacatcctctcttggccttactgaagatgggggaagggtaagaaggaagggtgtaggccaaggctcaccccagtgctgctggcttctcctctccacccctcatatgggcgtggggtcctcaaacatcacctttacctgagaggccccaagaagctgagctggcagagagctccaccatttggtgctaaaaaaaaaaacgtcctgaggttcatgaccaccatccagtttctggcctttacacagtcacctttcactgaggtcaggagcccctgagcagtggctgctccctgacaaccacagccatttctctgcacgggggtcattcataggactaatgtatttcatgatctactgtgcacatccaggcctgtggccacagtcccctgctaaagttgctcaggtgttctagtcctgacttcacctttttgatttggtgtgtgccctagggtatgtacccttccccatctgagcctcggtgtgtccatgtgtctggcgggggatgggtggactgtatgatttccaaggactctaccagtcagtggttctgatgtcatcgggtggaggtggtgttctatacctaaaggatgacctgctccagaaacagcaccagcacagcatgtattttcttctcttctgaaagttctggcttgtagacccctcccctcctttgcaaaggtatgggatagaggggtcagatgcagatctctactgtaaaatgggctccctggtatctcctgtcttccctactgctccaaaccctaaattttggttgtacat

SEQ ID NO: 90037 - protein, 232 aa, Artificial Sequence
  derived and/or modified sequence
MYQVPLPLDRDGTLVRLRFTMVALVTVCCPLVAFLFCILWSLLFHFKETTATHCGVPNYLPSVSSAIGGEVPQRYVWRFCIGLHSAPRFLVAFAYWNHYLSCTSPCSCYRPLCRLNFGLNVVENLALLVLTYVSSSEDFTIHENAFIVFIASSLGHMLLTCILWRLTKKHTVSQEVRSIPSGGSKAAQKKIKDICPQDSGSQVLQLETAALHHQLHLLLLGAGCLLSAQHVL

SEQ ID NO: 90038 - DNA, 699 bp, Artificial Sequence
  derived and/or modified sequence
atgtaccaggtgcccctgcccctggacagagacggcaccctggtgagactgagattcaccatggtggccctggtgaccgtgtgctgccccctggtggccttcctgttctgcatcctgtggagcctgctgttccacttcaaggagaccaccgccacccactgcggcgtgcccaactacctgcccagcgtgagcagcgccatcggcggcgaggtgccccagagatacgtgtggagattctgcatcggcctgcacagcgcccccagattcctggtggccttcgcctactggaaccactacctgagctgcaccagcccctgcagctgctacagacccctgtgcagactgaacttcggcctgaacgtggtggagaacctggccctgctggtgctgacctacgtgagcagcagcgaggacttcaccatccacgagaacgccttcatcgtgttcatcgccagcagcctgggccacatgctgctgacctgcatcctgtggagactgaccaagaagcacaccgtgagccaggaggtgagaagcatccccagcggcggcagcaaggccgcccagaagaagatcaaggacatctgcccccaggacagcggcagccaggtgctgcagctggagaccgccgccctgcaccaccagctgcacctgctgctgctgggcgccggctgcctgctgagcgcccagcacgtgctgtag

SEQ ID NO: 90039 - DNA, 171 bp, Artificial Sequence
  derived and/or modified sequence
atgtaccaggtgcccctgcccctggacagagacggcaccctggtgagactgagattcaccatggtggccctggtgaccgtgtgctgccccctggtggccttcctgttctgcatcctgtggagcctgctgttccacttcaaggagaccaccgccacccactgcggcgactag

SEQ ID NO: 90040 - DNA, 699 bp, Artificial Sequence
  derived and/or modified sequence
atgtatcaggtgcccttgccactggaccgagatggcaccttagtgcggctaaggtttactatggttgcgctcgtgacagtgtgctgtccattggtggcctttctgttctgcatcctctggagtctcctgttccatttcaaggagaccacagccacgcactgcggagtcccaaattatcttccatcagtgtccagcgccatcggtggggaagtaccccaaaggtacgtgtggagattttgcattgggcttcatagcgcacccaggtttctcgtagcctttgcctattggaaccactacctgtcctgcacctctccttgtagctgttaccgtccattatgtagattgaacttcgggctcaatgttgttgaaaatctggcgttactggtgttaacatacgtgtcatctagcgaagactttaccattcacgagaacgcctttattgtctttattgcatcatctctggggcacatgcttctgacttgtatcctgtggcgcctaactaagaaacatacggtgagtcaagaggtaaggagtataccatctggggggagcaaggcagcccaaaagaagattaaggatatttgtccacaggacagcgggagtcaggtgctgcagctggagactgctgcactgcaccatcagctgcacctgctcctcctgggcgccggctgtcttctgtccgcccagcacgtcctctag

SEQ ID NO: 90041 - DNA, 171 bp, Artificial Sequence
  derived and/or modified sequence
atgtaccaggttcctcttcctctggatcgggatgggactctcgtccgactaaggttcacaatggtggcactggttaccgtctgctgtccactggtcgcattcttgttttgtatcttgtggagtctgctgttccactttaaagagacgacagctacacactgcggtgattag

SEQ ID NO: 90042 - DNA, 699 bp, Artificial Sequence
  derived and/or modified sequence
atgtaccaggtgcccctgcccctggacagagatggcaccctggtgcggctgcgcttcaccatggtggccctggtgacagtgtgctgccccctggtggccttcctgttctgcatcctgtggagcctgctcttccacttcaaggagaccacagccacccactgcggcgtgcccaactacctgcccagcgtgtcctctgccatcggcggggaggtgccccagagatatgtgtggaggttctgcatcggcctgcacagcgccccccgcttcctggtggcctttgcctactggaaccactacctgagctgcaccagcccctgcagctgctaccggcccctgtgccgcctgaactttggcctgaatgtggtggagaacctggccctgctggtgctgacctacgtgagcagcagcgaggacttcaccatccatgaaaatgccttcatcgtgttcatcgccagcagcctgggccacatgctgctgacctgcatcctgtggaggctgaccaagaagcacacagtgtcccaggaggtgcgcagcatccccagcggcggcagcaaggccgcccagaagaagatcaaggacatctgcccccaggacagcggcagccaggtgctgcagctggagacagctgccctgcaccaccagctgcacctgctgctgctgggcgccggctgcctgctgagcgcccagcacgtgctgtag

SEQ ID NO: 90043 - DNA, 171 bp, Artificial Sequence
  derived and/or modified sequence
atgtaccaggtgcccctgcccctggacagagatggcaccctggtgcggctgcgcttcaccatggtggccctggtgacagtgtgctgccccctggtggccttcctgttctgcatcctgtggagcctgctcttccacttcaaggagaccacagccacccactgtggggactag

SEQ ID NO: 90044 - DNA, 699 bp, Artificial Sequence
  derived and/or modified sequence
atgtaccaggtgcccctgcccctggaccgggacggcaccctggtgcgtctgcgattcaccatggtagcactcgtgaccgtctgttgtccgcttgtggccttcctcttctgtatactgtggagcctcctgttccacttcaaggagaccacggctacccactgtggcgttcccaactacctgcccagcgtcagctctgccattggtggagaagtgcctcaacgctacgtctggcgattctgtattggattacatagcgccccccgcttcttagtggccttcgcgtactggaaccattatctttcttgcacaagcccctgcagttgctaccgccctctgtgtagactgaacttcgggctgaacgtcgtcgaaaaccttgcgcttctagtcctgacctacgtcagctccagtgaggatttcaccatacacgaaaatgcctttatcgtttttatagccagttccttgggacacatgttactgacatgtattctttggagactaactaagaagcacaccgtgagccaggaggtgcgcagcatcccatccggcggatcaaaagccgctcaaaaaaaaatcaaggatatatgcccccaggacagcggtagccaggtgctgcagcttgaaactgcagcactgcaccatcaactgcacctcctcctcctcggtgctggctgcctgctgtccgcccagcatgtgctgtag

SEQ ID NO: 90045 - DNA, 171 bp, Artificial Sequence
  derived and/or modified sequence
atgtaccaggtgcccctgcccctggaccgggacggcaccctggtgcgcctgcggtttactatggtagcccttgtaactgtctgctgtccgttagtggcctttctgttttgtatcctatggagcctgctttttcacttcaaggagactactgccactcactgcggcgattag

SEQ ID NO: 90046 - DNA, 699 bp, Artificial Sequence
  derived and/or modified sequence
atgtatcaggtgccgctgcctctcgacagggacggcaccctggtgcgtttgagattcaccatggtggcgctagttactgtgtgttgtccactcgtcgctttcctgttttgtattctatggtcactgcttttccattttaaggagaccaccgctacacactgcggggtccccaactatttgccctcggtgtccagtgctattggaggcgaagtgccccaaagatatgtttggcggttctgtatcggactccattccgcccctcggtttttagttgctttcgcatactggaatcattatctctcctgcaccagcccctgctcatgctatcgacccctgtgccgactcaatttcggtctgaacgtggtggagaatctcgcactattggtgctgacttacgtcagtagttcagaggattttaccatacatgaaaatgctttcatcgtcttcatcgcatctagcctgggccacatgctgctgacctgcatcctctggaggctcactaaaaagcatacagtctcccaggaggtccggtcaattccaagcggcggttcaaaggcggctcagaagaagatcaaagatatctgcccacaagactccggctcccaggtcctccagttggaaactgccgctttgcaccaccagcttcacctactcttgcttggagccggatgtttgttgtctgcacaacacgtgctatag

SEQ ID NO: 90047 - DNA, 171 bp, Artificial Sequence
  derived and/or modified sequence
atgtaccaagtgccgctgcccctggatagggacggaaccctggtgcgcctgagattcacaatggttgcattggttaccgtttgttgcccccttgtcgccttcctcttttgtatattatggtcattattgttccactttaaggagacaactgctacgcactgcggagactag

SEQ ID NO: 90048 - DNA, 435 bp, Artificial Sequence
  derived and/or modified sequence
atgatcagggcggcactgctcgagccgcagcctccaaagctgaaacaatcctctcatttaagcccccaaggcgcagggacaacaggtgccggaccccatacgccactgacttttctctatttcttccgacttgagctgttacaggccgctctgccgcctcaaccacctaaggtcctggtaagacagcctgggggaaaagacagtctcgctgagtcccctttcgatctgagcaccggaagaaacgcaccttgtggcggagccctgggaaacttgagacacctacagtggggaggcgcatggcccctcctcttccttggcggtacctgggattcggtctatcaggctggttcaaccttagcgttggggagagtcagtgtgagcctatttttctttcttcccaataaattccacagccacccctccagacacctgtag

SEQ ID NO: 90049 - protein, 254 aa, Artificial Sequence
  derived and/or modified sequence
MYQVPLPLDRDGTLVRLRFTMVALVTVCCPLVAFLFCILWSLLFHFKETTATHCGVPNYLPSVSSAIGGEVPQRYVWRFCIGLHSAPRFLVAFAYWNHYLSCTSPCSCYRPLCRLNFGLNVVENLALLVLTYVSSSEDFTIHENAFIVFIASSLGHMLLTCILWRLTKKHTVSQEDRKSYSWKQRLFIINFISFFSALAVYFRHNMYCEAGVYTIFAILEYTVVLTNMAFHMTAWWDFGNKELLITSQPEEKRF

SEQ ID NO: 90050 - DNA, 765 bp, Artificial Sequence
  derived and/or modified sequence
atgtaccaggtgcccctgcccctggacagagacggcaccctggtgagactgagattcaccatggtggccctggtgaccgtgtgctgccccctggtggccttcctgttctgcatcctgtggagcctgctgttccacttcaaggagaccaccgccacccactgcggcgtgcccaactacctgcccagcgtgagcagcgccatcggcggcgaggtgccccagagatacgtgtggagattctgcatcggcctgcacagcgcccccagattcctggtggccttcgcctactggaaccactacctgagctgcaccagcccctgcagctgctacagacccctgtgcagactgaacttcggcctgaacgtggtggagaacctggccctgctggtgctgacctacgtgagcagcagcgaggacttcaccatccacgagaacgccttcatcgtgttcatcgccagcagcctgggccacatgctgctgacctgcatcctgtggagactgaccaagaagcacaccgtgagccaggaggacagaaagagctacagctggaagcagagactgttcatcatcaacttcatcagcttcttcagcgccctggccgtgtacttcagacacaacatgtactgcgaggccggcgtgtacaccatcttcgccatcctggagtacaccgtggtgctgaccaacatggccttccacatgaccgcctggtgggacttcggcaacaaggagctgctgatcaccagccagcccgaggagaagagattctag

SEQ ID NO: 90051 - DNA, 765 bp, Artificial Sequence
  derived and/or modified sequence
atgtaccaggtccctttgccactggatagagatggaacactcgtgcggttgcggttcactatggtcgcattggtgaccgtgtgttgtccattggtggccttcctcttctgcattctgtggagcctacttttccactttaaagagacgacagcaacccactgcggtgtcccaaactatttgcccagcgtgtcctcagccattggcggggaagtgccccaacgttatgtctggagattctgcatcggtttacactctgcgccccgcttcctagtggcgttcgcgtattggaatcactatttaagctgcacaagtccatgctcatgttatcggcccctgtgccgtttgaatttcgggcttaatgtggtcgaaaaccttgcacttttagtccttacctatgtatcttcttccgaggatttcaccatacatgagaatgcatttatcgtgttcatcgcctcctctttgggccacatgctcctgacctgcatcttgtggcggctcactaagaagcacacggtgtcgcaggaagaccgcaaatcatatagctggaaacagagactctttataatcaatttcatctccttcttttcggcgctggcggtctactttagacacaatatgtattgcgaggcaggcgtatacacaatttttgctattctggaatacacagtcgtgttaacaaatatggcctttcatatgacggcctggtgggactttggtaacaaggagcttctgatcacctcacagcccgaagagaagagattttag

SEQ ID NO: 90052 - DNA, 765 bp, Artificial Sequence
  derived and/or modified sequence
atgtaccaggtgcccctgcccctggacagagatggcaccctggtgcggctgcgcttcaccatggtggccctggtgacagtgtgctgccccctggtggccttcctgttctgcatcctgtggagcctgctcttccacttcaaggagaccacagccacccactgcggcgtgcccaactacctgcccagcgtgtcctctgccatcggcggggaggtgccccagagatatgtgtggaggttctgcatcggcctgcacagcgccccccgcttcctggtggcctttgcctactggaaccactacctgagctgcaccagcccctgcagctgctaccggcccctgtgccgcctgaactttggcctgaatgtggtggagaacctggccctgctggtgctgacctacgtgagcagcagcgaggacttcaccatccatgaaaatgccttcatcgtgttcatcgccagcagcctgggccacatgctgctgacctgcatcctgtggaggctgaccaagaagcacacagtgtcccaggaggacaggaagagctacagctggaagcagaggctcttcatcatcaacttcatctccttcttcagcgccctggccgtgtacttccgccacaacatgtactgtgaggccggcgtgtacaccatctttgccatcctggagtacacagtggtgctgaccaacatggccttccacatgacagcctggtgggactttggaaacaaggagctgctgatcaccagccagcctgaggagaagcgcttctag

SEQ ID NO: 90053 - DNA, 765 bp, Artificial Sequence
  derived and/or modified sequence
atgtaccaggtgcccctgcccctggaccgggacggcaccctggtgcgcctgagattcaccatggtcgcacttgtgacggtgtgctgtccactcgtggcctttctgttttgtatcctttggagtttgctgttccacttcaaagagaccaccgcaacccactgtggcgtccccaattatttaccttctgtctcatcagctataggcggtgaagtacctcagcgctacgtttggagattttgtatcgggttgcatagtgcaccaagattcctcgttgcctttgcctactggaatcattacttgagctgtacatccccttgttcctgctaccgccccctgtgtagactgaatttcggcctgaatgtcgtggaaaacctggccttgctggtgctgacctacgtgtccagctctgaggacttcactattcacgagaatgcctttattgtgttcatagcttcatctctgggccacatgctcctaacctgcatcctttggcgtctgaccaagaagcatacagtctcccaggaagatcgcaagagctactcctggaaacagcgacttttcataattaatttcatatcatttttctccgctttggccgtctacttccggcacaatatgtactgcgaggctggtgtctatacaatatttgcaattctagaatatacagtagtgttgaccaacatggcattccacatgaccgcctggtgggacttcggaaataaagaactgctcattacatcacagcctgaggagaagagattctag

SEQ ID NO: 90054 - DNA, 765 bp, Artificial Sequence
  derived and/or modified sequence
atgtaccaggtgccgctgccactggatcgggatggcaccctggtgcgactgcggtttaccatggtggcgttggtgaccgtttgctgccctttggtggcattcttgttctgcatattatggagcctgctttttcacttcaaagagacgacagccacccactgcggagtcccaaactacttgccctctgtcagctccgccatcggcggagaggtgccccagaggtacgtgtggagattttgtatcggattacatagcgcgcctcgctttctcgtggctttcgcgtactggaaccactacctctcctgcacttcaccatgttcctgctatagacctctgtgccgcctaaactttgggcttaatgtcgtggaaaatcttgctcttttggttctgacctacgtgtcgagttctgaagattttaccattcacgagaatgctttcatcgtttttattgcatcttccctagggcacatgctgctgacctgtatcctgtggcgtctgacaaagaagcacacggtcagccaagaggaccggaaatcctatagctggaagcagcgacttttcatcattaatttcatcagctttttctccgctttggcagtgtactttcgccataatatgtattgcgaggctggggtatacaccattttcgcaattctcgagtataccgtggttctgacgaacatggcctttcatatgaccgcttggtgggatttcggcaataaggagctgctcatcacttcccaacccgaggaaaagcgcttctag

SEQ ID NO: 90055 - protein, 867 aa, Artificial Sequence
  derived and/or modified sequence
MRGFNLLLFWGCCVMHSWEGHIRPTRKPNTKGNNCRDSTLCPAYATCTNTVDSYYCACKQGFLSSNGQNHFKDPGVRCKDINECLTSSVCPEHSDCVNSMGSYSCSCQVGFISRNSTCEDVDECADPRACPEHATCNNTVGNYSCFCNPGFESSSGHLSFQGLKASCEDIDECTEMCPINSTCTNTPGSYFCTCHPGFAPSNGQLNFTDQGVECRDIDECRQDPSTCGPNSICTNALGSYSCGCIAGFHPNPEGSQKDGNFSCQRVLFKCKEDVIPDNKQIQQCQEGTAVKPAYVSFCAQINNIFSVLDKVCENKTTVVSLKNTTESFVPVLKQISTWTKFTKEETSSLATVFLESVESMTLASFWKPSANITPAVRTEYLDIESKVINKECSEENVTLDLVAKGDKMKIGCSTIEESESTETTGVAFVSFVGMESVLNERFFKDHQAPLTTSEIKLKMNSRVVGGIMTGEKKDGFSDPIIYTLENIQPKQKFERPICVSWSTDVKGGRWTSFGCVILEASETYTICSCNQMANLAVIMASGELTMDFSLYIISHVGIIISLVCLVLAIATFLLCRSIRNHNTYLHLHLCVCLLLAKTLFLAGIHKTDNKMGCAIIAGFLHYLFLACFFWMLVEAVILFLMVRNLKVVNYFSSRNIKMLHICAFGYGLPMLVVVISASVQPQGYGMHNRCWLNTETGFIWSFLGPVCTVIVVSKYYNSLAKCVLKEEQGDLRDLEFPGTCAAERINSLLLTWTLWILRQRLSSVNAEVSTLKDTRLLTFKAFAQLFILGCSWVLGIFQIGPVAGVMAYLFTIINSLQGAFIFLIHCLLNGQVREEYKRWITGKTKPSSQSQTSRILLSSMPSASKTG

SEQ ID NO: 90056 - DNA, 2604 bp, Artificial Sequence
  derived and/or modified sequence
atgagaggatttaatctccttctgttctgggggtgttgtgtcatgcactcttgggagggccacattcgtccaacccgtaaacctaacacaaaggggaataactgtagagactctacattgtgcccagcctatgccacatgtacgaatacagtcgactcctactactgcgcgtgcaagcagggctttcttagcagcaatgggcagaaccattttaaagatcctggtgttcgttgtaaggatataaacgaatgtctgacatcatctgtatgccccgaacattccgattgcgtcaattcaatgggctcttactcttgtagctgccaggtcggctttatcagcagaaatagcacttgcgaagacgtagacgaatgcgccgatcctcgcgcctgtcctgagcatgcgacatgtaataataccgtcggtaattactcttgcttttgtaacccagggtttgagagttcttctgggcatcttagttttcaaggcctgaaggcttcatgcgaggatattgacgaatgtactgagatgtgtccaataaattctacatgtacgaacacacctggctcctatttctgtacttgtcaccccggtttcgccccaagcaatggtcagctgaactttaccgatcagggagttgagtgccgcgacattgacgaatgcaggcaagatccgagcacgtgtggcccaaattcgatttgcacaaacgccctaggttcctattcgtgcggatgcatagccggctttcatccaaacccggaggggtcacagaaggatggaaacttttcctgccaacgggtgctgtttaagtgcaaagaagatgtgatccccgataataagcaaattcagcagtgccaggaagggaccgccgttaagcctgcatatgtgtctttctgcgctcaaattaacaatatttttagtgttctggataaggtgtgtgagaacaagaccacagttgtgagccttaaaaatactactgagtccttcgtgcctgtattgaaacagatttccacctggaccaaatttacaaaggaggagacctctagccttgctaccgtctttctcgaatctgtggagtcgatgaccctggcttctttttggaagcccagtgctaatattactcccgcggtgaggaccgagtacctggacatcgagtccaaagtaatcaacaaagaatgctccgaggaaaacgtgacattagacctcgttgccaaaggcgacaagatgaaaatcgggtgcagtactattgaagagagcgagagcaccgagacaacgggagtagcgttcgtcagcttcgtggggatggagtcagtgctgaacgagcggttcttcaaagaccaccaggcccctttaacaactagcgaaatcaaactcaagatgaactctagagtggtgggcgggataatgacaggggagaagaaagacggattcagcgacccaatcatctacaccttggagaacattcaacccaagcagaaatttgaaaggcccatatgcgtctcttggagcacagacgtgaagggtgggagatggacatcgtttggttgcgtgattctcgaggcttcagagacctacacaatttgttcatgtaaccagatggccaatcttgccgttattatggccagcggcgagctgacaatggacttcagcctgtacatcatcagccatgtcgggattatcatcagcctggtgtgtctggtgctagcaatcgccacctttctgttgtgtcgtagcatccgtaaccacaatacgtaccttcaccttcatctgtgcgtttgtctgctgttggctaagaccttattcctcgctggcatccacaaaaccgataacaaaatggggtgcgccataatcgccgggtttctgcactacctgttcctcgcctgtttcttttggatgcttgttgaggcggtcatcctgtttctcatggtgaggaatctaaaagtggtgaattatttttcaagtcgcaacatcaaaatgcttcatatatgtgcttttggctacggactgccaatgctggttgtcgttatcagcgcttctgtgcagccgcagggctatggcatgcataacaggtgttggttgaacacagagactggcttcatttggtcgtttctgggccccgtgtgcactgtaatagtcgtgtctaaatactacaactcactggccaaatgtgtcctgaaagaagaacagggggatcttagggatctggagtttcccggaacttgtgctgcggaacggatcaatagcctgctactcacctggactttgtggattctgcgccaaagactctcttccgtaaatgcagaagtgtcaacgcttaaagacacgagactgctgacttttaaagctttcgcacagctcttcatcctgggttgttcctgggttctgggtattttccagattgggcccgtggcaggagtgatggcctatttgtttaccatcataaatagtttgcagggtgcctttatattcctgatccattgtcttctaaatggccaggttcgcgaagagtacaaacggtggattaccggtaagacgaagcccagttcccagtcacagactagccgaatcctacttagttctatgccttcggctagtaagacgggctag

SEQ ID NO: 90057 - DNA, 2604 bp, Artificial Sequence
  derived and/or modified sequence
atgaggggcttcaacctgctgctcttctggggctgctgcgtgatgcacagctgggagggccacatccggcccaccaggaagcccaacaccaagggcaacaactgccgggacagcaccctgtgcccagcctatgccacctgcaccaacacagtggacagctactactgtgcctgcaagcagggcttcctgagcagcaatggccagaaccacttcaaggaccccggggtgcgctgcaaggacatcaatgaatgtctgaccagctctgtgtgcccagagcacagcgactgtgtgaacagcatgggcagctacagctgcagctgccaggtgggcttcatcagcaggaacagcacctgtgaagatgtggatgaatgtgccgacccccgggcctgcccagagcacgccacctgcaacaacacagtgggcaactacagctgcttctgcaaccctggctttgagagcagcagcggccacctgtccttccagggcctgaaggccagctgtgaggacattgatgagtgcacagagatgtgccccatcaacagcacctgcaccaacaccccaggcagctacttctgcacctgccaccctggctttgcccccagcaatggccagctgaacttcacagaccagggcgtggagtgccgggacattgatgaatgtcggcaggaccccagcacctgtggccccaacagcatctgcaccaatgccctgggcagctacagctgtggctgcatcgccggcttccaccccaaccctgagggcagccagaaggatggcaacttcagctgccagagggtgctcttcaagtgcaaggaggatgtgatcccagacaacaagcagatccagcagtgccaggagggcacagctgtgaagccagcctacgtgtccttctgtgcccagatcaacaacatcttctctgtgctggacaaggtgtgtgagaacaagaccaccgtggtgtccctgaagaacaccacagagagctttgtgcctgtgctgaagcagatcagcacctggaccaagttcaccaaggaggagaccagcagcctggccaccgtcttcctggagagcgtggagagcatgaccctggccagcttctggaagcccagcgccaacatcaccccagctgtgaggacagagtacctggacatcgagagcaaggtgatcaacaaggaatgttctgaagaaaatgtgaccctggacctggtggccaagggggacaagatgaagattggctgcagcaccatcgaggagagcgagagcacagagaccaccggggtggcctttgtgtcctttgtgggcatggagagcgtgctgaatgaacgcttcttcaaggaccaccaggcccccctgaccaccagcgagatcaagctgaagatgaacagccgggtggtgggcggcatcatgactggagagaagaaggatggcttcagtgaccccatcatctacaccctggagaacatccagcccaagcagaagtttgagcggcccatctgtgtgtcctggagcacagatgtgaagggcggccgctggaccagctttggctgtgtgatcctggaggccagcgagacctacaccatctgcagctgcaaccagatggccaacctggccgtcatcatggccagcggggagctgaccatggacttcagcctgtacatcatcagccacgtgggcatcatcatcagcctggtgtgcctggtgctggccatcgccaccttcctgctgtgccgcagcatccggaaccacaacacctacctgcacctgcacctgtgtgtgtgcctgctgctggccaagaccctcttcctggccggcatccacaagacagacaacaagatgggctgtgccatcatcgccggcttcctgcactacctgttcctggcctgcttcttctggatgctggtggaggccgtcatcctcttcctgatggtgaggaacctgaaggtggtgaactacttcagcagcaggaacatcaagatgctgcacatctgtgccttcggctacggcctgcccatgctggtggtggtgatcagcgcctctgtgcagccccagggctacggcatgcacaaccgctgctggctgaacacagagaccggcttcatctggagcttcctgggccctgtgtgcaccgtcatcgtggtgtccaagtactacaacagcctggccaagtgtgtgctgaaggaggagcagggcgacctgcgggacctggagttccctggcacctgtgccgctgagcgcatcaacagcctgctgctgacctggaccctgtggatcctgcggcagaggctgagctctgtgaatgctgaggtgtccaccctgaaggacacccggctgctgaccttcaaggcctttgcccagctgttcatcctgggctgctcctgggtgctgggcatcttccagatcggccctgtggccggcgtgatggcctacctgttcaccatcatcaacagcctgcagggcgccttcatcttcctgatccactgcctgctgaatggccaggtgcgggaggagtacaagcgctggatcaccgggaagaccaagcccagcagccagagccagaccagccgcatcctgctgagctccatgcccagcgccagcaagacaggatag

SEQ ID NO: 90058 - DNA, 2604 bp, Artificial Sequence
  derived and/or modified sequence
atgcggggcttcaacctgctgctgttctggggctgctgcgtgatgcatagttgggagggtcatatccggccgacaaggaagcccaatacgaagggcaacaactgcagggatagcaccctgtgccccgcttacgccacctgcacgaacactgtagattcctattactgtgcctgtaagcagggcttccttagctccaacgggcagaaccactttaaagatcctggtgtgagatgcaaagatatcaacgagtgtctgacaagcagcgtgtgccctgagcactctgattgcgttaactccatgggctcgtactcctgtagttgtcaggtcggcttcataagtcgcaattcaacctgcgaggacgtcgatgagtgcgctgatcctagagcgtgccctgagcacgccacctgcaacaacactgtgggcaattattcttgtttctgtaaccccggcttcgagagctccagtggccatctgtctttccagggccttaaggccagctgtgaggatatcgacgaatgtacagagatgtgtcccatcaattcaacgtgtaccaacacccccggcagctatttttgcacatgtcaccctggtttcgctccatctaacgggcagctcaactttactgaccagggcgtggagtgccgggacatcgatgagtgtagacaagaccccagtacttgcggtccaaatagtatctgcaccaatgccctcggctcatactcctgcggctgcatagccgggttccatcctaacccagaaggttcccagaaagatggtaatttctcctgtcaaagggtcctttttaagtgtaaagaagacgtgattcctgacaacaagcagattcaacagtgccaggagggcactgcggttaagcctgcatacgtatccttttgcgcccaaatcaataatattttctcggtacttgataaggtgtgcgagaacaaaactacagtcgtcagtctgaagaacaccactgagagcttcgtgccggtgctcaagcagatttctacgtggactaagtttacaaaagaagaaacatcatccctggccacggtgttcctggagtccgtggagagtatgaccctcgcttcattctggaagccatccgccaatataactccggccgtccgcacagagtacctagatattgaaagtaaggtcatcaataaggaatgttctgaggaaaatgtgactcttgacctggtagccaagggcgataagatgaagatcggttgttcaaccattgaagaatccgagtctaccgagaccacaggggttgcctttgtgtcattcgtgggaatggagagcgtactgaacgagcgattctttaaagaccaccaggccccactgacgacatccgagattaagctgaagatgaacagcagggtggtcggcggcatcatgactggggagaagaaggacggcttttccgatccaatcatctatactctggagaacatccaacccaagcaaaaattcgaacgccccatctgtgtatcttggtcaacagatgttaagggaggtcggtggacctcattcggctgcgtcattttggaagcatccgagacttatacaatctgtagctgtaatcagatggccaatctggccgtcatcatggcgagcggcgaattgactatggacttcagcttatacataattagccatgtgggaattattatatcattggtgtgcctagtgctggccattgctaccttcctcctttgtaggagcatacgtaaccacaacacctacctgcacctgcacttgtgtgtttgtttacttctcgctaaaactctgttcctcgcgggcatccacaaaaccgacaataaaatggggtgcgctattattgcggggttccttcactatttattcctcgcctgtttcttctggatgctggtggaagcggtcattttatttctgatggtgcgtaacctgaaggtagtaaactacttcagcagcagaaatattaaaatgcttcatatatgcgcatttggctatggattaccaatgctggtcgttgtcatctccgcttccgtgcagccccaaggctacggcatgcacaacagatgttggctcaatactgaaaccggctttatctggagcttcctaggaccagtctgcacggtaatcgttgtctctaagtactataattcattggctaaatgcgtgctgaaggaagagcaaggggacctgcgggatttggaattccctggaacctgtgctgcagaaaggatcaactcactgctcctaacttggacactatggatcctgaggcagaggctaagtagcgtgaacgccgaggtctcaacacttaaggacacccgcctcttgacattcaaagcttttgcacagctcttcattctgggctgctcttgggtgctgggcatctttcagatcggccccgtggccggtgttatggcttacttgttcactattataaacagcctgcagggggcttttatcttcctaatacactgcctattaaatggtcaggtgagagaggagtataagagatggattacaggcaaaaccaaaccttcatcccagtcacagacctcaagaatcttgctgagtagcatgccctccgcctcaaagaccgggtag

SEQ ID NO: 90059 - DNA, 2604 bp, Artificial Sequence
  derived and/or modified sequence
atgaggggctttaatctcctgcttttttgggggtgttgtgtgatgcatagttgggagggacacatccggccaaccagaaaaccaaacactaaaggaaataattgtagggactctaccctgtgcccagcttatgctacctgtaccaacaccgtggacagctactactgtgcctgcaagcagggcttcctttcttctaatggccagaaccacttcaaggaccccggagtgaggtgtaaggacatcaatgagtgcctgacctcctctgtgtgccccgagcacagtgactgcgtcaactcaatgggaagctactcttgcagctgccaagtgggttttatcagccgaaatagtacttgtgaggatgtggacgaatgcgctgatccccgagcatgtcccgaacatgcaacgtgcaacaatactgtaggaaactactcctgcttttgcaaccccggatttgaatcaagctccgggcacttgagcttccagggactgaaggcatcatgcgaggatatagatgagtgcacagaaatgtgtcctattaacagtacatgcactaacacccctgggagctacttttgcacctgccatccaggatttgcaccgtccaatgggcagcttaatttcaccgatcaaggagttgagtgtagggacatagatgagtgtcgccaagatcctagtacatgtggcccaaactccatatgcactaacgcgctgggaagctattcctgcgggtgcattgcgggattccatccaaatcccgaaggcagccagaaggacggaaatttttcttgtcagagggtcctgttcaaatgtaaggaagacgtgatacctgacaacaagcagatccaacagtgtcaggagggcacagccgtaaagcccgcttacgtgagtttctgtgcccagatcaataatatcttttccgtcctcgacaaggtatgtgaaaataaaacgaccgtggtgtcccttaagaacaccacagagagcttcgtgccagtacttaagcagatcagtacgtggacaaaatttactaaagaggagacttcttccctcgccacagtcttcctagaaagcgtggagagtatgaccctcgcaagcttctggaagcctagtgccaatatcaccccagccgtcagaaccgagtacctggatatcgaaagcaaggtgatcaataaagagtgttctgaagagaacgtgactctggacctggtagcgaaaggagacaagatgaagattggatgcagcacgatcgaagagtctgagtcgacagaaaccaccggcgtcgcatttgtatcttttgtggggatggaatctgttctcaatgagcgcttttttaaagaccaccaggcaccactgacgacaagcgagatcaagctcaagatgaattcaagggtggtggggggaatcatgactggcgagaagaaagacgggttctcagatcctattatctacaccttggagaacattcagccaaagcaaaagttcgagcgcccaatttgtgtcagttggagcacagacgtgaaaggaggcagatggaccagcttcggctgtgttattcttgaggcatcagaaacctatactatctgctcttgcaaccagatggcgaatttggcagttattatggcttctggcgaactgaccatggacttctccctttacattatctcacacgtcggtataattattagcctggtgtgcctggtgctcgcaatcgcaacttttttgctgtgccgctccattaggaaccacaacacatacctgcatctccacctgtgtgtttgcctgttgttagccaaaacactgtttttggcaggtatccataagactgataacaaaatggggtgtgccataatcgccggtttcttgcactatctgttcctggcctgttttttttggatgttagtggaggccgtcatcctttttctgatggtacgcaaccttaaggtggtcaattacttcagcagcaggaatatcaagatgctgcacatttgcgcctttggttacggcctacctatgttagtcgttgtaataagtgctagcgtgcagcctcagggctacggaatgcataaccgatgttggctgaacaccgagaccgggtttatttggtctttcctgggcccagtgtgcacggttattgtcgtgagcaagtactataactccctagcaaaatgcgtactcaaagaggagcagggcgacctgagagatctagaattcccagggacatgcgcagcggaaaggataaacagcctgcttttgacctggactctctggattttgagacagagactatcaagtgtcaatgcagaagttagcacattaaaggatacccgtctactgacattcaaagcctttgcccagctattcatcttgggctgctcatgggtgttggggatttttcagatcggccctgtggccggtgtgatggcatacctcttcaccattatcaactcactacagggggcattcatctttctgattcattgtctgctgaatgggcaggttcgcgaggagtacaagaggtggatcaccggcaagacgaaaccctcttcccaaagccagacgtcccggattctgctgtctagcatgccgtccgcaagcaagaccggatag

SEQ ID NO: 90060 - DNA, 2604 bp, Artificial Sequence
  derived and/or modified sequence
atgagaggcttcaacctgctgctgttctggggctgctgcgtgatgcacagctgggagggccacatcagacccaccagaaagcccaacaccaagggcaacaactgcagagacagcaccctgtgccccgcctacgccacctgcaccaacaccgtggacagctactactgcgcctgcaagcagggcttcctgagcagcaacggccagaaccacttcaaggaccccggcgtgagatgcaaggacatcaacgagtgcctgaccagcagcgtgtgccccgagcacagcgactgcgtgaacagcatgggcagctacagctgcagctgccaggtgggcttcatcagcagaaacagcacctgcgaggacgtggacgagtgcgccgaccccagagcctgccccgagcacgccacctgcaacaacaccgtgggcaactacagctgcttctgcaaccccggcttcgagagcagcagcggccacctgagcttccagggcctgaaggccagctgcgaggacatcgacgagtgcaccgagatgtgccccatcaacagcacctgcaccaacacccccggcagctacttctgcacctgccaccccggcttcgcccccagcaacggccagctgaacttcaccgaccagggcgtggagtgcagagacatcgacgagtgcagacaggaccccagcacctgcggccccaacagcatctgcaccaacgccctgggcagctacagctgcggctgcatcgccggcttccaccccaaccccgagggcagccagaaggacggcaacttcagctgccagagagtgctgttcaagtgcaaggaggacgtgatccccgacaacaagcagatccagcagtgccaggagggcaccgccgtgaagcccgcctacgtgagcttctgcgcccagatcaacaacatcttcagcgtgctggacaaggtgtgcgagaacaagaccaccgtggtgagcctgaagaacaccaccgagagcttcgtgcccgtgctgaagcagatcagcacctggaccaagttcaccaaggaggagaccagcagcctggccaccgtgttcctggagagcgtggagagcatgaccctggccagcttctggaagcccagcgccaacatcacccccgccgtgagaaccgagtacctggacatcgagagcaaggtgatcaacaaggagtgcagcgaggagaacgtgaccctggacctggtggccaagggcgacaagatgaagatcggctgcagcaccatcgaggagagcgagagcaccgagaccaccggcgtggccttcgtgagcttcgtgggcatggagagcgtgctgaacgagagattcttcaaggaccaccaggcccccctgaccaccagcgagatcaagctgaagatgaacagcagagtggtgggcggcatcatgaccggcgagaagaaggacggcttcagcgaccccatcatctacaccctggagaacatccagcccaagcagaagttcgagagacccatctgcgtgagctggagcaccgacgtgaagggcggcagatggaccagcttcggctgcgtgatcctggaggccagcgagacctacaccatctgcagctgcaaccagatggccaacctggccgtgatcatggccagcggcgagctgaccatggacttcagcctgtacatcatcagccacgtgggcatcatcatcagcctggtgtgcctggtgctggccatcgccaccttcctgctgtgcagaagcatcagaaaccacaacacctacctgcacctgcacctgtgcgtgtgcctgctgctggccaagaccctgttcctggccggcatccacaagaccgacaacaagatgggctgcgccatcatcgccggcttcctgcactacctgttcctggcctgcttcttctggatgctggtggaggccgtgatcctgttcctgatggtgagaaacctgaaggtggtgaactacttcagcagcagaaacatcaagatgctgcacatctgcgccttcggctacggcctgcccatgctggtggtggtgatcagcgccagcgtgcagccccagggctacggcatgcacaacagatgctggctgaacaccgagaccggcttcatctggagcttcctgggccccgtgtgcaccgtgatcgtggtgagcaagtactacaacagcctggccaagtgcgtgctgaaggaggagcagggcgacctgagagacctggagttccccggcacctgcgccgccgagagaatcaacagcctgctgctgacctggaccctgtggatcctgagacagagactgagcagcgtgaacgccgaggtgagcaccctgaaggacaccagactgctgaccttcaaggccttcgcccagctgttcatcctgggctgcagctgggtgctgggcatcttccagatcggccccgtggccggcgtgatggcctacctgttcaccatcatcaacagcctgcagggcgccttcatcttcctgatccactgcctgctgaacggccaggtgagagaggagtacaagagatggatcaccggcaagaccaagcccagcagccagagccagaccagcagaatcctgctgagcagcatgcccagcgccagcaagaccggctag

SEQ ID NO: 90061 - DNA, 3056 bp, Artificial Sequence
  derived and/or modified sequence
cttttctttgaatgacagaactacagcataatgcgtggcttcaacctgctcctcttctggggatgttgtgttatgcacagctgggaagggcacataagacccacacggaaaccaaacacaaagggtaataactgtagagacagtaccttgtgcccagcttatgccacctgcaccaatacagtggacagttactattgcgcttgcaaacaaggcttcctgtccagcaatgggcaaaatcacttcaaggatccaggagtgcgatgcaaagatatcaatgagtgcctcaccagcagcgtctgccctgagcattctgactgtgtcaactccatgggaagctacagttgcagctgtcaagttggattcatctctagaaactccacctgtgaagacgtggatgaatgtgcagatccaagagcttgcccagagcatgcaacttgtaataacactgttggaaactactcttgtttctgcaacccaggatttgaatccagcagtggccacttgagtttccagggtctcaaagcatcgtgtgaagatattgatgaatgcactgaaatgtgccccatcaattcaacatgcaccaacactcctgggagctacttttgcacctgccaccctggctttgcaccaagcaatggacagttgaatttcacagaccaaggagtggaatgtagagatattgatgagtgccgccaagatccatcaacctgtggtcctaattctatctgcaccaatgccctgggctcctacagctgtggctgcattgcaggctttcatcccaatccagaaggctcccagaaagatggcaacttcagctgccaaagggttctcttcaaatgtaaggaagatgtgatacccgataataagcagatccagcaatgccaagagggaaccgcagtgaaacctgcatatgtctccttttgtgcacaaataaataacatcttcagcgttctggacaaagtgtgtgaaaataaaacgaccgtagtttctctgaagaatacaactgagagctttgtccctgtgcttaaacaaatatccacgtggactaaattcaccaaggaagagacgtcctccctggccacagtcttcctggagagtgtggaaagcatgacactggcatctttttggaaaccctcagcaaatatcactccggctgttcggacggaatacttagacattgagagcaaagttatcaacaaagaatgcagtgaagagaatgtgacgttggacttggtagccaagggggataagatgaagatcgggtgttccacaattgaggaatctgaatccacagagaccactggtgtggcttttgtctcctttgtgggcatggaatcggttttaaatgagcgcttcttcaaagaccaccaggctcccttgaccacctctgagatcaagctgaagatgaattctcgagtcgttgggggcataatgactggagagaagaaagacggcttctcagatccaatcatctacactctggagaacattcagccaaagcagaagtttgagaggcccatctgtgtttcctggagcactgatgtgaagggtggaagatggacatcctttggctgtgtgatcctggaagcttctgagacatataccatctgcagctgtaatcagatggcaaatcttgccgttatcatggcgtctggggagctcacgatggacttttccttgtacatcattagccatgtaggcattatcatctccttggtgtgcctcgtcttggccatcgccacctttctgctgtgtcgctccatccgaaatcacaacacctacctccacctgcacctctgcgtgtgtctcctcttggcgaagactctcttcctcgccggtatacacaagactgacaacaagatgggctgcgccatcatcgcgggcttcctgcactaccttttccttgcctgcttcttctggatgctggtggaggctgtgatactgttcttgatggtcagaaacctgaaggtggtgaattacttcagctctcgcaacatcaagatgctgcacatctgtgcctttggttatgggctgccgatgctggtggtggtgatctctgccagtgtgcagccacagggctatggaatgcataatcgctgctggctgaatacagagacagggttcatctggagtttcttggggccagtttgcacagttatagtggtaagcaaatactacaacagcctggcgaagtgtgttctgaaggaggagcaaggagacctgcgagatctggaatttccagggacgtgtgcagctgagaggatcaactcccttctcctgacctggaccttgtggatcctgaggcagaggctttccagtgttaatgccgaagtctcaacgctaaaagacaccaggttactgaccttcaaggcctttgcccagctcttcatcctgggctgctcctgggtgctgggcatttttcagattggacctgtggcaggtgtcatggcttacctgttcaccatcatcaacagcctgcagggggccttcatcttcctcatccactgtctgctcaacggccaggtacgagaagaatacaagaggtggatcactgggaagacgaagcccagctcccagtcccagacctcaaggatcttgctgtcctccatgccatccgcttccaagacgggttaaagtcctttcttgctttcaaatatgctatggagccacagttgaggacagtagtttcctgcaggagcctaccctgaaatctcttctcagcttaacatggaaatgaggatcccaccagccccagaaccctctggggaagaatgttgggggcggtcttcctgtggttgtatgcactgatgagaaatcaggcgtttctgctccaaacgaccattttatcttcgtgctctgcaacttcttcaattccagagtttctgagaacagacccaaattcaatggcatgaccaagaacacctggctaccattttgttttctcctgcccttgttggtgcatggttctaagcatgcccctccagagcctatcatacgcctgatacagagaacctctcaataaatgatttgtcgcctgtctgactgatttaccctag

SEQ ID NO: 90062 - protein, 821 aa, Artificial Sequence
  derived and/or modified sequence
MRGFNLLLFWGCCVMHSWEGHIRPTRKPNTKGNNCRDSTLCPAYATCTNTVDSYYCACKQGFLSSNGQNHFKDPGVRCKDIDECSQSPQPCGPNSSCKNLSGRYKCSCLDGFSSPTGNDWVPGKPGNFSCTDINECLTSSVCPEHSDCVNSMGSYSCSCQVGFISRNSTCEDVDECADPRACPEHATCNNTVGNYSCFCNPGFESSSGHLSFQGLKASCEDIDECTEMCPINSTCTNTPGSYFCTCHPGFAPSNGQLNFTDQGVECRDIDECRQDPSTCGPNSICTNALGSYSCGCIAGFHPNPEGSQKDGNFSCQRVLFKCKEDVIPDNKQIQQCQEGTAVKPAYVSFCAQINNIFSVLDKVCENKTTVVSLKNTTESFVPVLKQISTWTKFTKEETSSLATVFLESVESMTLASFWKPSANITPAVRTEYLDIESKVINKECSEENVTLDLVAKGDKMKIGCSTIEESESTETTGVAFVSFVGMESVLNERFFKDHQAPLTTSEIKLKMNSRVVGGIMTGEKKDGFSDPIIYTLENIQPKQKFERPICVSWSTDVKGGRWTSFGCVILEASETYTICSCNQMANLAVIMASGELTMGCAIIAGFLHYLFLACFFWMLVEAVILFLMVRNLKVVNYFSSRNIKMLHICAFGYGLPMLVVVISASVQPQGYGMHNRCWLNTETGFIWSFLGPVCTVIVINSLLLTWTLWILRQRLSSVNAEVSTLKDTRLLTFKAFAQLFILGCSWVLGIFQIGPVAGVMAYLFTIINSLQGAFIFLIHCLLNGQVREEYKRWITGKTKPSSQSQTSRILLSSMPSASKTG

SEQ ID NO: 90063 - DNA, 2466 bp, Artificial Sequence
  derived and/or modified sequence
atgcgaggctttaacctcctgctgttctggggatgctgcgttatgcattcctgggaaggccacatccggccaaccagaaaacccaataccaaggggaacaactgccgcgatagcacgctctgcccagcgtatgccacttgcacaaatacggtggatagctattattgcgcctgcaagcaggggtttctgagttctaatggccagaaccatttcaaggaccccggcgtgcgatgtaaagacattgatgagtgcagccaaagtcctcagccatgcggccccaacagttcctgcaaaaatctgagcggaagatacaagtgctcttgcctagacgggtttagcagcccaacaggaaacgactgggtccccggaaaaccgggaaacttctcatgcaccgatatcaatgaatgccttacctcaagtgtgtgtcccgaacattcagattgtgtgaactcaatgggttcttactcatgctcctgtcaagtgggcttcatatcccgcaacagcacctgcgaggacgtggatgaatgtgccgatcccagagcctgcccagaacatgcaacctgtaacaataccgtcggcaattactcctgcttttgtaatccgggcttcgaatcatccagtggccatctaagttttcagggcctgaaagctagctgcgaagacatcgacgagtgcactgagatgtgccctatcaattctacctgtaccaatacaccaggctcatatttttgcacctgtcaccccggcttcgctccgagtaacgggcagctgaattttaccgatcagggtgtggaatgccgagacattgacgaatgccgacaggatccctcaacttgtgggcctaactccatatgtacaaacgccctaggctcctattcatgtgggtgcatcgcggggtttcacccaaatcccgagggatcacagaaagacggcaacttcagctgccagcgtgtgctattcaagtgtaaagaagacgttatccctgacaataagcagattcagcagtgccaagaaggcaccgccgtcaagcccgcatatgtttcgttctgcgctcagatcaacaacattttctctgtgttagacaaggtgtgtgagaacaagactactgtagttagccttaaaaatacgacggagagctttgtgcctgtcttgaagcaaattagcacatggaccaagttcacaaaggaggaaacatcctcactcgcgacggtttttctggaatccgtagagagcatgacgcttgcaagcttctggaagccttccgcaaatattactccagccgtgcgaactgaatacctcgatattgagtctaaggtgattaataaagagtgcagcgaggaaaatgtgacactggaccttgtcgccaaaggagacaagatgaaaatcggatgctccactatagaagagtcagagtccaccgagaccaccggggtcgccttcgtgtccttcgtgggtatggaaagtgtcctgaatgagaggttctttaaagaccaccaagcaccgctgaccacatccgagatcaaactgaagatgaactccagggttgtcggggggatcatgacaggggagaagaaggacgggttctccgatcctattatctatactttggaaaatattcaacctaagcagaaatttgaaaggcctatatgtgtgtcttggtccaccgacgtgaaggggggcaggtggacctcatttggatgtgttattctggaggcatcagagacctacactatctgttcctgtaatcagatggctaatctggcggttatcatggccagcggtgagctcactatgggttgcgcaataatagctgggttcctgcactatttgtttttagcttgtttcttctggatgctagtagaggccgtaattctgtttttgatggtgaggaatctgaaagtggtgaattacttttccagcaggaacataaagatgttacatatctgcgcgtttggatacgggctgccgatgctggtggtcgtcatttccgcaagtgttcagcctcagggctatggaatgcataaccgctgctggctcaatacggagaccggcttcatatggtcttttctgggccccgtgtgtaccgtaatcgtgattaatagcttgttgctcacttggacgctttggatcctcaggcagcgcctcagcagcgtaaatgccgaggtctcgaccttaaaagatacacgactcctcacattcaaagcattcgcacagttgttcattcttggctgctcttgggtactgggtatctttcagattggacctgtggctggcgtgatggcatacctgttcaccatcatcaactctcttcaaggggcctttatttttttgatccactgtctgctgaacggccaggttcgagaagaatataagagatggattacgggcaagactaaaccaagctcccaaagccagacgtcacggatccttctatccagcatgccttccgcctctaagacgggttag

SEQ ID NO: 90064 - DNA, 2466 bp, Artificial Sequence
  derived and/or modified sequence
atgagaggtttcaacctcctgctcttttgggggtgttgcgtcatgcactcatgggaagggcacataagaccaactaggaagccaaacaccaaggggaacaattgccgcgattctacgctctgccctgcatatgccacctgcactaacaccgtagattcgtactattgcgcatgtaagcaaggttttctatccagcaatgggcagaaccactttaaggatcccggtgtgagatgcaaagatattgacgaatgcagccagtcaccgcagccatgtggccccaacagcagctgtaaaaatctgtcaggacggtacaaatgctcctgcctggacggatttagctctccaacaggcaatgactgggtgcccgggaagcccggaaatttttcttgcaccgacattaatgaatgcctgacctcttccgtgtgccccgaacactcagactgcgtgaactcaatgggatcttacagttgtagctgccaagtgggttttatctctaggaattccacttgcgaggacgtggacgagtgtgcggatccacgggcatgtccagagcacgctacttgtaataatacagtgggaaactatagttgcttctgtaacccgggatttgagtcttcgtcgggccacttgtcgtttcagggtctgaaagcaagctgtgaagatatagatgaatgcaccgagatgtgtccgattaatagcacatgtacaaatacacctggctcgtacttttgcacctgccatcctggttttgccccttcgaacggccagcttaattttacagaccagggggtggagtgcagggacatcgatgaatgccgccaggacccgtcgacttgtggacccaactctatctgcaccaacgccctcgggtcctattcctgtggatgtatagctggctttcaccccaacccggaaggaagccaaaaagacggcaacttttcttgtcaaagagtcctcttcaaatgtaaagaagatgttatccctgataacaaacagattcagcagtgtcaagaggggaccgccgtcaaaccagcttatgtgtccttctgcgctcagataaataacatcttctctgtcttagataaagtctgtgagaacaagactaccgtagtgagtttgaaaaacaccacagagagcttcgttcccgttctcaagcagatcagtacatggactaaatttacaaaagaggagacctcttcacttgcaaccgtgtttttggagtctgtagagagcatgacactcgcttccttttggaaaccctccgcaaacatcacccccgcggttcggacagaatatttagacatagagagtaaagtaataaataaggaatgtagcgaggaaaatgtaaccctcgaccttgtggccaaaggggacaagatgaagatcggatgtagcaccatcgaggagtccgaatcaactgagacaaccggagtggccttcgtctctttcgtcgggatggagagtgtgctgaacgaacgtttctttaaggaccatcaggcacccctgacgacctccgaaattaagctgaagatgaactctcgcgtggttggcgggattatgaccggtgagaagaaagatggatttagcgaccctataatttacactttagaaaatattcagccgaagcagaagtttgaacgtcccatatgtgtgtcatggagtaccgacgttaagggtggcaggtggacaagcttcggctgtgttatattagaagccagcgaaacttatacaatatgcagctgtaaccagatggccaacctcgctgtcataatggcttccggagagcttaccatgggctgcgccatcatcgctggtttcctgcactacctcttcttagcgtgtttcttttggatgctggtagaagctgttatcctgtttcttatggtccgtaacttaaaggtagtgaactacttttcctctagaaacataaaaatgctgcacatttgtgcatttggctatgggcttcctatgttggtggtggtgatttctgccagtgtgcagcctcagggatacggcatgcacaaccgatgttggttaaatactgaaaccggctttatctggtcattcctgggtccagtttgcaccgttatcgtaatcaactccctattgctgacatggaccctgtggatccttaggcaaagactatctagcgttaacgcagaagtgagtacgttgaaggacaccagactcctcacctttaaggctttcgcacaactgtttatattaggctgtagctgggtcctggggatctttcagattgggcccgtcgctggcgtgatggcctacttgtttactataataaatagtctgcagggcgccttcatttttttaattcactgcctgctgaatggccaggtgcgcgaggagtataaacggtggataactggcaaaactaagccttcatcgcaatctcagacttctcggatcttgctctcgtccatgcccagtgcctctaagacagggtag

SEQ ID NO: 90065 - DNA, 2466 bp, Artificial Sequence
  derived and/or modified sequence
atgaggggcttcaacctgctgctcttctggggctgctgcgtgatgcacagctgggagggccacatccggcccaccaggaagcccaacaccaagggcaacaactgccgggacagcaccctgtgcccagcctatgccacctgcaccaacacagtggacagctactactgtgcctgcaagcagggcttcctgagcagcaatggccagaaccacttcaaggaccccggggtgcgctgcaaggacattgatgaatgttcccagagcccccagccctgtggccccaacagcagctgcaagaacctgagcggccgctacaagtgcagctgcctggatggcttcagcagccccactggaaatgactgggtgcctgggaagccaggcaacttcagctgcacagacatcaatgaatgtctgaccagctctgtgtgcccagagcacagcgactgtgtgaacagcatgggcagctacagctgcagctgccaggtgggcttcatcagcaggaacagcacctgtgaagatgtggatgaatgtgccgacccccgggcctgcccagagcacgccacctgcaacaacacagtgggcaactacagctgcttctgcaaccctggctttgagagcagcagcggccacctgtccttccagggcctgaaggccagctgtgaggacattgatgagtgcacagagatgtgccccatcaacagcacctgcaccaacaccccaggcagctacttctgcacctgccaccctggctttgcccccagcaatggccagctgaacttcacagaccagggcgtggagtgccgggacattgatgaatgtcggcaggaccccagcacctgtggccccaacagcatctgcaccaatgccctgggcagctacagctgtggctgcatcgccggcttccaccccaaccctgagggcagccagaaggatggcaacttcagctgccagagggtgctcttcaagtgcaaggaggatgtgatcccagacaacaagcagatccagcagtgccaggagggcacagctgtgaagccagcctacgtgtccttctgtgcccagatcaacaacatcttctctgtgctggacaaggtgtgtgagaacaagaccaccgtggtgtccctgaagaacaccacagagagctttgtgcctgtgctgaagcagatcagcacctggaccaagttcaccaaggaggagaccagcagcctggccaccgtcttcctggagagcgtggagagcatgaccctggccagcttctggaagcccagcgccaacatcaccccagctgtgaggacagagtacctggacatcgagagcaaggtgatcaacaaggaatgttctgaagaaaatgtgaccctggacctggtggccaagggggacaagatgaagattggctgcagcaccatcgaggagagcgagagcacagagaccaccggggtggcctttgtgtcctttgtgggcatggagagcgtgctgaatgaacgcttcttcaaggaccaccaggcccccctgaccaccagcgagatcaagctgaagatgaacagccgggtggtgggcggcatcatgactggagagaagaaggatggcttcagtgaccccatcatctacaccctggagaacatccagcccaagcagaagtttgagcggcccatctgtgtgtcctggagcacagatgtgaagggcggccgctggaccagctttggctgtgtgatcctggaggccagcgagacctacaccatctgcagctgcaaccagatggccaacctggccgtcatcatggccagcggggagctgaccatgggctgtgccatcatcgccggcttcctgcactacctgttcctggcctgcttcttctggatgctggtggaggccgtcatcctcttcctgatggtgaggaacctgaaggtggtgaactacttcagcagcaggaacatcaagatgctgcacatctgtgccttcggctacggcctgcccatgctggtggtggtgatcagcgcctctgtgcagccccagggctacggcatgcacaaccgctgctggctgaacacagaaacaggcttcatctggagcttcctgggccctgtgtgcaccgtgattgtcatcaacagcctgctgctgacctggaccctgtggatcctgcggcagaggctgagctctgtgaatgctgaggtgtccaccctgaaggacacccggctgctgaccttcaaggcctttgcccagctgttcatcctgggctgctcctgggtgctgggcatcttccagatcggccctgtggccggcgtgatggcctacctgttcaccatcatcaacagcctgcagggcgccttcatcttcctgatccactgcctgctgaatggccaggtgcgggaggagtacaagcgctggatcaccgggaagaccaagcccagcagccagagccagaccagccgcatcctgctgagctccatgcccagcgccagcaagacaggatag

SEQ ID NO: 90066 - DNA, 2466 bp, Artificial Sequence
  derived and/or modified sequence
atgcggggcttcaacctgctgctgttctggggctgctgcgtgatgcacagctgggagggccacataagacccacccggaaacccaacacaaaaggcaacaattgtagggattccactctttgccccgcttatgcaacttgcaccaacacagtagactcatactactgtgcctgtaaacaagggttcctcagttcaaatgggcagaatcacttcaaagacccaggagtgcggtgtaaagacattgatgagtgctcgcagtctccacaaccatgcggcccaaacagctcctgtaaaaatctgtcggggcgctataagtgctcatgccttgatggcttctcttcccccactggtaacgattgggtcccaggtaagccgggtaatttctcatgtacagatatcaatgaatgtcttactagcagcgtttgtcccgagcacagcgactgtgtcaattctatgggcagttatagctgttcatgtcaagttggattcatctctcgcaatagcacatgcgaggatgttgacgaatgtgcagacccaagagcctgcccagaacacgcaacatgtaataataccgtggggaactacagttgcttctgcaatccgggctttgaaagttcaagtggtcatctgtcttttcagggcctgaaagcctcctgcgaagatatcgacgagtgtactgagatgtgccccatcaactcaacatgtacaaatacccctggatcatatttttgcacatgccaccccgggtttgccccgtctaatggacagctcaactttactgaccagggggtggagtgtcgggacatcgacgagtgtcgccaggatccaagtacatgtggacccaactccatatgcacaaatgcgctgggctcctacagttgcggatgtatcgccggattccatccaaatcccgaaggttcacaaaaagacggaaactttagctgtcaacgcgtccttttcaagtgcaaggaagacgtgataccagacaataaacagatacagcagtgccaggagggaactgctgtgaagcccgcatacgtgtcattctgcgcccagatcaataatattttctccgtcctcgataaggtttgtgagaacaagacaacagtcgtatcactgaagaatacaacagaatctttcgtgcctgttttgaagcaaatctcaacttggaccaagtttaccaaggaggaaaccagcagcctggccacagtgtttctggagtcagtggaatcaatgactcttgcttccttctggaagccttccgcgaacatcacccccgccgtccgcactgagtacttagatatcgagtccaaggtcataaataaggagtgcagcgaggagaacgtgactctggatctagtagccaaaggagataagatgaagattggctgttcaaccattgaagagtccgagagtacagagactacaggagtcgcattcgtgagcttcgtgggcatggagtccgtgctgaatgagagattctttaaggatcaccaggccccactgaccacgtcagagatcaaactgaaaatgaactctagagtcgtcggtggaattatgacgggagagaaaaaggacggtttttctgatcccattatttataccctcgagaacatccagcccaaacagaagtttgaacgtcccatctgtgtgagctggagcactgatgttaagggaggtagatggacatcttttggatgtgtgattctagaagcctctgaaacctataccatttgctcttgcaaccagatggcaaacttagccgtcatcatggccagtggggaacttacaatgggttgtgctatcatcgccggcttcttacattatctgttccttgcatgttttttctggatgctcgtggaagcggttattctgttcctgatggtgcgaaacctgaaagttgtgaattacttctccagccgcaatattaaaatgctccacatctgtgcgttcgggtatgggctgcccatgctggtggtggtcatatccgccagtgtccagccacaggggtacggcatgcacaatagatgttggctaaacacggaaaccggctttatctggagttttcttggacctgtgtgcacagtgatcgtaatcaactctctcctcctgacatggacactgtggatactcagacaacggctttccagcgtgaatgctgaagttagtaccctcaaagatacgaggctgctgacgttcaaagccttcgctcaattattcattctcgggtgcagctgggttctggggatctttcagataggacctgtggcaggcgttatggcatatttattcaccataataaactctctgcagggtgccttcatcttcctgatccactgcctccttaacggacaggtcagagaggagtacaaacggtggatcacgggaaagaccaaaccgtctagtcaaagtcagacatcaagaatccttctcagctccatgcctagcgcgagcaagaccgggtag

SEQ ID NO: 90067 - DNA, 2466 bp, Artificial Sequence
  derived and/or modified sequence
atgcggggcttcaacctgctgctgttctggggctgctgcgtgatgcacagttgggaagggcatattcggcctaccaggaagccaaacaccaagggcaacaactgcagggacagcacgctgtgtccggcttacgcaacttgtaccaatacagtggacagctattactgcgcatgcaaacaggggtttctttctagcaatggccaaaaccacttcaaagacccaggagtgcgatgcaaggatattgacgaatgcagtcagagccctcagccttgtggaccaaattcttcttgtaaaaatctgagcggacggtataaatgttcatgtctcgacgggtttagctcacctacagggaatgactgggttcctgggaaacctggcaatttttcatgtaccgatattaatgagtgtttaacttcatccgtatgtcccgaacactcggactgcgtgaatagtatggggtcatattcttgctcctgtcaagttggattcatctcacgtaacagcacatgcgaagacgtggatgagtgtgcagaccctagagcatgccccgagcatgccacatgtaataacaccgtcggcaattactcctgcttctgcaaccccggatttgagtcctcaagcgggcacctgtctttccagggattgaaggccagttgcgaggatattgacgaatgtaccgaaatgtgtccgatcaattctacatgcactaacaccccaggatcatatttttgtacatgtcatcctggattcgcaccttccaacgggcagctgaactttaccgatcaaggcgtggaatgtagggatatagacgaatgccgccaggatcctagcacatgcgggccaaattccatatgtacaaacgccttgggctcatatagctgcggttgcattgcaggcttccaccccaatcccgagggatcccagaaggatggaaactttagctgtcagcgggtgctgtttaagtgtaaggaagatgtaattccagacaacaaacagatacagcagtgtcaagaaggaacagctgtgaagccagcgtatgttagcttctgtgcgcagattaataacatcttctcagtgctcgataaagtgtgcgagaataaaaccactgtggtttctctcaagaacacgaccgaaagctttgtccccgtgctgaagcagatctctacatggacgaaatttacaaaggaggaaacgagcagccttgccacagtgttcctagagagtgttgaatcaatgactctggctagcttctggaagccttctgccaatatcacgcccgcagtgaggacagagtacctggacatcgaatctaaggtcatcaataaggagtgttctgaagagaacgtaaccctcgaccttgtggctaaaggcgacaaaatgaaaattgggtgttcaacaatcgaggagtccgagtccacagagactaccggcgtagcattcgtgtcattcgtaggaatggaatccgtcttgaatgaacggttttttaaagatcaccaggcgcccttgacaacctccgaaattaagctgaagatgaatagtagagtcgtgggcggcatcatgacgggagagaagaaggacggcttcagcgaccccatcatttatacactggaaaatatccaacctaaacagaagttcgagcgaccaatatgtgtgtcctggtctaccgacgtcaagggcggtaggtggacttcatttggctgcgttatactggaagccagtgagacttatacgatttgctcctgtaatcagatggctaacctcgccgtgataatggcttccggcgaattgacaatgggctgtgccatcatagcaggctttttacattacctcttcttggcgtgcttcttctggatgttggtcgaagcagtgattcttttcttaatggttcggaatctcaaggtcgttaattatttctcaagtcggaatatcaaaatgctccacatctgtgcctttgggtatggcctgcctatgctggttgttgtgatcagcgcatctgtgcagccgcagggctatggcatgcataatagatgttggctgaatactgagaccggcttcatttggtcttttctcggcccagtatgcactgttatcgtgattaacagcttactgctcacatggacactttggatactgcgtcagagattatccagcgtcaacgcggaggtgtctacactgaaagacactaggttactgacgtttaaagcgttcgcccagttgttcattctcggatgctcttgggtgctgggcatctttcagataggacccgtcgctggagtgatggcgtacctgttcacaattattaattctttgcagggggcctttatctttctcatacattgtctcttaaatggccaggtcagagaggaatataagcgatggataactggcaagactaagcccagcagccagagccaaacaagtcgcatcctgctctcctccatgccctctgcctctaaaacgggctag

SEQ ID NO: 90068 - DNA, 2466 bp, Artificial Sequence
  derived and/or modified sequence
atgcggggatttaatctgctgctgttttggggctgttgcgtgatgcacagttgggaaggtcacatcagaccaacacgcaaacccaataccaagggaaacaactgtagggacagtactttatgcccggcttatgccacctgcactaatactgttgactcctactattgtgcttgtaaacaaggctttctctccagcaacggacagaaccacttcaaagatcctggggtgcgctgcaaggacattgacgaatgcagccagagtccgcaaccctgcggacctaacagctcctgtaaaaacctgagtggcaggtataagtgctcctgtttagacgggttctcatcccctaccgggaacgactgggtccctggaaagcctgggaacttctcatgtacagatataaatgaatgcttgactagtagcgtgtgtcctgagcactcagactgcgtcaattctatgggatcttacagttgttcgtgtcaagtcgggtttatctcgaggaacagtacatgcgaggacgtcgacgaatgtgcagaccctagagcgtgtcctgagcacgccacctgcaataatacagtgggcaattactcgtgtttttgtaacccagggttcgagagcagctctggacatttgtctttccagggactgaaggccagctgtgaggatattgacgaatgcactgagatgtgcccaataaattcaacttgcaccaatactccaggaagctacttttgtacgtgccacccaggatttgcgccttctaacggtcagctaaacttcactgatcagggagtggagtgccgcgacatcgatgagtgcagacaggaccctagtacttgtggaccgaacagtatttgcacaaatgccttgggcagctacagttgtggatgcatagccggtttccatcccaatcccgaaggcagccagaaggacggaaattttagttgccagagagtcctctttaagtgcaaggaggatgtgatccccgacaataaacagatccagcagtgtcaggagggcacagcagttaagcctgcttacgtgtctttttgcgcccagataaacaatattttctctgttcttgacaaagtctgtgagaacaaaactactgtggtgagccttaaaaacactactgagagctttgtgccagtcctaaaacagatttcaacctggacgaagttcacgaaagaggagacttcctcactcgcgaccgtattcttagaatccgttgaatctatgacacttgcaagcttctggaagccgtccgccaatattactccagccgtgaggaccgaatatctcgacatcgagtccaaagttataaataaggagtgcagcgaggaaaacgtcacactcgatctcgtggccaagggcgataagatgaagatcggttgcagtaccatagaggaatcagagtctactgagactaccggggtggcattcgtcagttttgtggggatggagtcggtcctcaatgaacggtttttcaaggaccaccaggcccctctgaccacatctgaaatcaagcttaaaatgaactccagagttgtgggaggtataatgacaggggagaagaaagatggcttttcagacccaattatttataccttagaaaacatccagcctaagcagaaattcgaacgtcccatctgcgtgagttggagtacagatgtaaagggcggacggtggacctctttcggatgtgtgatcctcgaggcctcagaaacatacaccatatgcagttgcaatcagatggctaatctagccgtgataatggccagcggcgagctaacaatgggctgtgctatcatcgccggattcctccattatctgttccttgcatgtttcttctggatgctagtggaagccgtaatcctgtttttaatggtgcggaacctgaaagtggtcaactacttttctagcagaaacataaaaatgcttcatatatgtgcctttggctatgggctgcctatgctggtggtcgtaattagtgcatccgtgcagccccagggatacggtatgcataacagatgctggctcaacactgaaaccggatttatatggtcgttcctggggccagtctgcacagtcatcgtcatcaactcgctgctcctgacatggacgttatggatactgaggcagcgtctttcctcagtgaatgctgaggtgagcactcttaaggacacccgactcctgacctttaaggcattcgcacaactctttatcctcgggtgttcttgggtgctgggaattttccagatcggaccggttgccggagtgatggcatatctgttcactataatcaactcactccagggggctttcatctttctgatccactgcctattgaatggccaggtccgcgaggaatacaagaggtggattaccgggaaaaccaaaccgtcttcacagtctcagacctcgcggatcttattgtcttctatgccctcggccagcaaaaccggttag

SEQ ID NO: 90069 - DNA, 2466 bp, Artificial Sequence
  derived and/or modified sequence
atgaggggtttcaatctgctgctgttttggggctgttgcgtgatgcatagttgggaagggcatatccggcctacacggaaaccgaatacgaaggggaataactgcagggactctacgctctgtccagcctatgccacctgcacgaataccgtcgacagctattattgcgcctgcaagcaaggctttttaagctctaatggccagaaccatttcaaggacccgggtgtgcggtgtaaagacatcgatgagtgcagccaatctccccagccatgtggcccaaattctagctgcaaaaacctaagcgggaggtacaagtgttcttgtctggatgggttttcatcacctaccgggaatgattgggtacccggaaaaccaggaaacttctcttgtaccgacatcaatgaatgcctcacctcgagtgtgtgtcccgagcactcggattgcgtcaacagcatgggatcctacagttgttcctgccaagtaggattcatctcccgcaactctacgtgcgaagatgtcgacgagtgtgctgatccgagagcctgtcccgaacatgctacctgtaacaatacagtgggaaattattcttgcttctgcaatcccggtttcgagagttcttccggacaccttagctttcaagggctgaaagccagctgcgaagacattgacgagtgtactgaaatgtgtcccatcaactccacctgtaccaacacccccggatcctatttttgcacttgccatccaggctttgcaccttctaacggtcagttgaactttaccgaccagggggtggagtgcagggatatagacgaatgtcgccaggacccaagtacttgtggccctaacagcatctgcactaatgcactcgggagttactcctgtggctgcattgcagggtttcatcccaaccctgaaggttctcagaaagatgggaatttcagttgtcagagggtgttatttaagtgtaaggaagacgtgattcctgacaacaaacaaatccagcaatgccaggaaggtaccgcagtgaaacccgcttacgtatctttttgtgcacagataaataatatatttagcgttctggacaaggtgtgcgaaaataagaccaccgttgtgagcctcaagaacacaactgagagcttcgtacccgtgctcaagcaaattagtacgtggacaaaatttactaaggaagaaacgagctccctagcgacggtctttttggagtctgtagaaagtatgaccctggcctccttttggaagccatcagccaatataacaccagcggtgaggacagagtaccttgatatcgaatctaaggtcattaataaagagtgctccgaggaaaacgtgacactagacctcgttgccaaaggcgacaaaatgaaaatagggtgtagtaccattgaggaaagtgaatcgaccgaaactactggggtggcatttgtgtccttcgtgggaatggaaagcgtgctaaatgagcggttcttcaaagatcatcaagctcctctgacaacctctgagatcaaacttaaaatgaactcccgagtggtgggagggattatgaccggcgagaaaaaggatgggttctccgatcctattatttacactttggagaacatacagcctaagcagaagttcgagcgtccaatttgcgtcagctggtccacagatgttaaaggaggacgttggacaagcttcggatgcgtcatcctggaagcctccgaaacttacactatttgttcatgtaatcagatggctaatctcgcagttatcatggccagcggagagctgaccatgggttgtgcaattatcgcgggtttcctacattacctgtttcttgcatgctttttttggatgctcgtggaggctgttatcctgttcctgatggtgagaaatctcaaagttgtcaactacttcagttcaaggaacatcaagatgctccatatctgcgctttcggctatggcctacccatgctcgtcgtcgttatatcagcttctgtgcaacctcaaggctacgggatgcacaataggtgctggctgaataccgagacaggattcatctggtcttttctcggacccgtgtgcaccgtcatagtgatcaattctctcttgctcacttggacactctggattttgagacagagactgtcttccgtgaacgcggaggtttcaacgctcaaagacacgcggctactaacttttaaagcatttgcccagcttttcatcctgggctgcagctgggtccttggaatattccagattgggccagtagccggagtgatggcctacttattcactatcatcaatagtctccagggtgcatttattttcctgatccattgtctgctcaacggccaggtccgggaagagtacaaacgctggattacagggaaaacaaagccatcaagccaaagccagacttctagaatacttttgtcctccatgcctagtgcgtctaaaaccggatag

SEQ ID NO: 90070 - DNA, 2466 bp, Artificial Sequence
  derived and/or modified sequence
atgagaggcttcaacctgctgctgttctggggctgctgcgtgatgcacagctgggagggccacatcagacccaccagaaagcccaacaccaagggcaacaactgcagagacagcaccctgtgccccgcctacgccacctgcaccaacaccgtggacagctactactgcgcctgcaagcagggcttcctgagcagcaacggccagaaccacttcaaggaccccggcgtgagatgcaaggacatcgacgagtgcagccagagcccccagccctgcggccccaacagcagctgcaagaacctgagcggcagatacaagtgcagctgcctggacggcttcagcagccccaccggcaacgactgggtgcccggcaagcccggcaacttcagctgcaccgacatcaacgagtgcctgaccagcagcgtgtgccccgagcacagcgactgcgtgaacagcatgggcagctacagctgcagctgccaggtgggcttcatcagcagaaacagcacctgcgaggacgtggacgagtgcgccgaccccagagcctgccccgagcacgccacctgcaacaacaccgtgggcaactacagctgcttctgcaaccccggcttcgagagcagcagcggccacctgagcttccagggcctgaaggccagctgcgaggacatcgacgagtgcaccgagatgtgccccatcaacagcacctgcaccaacacccccggcagctacttctgcacctgccaccccggcttcgcccccagcaacggccagctgaacttcaccgaccagggcgtggagtgcagagacatcgacgagtgcagacaggaccccagcacctgcggccccaacagcatctgcaccaacgccctgggcagctacagctgcggctgcatcgccggcttccaccccaaccccgagggcagccagaaggacggcaacttcagctgccagagagtgctgttcaagtgcaaggaggacgtgatccccgacaacaagcagatccagcagtgccaggagggcaccgccgtgaagcccgcctacgtgagcttctgcgcccagatcaacaacatcttcagcgtgctggacaaggtgtgcgagaacaagaccaccgtggtgagcctgaagaacaccaccgagagcttcgtgcccgtgctgaagcagatcagcacctggaccaagttcaccaaggaggagaccagcagcctggccaccgtgttcctggagagcgtggagagcatgaccctggccagcttctggaagcccagcgccaacatcacccccgccgtgagaaccgagtacctggacatcgagagcaaggtgatcaacaaggagtgcagcgaggagaacgtgaccctggacctggtggccaagggcgacaagatgaagatcggctgcagcaccatcgaggagagcgagagcaccgagaccaccggcgtggccttcgtgagcttcgtgggcatggagagcgtgctgaacgagagattcttcaaggaccaccaggcccccctgaccaccagcgagatcaagctgaagatgaacagcagagtggtgggcggcatcatgaccggcgagaagaaggacggcttcagcgaccccatcatctacaccctggagaacatccagcccaagcagaagttcgagagacccatctgcgtgagctggagcaccgacgtgaagggcggcagatggaccagcttcggctgcgtgatcctggaggccagcgagacctacaccatctgcagctgcaaccagatggccaacctggccgtgatcatggccagcggcgagctgaccatgggctgcgccatcatcgccggcttcctgcactacctgttcctggcctgcttcttctggatgctggtggaggccgtgatcctgttcctgatggtgagaaacctgaaggtggtgaactacttcagcagcagaaacatcaagatgctgcacatctgcgccttcggctacggcctgcccatgctggtggtggtgatcagcgccagcgtgcagccccagggctacggcatgcacaacagatgctggctgaacaccgagaccggcttcatctggagcttcctgggccccgtgtgcaccgtgatcgtgatcaacagcctgctgctgacctggaccctgtggatcctgagacagagactgagcagcgtgaacgccgaggtgagcaccctgaaggacaccagactgctgaccttcaaggccttcgcccagctgttcatcctgggctgcagctgggtgctgggcatcttccagatcggccccgtggccggcgtgatggcctacctgttcaccatcatcaacagcctgcagggcgccttcatcttcctgatccactgcctgctgaacggccaggtgagagaggagtacaagagatggatcaccggcaagaccaagcccagcagccagagccagaccagcagaatcctgctgagcagcatgcccagcgccagcaagaccggctag

SEQ ID NO: 90071 - DNA, 2657 bp, Artificial Sequence
  derived and/or modified sequence
cttttctttgaatgacagaactacagcataatgcgtggcttcaacctgctcctcttctggggatgttgtgttatgcacagctgggaagggcacataagacccacacggaaaccaaacacaaagggtaataactgtagagacagtaccttgtgcccagcttatgccacctgcaccaatacagtggacagttactattgcgcttgcaaacaaggcttcctgtccagcaatgggcaaaatcacttcaaggatccaggagtgcgatgcaaagatattgatgaatgttctcaaagcccccagccctgtggtcctaactcatcctgcaaaaacctgtcagggaggtacaagtgcagctgtttagatggtttctcttctcccactggaaatgactgggtcccaggaaagccgggcaatttctcctgtactgatatcaatgagtgcctcaccagcagcgtctgccctgagcattctgactgtgtcaactccatgggaagctacagttgcagctgtcaagttggattcatctctagaaactccacctgtgaagacgtggatgaatgtgcagatccaagagcttgcccagagcatgcaacttgtaataacactgttggaaactactcttgtttctgcaacccaggatttgaatccagcagtggccacttgagtttccagggtctcaaagcatcgtgtgaagatattgatgaatgcactgaaatgtgccccatcaattcaacatgcaccaacactcctgggagctacttttgcacctgccaccctggctttgcaccaagcaatggacagttgaatttcacagaccaaggagtggaatgtagagatattgatgagtgccgccaagatccatcaacctgtggtcctaattctatctgcaccaatgccctgggctcctacagctgtggctgcattgcaggctttcatcccaatccagaaggctcccagaaagatggcaacttcagctgccaaagggttctcttcaaatgtaaggaagatgtgatacccgataataagcagatccagcaatgccaagagggaaccgcagtgaaacctgcatatgtctccttttgtgcacaaataaataacatcttcagcgttctggacaaagtgtgtgaaaataaaacgaccgtagtttctctgaagaatacaactgagagctttgtccctgtgcttaaacaaatatccacgtggactaaattcaccaaggaagagacgtcctccctggccacagtcttcctggagagtgtggaaagcatgacactggcatctttttggaaaccctcagcaaatatcactccggctgttcggacggaatacttagacattgagagcaaagttatcaacaaagaatgcagtgaagagaatgtgacgttggacttggtagccaagggggataagatgaagatcgggtgttccacaattgaggaatctgaatccacagagaccactggtgtggcttttgtctcctttgtgggcatggaatcggttttaaatgagcgcttcttcaaagaccaccaggctcccttgaccacctctgagatcaagctgaagatgaattctcgagtcgttgggggcataatgactggagagaagaaagacggcttctcagatccaatcatctacactctggagaacattcagccaaagcagaagtttgagaggcccatctgtgtttcctggagcactgatgtgaagggtggaagatggacatcctttggctgtgtgatcctggaagcttctgagacatataccatctgcagctgtaatcagatggcaaatcttgccgttatcatggcgtctggggagctcacgatgggctgcgccatcatcgcgggcttcctgcactaccttttccttgcctgcttcttctggatgctggtggaggctgtgatactgttcttgatggtcagaaacctgaaggtggtgaattacttcagctctcgcaacatcaagatgctgcacatctgtgcctttggttatgggctgccgatgctggtggtggtgatctctgccagtgtgcagccacagggctatggaatgcataatcgctgctggctgaatacagagacagggttcatctggagtttcttggggccagtttgcacagttatagtgatcaactcccttctcctgacctggaccttgtggatcctgaggcagaggctttccagtgttaatgccgaagtctcaacgctaaaagacaccaggttactgaccttcaaggcctttgcccagctcttcatcctgggctgctcctgggtgctgggcatttttcagattggacctgtggcaggtgtcatggcttacctgttcaccatcatcaacagcctgcagggggccttcatcttcctcatccactgtctgctcaacggccaggtacgagaagaatacaagaggtggatcactgggaagacgaagcccagctcccagtcccagacctcaaggatcttgctgtcctccatgccatccgcttccaagacgggttaaagtcctttcttgctttcaaatatgctatggagccacagttgaggacagtagtttcctgcaggagcctaccctgaaatctcttctcagcttaacatggaaatgaggatcccaccagccccagaaccctctggggaagaatgttgggggcggtcttcctgtgg

SEQ ID NO: 90072 - DNA, 2501 bp, Artificial Sequence
  derived and/or modified sequence
aaaagtttcttttctttgaatgacagaactacagcataatgcgtggcttcaacctgctcctcttctggggatgttgtgttatgcacagctgggaagggcacataagacccacacggaaaccaaacacaaagggtaataactgtagagacagtaccttgtgcccagcttatgccacctgcaccaatacagtggacagttactattgcgcttgcaaacaaggcttcctgtccagcaatgggcaaaatcacttcaaggatccaggagtgcgatgcaaagatattgatgaatgttctcaaagcccccagccctgtggtcctaactcatcctgcaaaaacctgtcagggaggtacaagtgcagctgtttagatggtttctcttctcccactggaaatgactgggtcccaggaaagccgggcaatttctcctgtactgatatcaatgagtgcctcaccagcagcgtctgccctgagcattctgactgtgtcaactccatgggaagctacagttgcagctgtcaagttggattcatctctagaaactccacctgtgaagacgtggatgaatgtgcagatccaagagcttgcccagagcatgcaacttgtaataacactgttggaaactactcttgtttctgcaacccaggatttgaatccagcagtggccacttgagtttccagggtctcaaagcatcgtgtgaagatattgatgaatgcactgaaatgtgccccatcaattcaacatgcaccaacactcctgggagctacttttgcacctgccaccctggctttgcaccaagcaatggacagttgaatttcacagaccaaggagtggaatgtagagatattgatgagtgccgccaagatccatcaacctgtggtcctaattctatctgcaccaatgccctgggctcctacagctgtggctgcattgcaggctttcatcccaatccagaaggctcccagaaagatggcaacttcagctgccaaagggttctcttcaaatgtaaggaagatgtgatacccgataataagcagatccagcaatgccaagagggaaccgcagtgaaacctgcatatgtctccttttgtgcacaaataaataacatcttcagcgttctggacaaagtgtgtgaaaataaaacgaccgtagtttctctgaagaatacaactgagagctttgtccctgtgcttaaacaaatatccacgtggactaaattcaccaaggaagagacgtcctccctggccacagtcttcctggagagtgtggaaagcatgacactggcatctttttggaaaccctcagcaaatatcactccggctgttcggacggaatacttagacattgagagcaaagttatcaacaaagaatgcagtgaagagaatgtgacgttggacttggtagccaagggggataagatgaagatcgggtgttccacaattgaggaatctgaatccacagagaccactggtgtggcttttgtctcctttgtgggcatggaatcggttttaaatgagcgcttcttcaaagaccaccaggctcccttgaccacctctgagatcaagctgaagatgaattctcgagtcgttgggggcataatgactggagagaagaaagacggcttctcagatccaatcatctacactctggagaacattcagccaaagcagaagtttgagaggcccatctgtgtttcctggagcactgatgtgaagggtggaagatggacatcctttggctgtgtgatcctggaagcttctgagacatataccatctgcagctgtaatcagatggcaaatcttgccgttatcatggcgtctggggagctcacgatgggctgcgccatcatcgcgggcttcctgcactaccttttccttgcctgcttcttctggatgctggtggaggctgtgatactgttcttgatggtcagaaacctgaaggtggtgaattacttcagctctcgcaacatcaagatgctgcacatctgtgcctttggttatgggctgccgatgctggtggtggtgatctctgccagtgtgcagccacagggctatggaatgcataatcgctgctggctgaatacagagacagggttcatctggagtttcttggggccagtttgcacagttatagtgatcaactcccttctcctgacctggaccttgtggatcctgaggcagaggctttccagtgttaatgccgaagtctcaacgctaaaagacaccaggttactgaccttcaaggcctttgcccagctcttcatcctgggctgctcctgggtgctgggcatttttcagattggacctgtggcaggtgtcatggcttacctgttcaccatcatcaacagcctgcagggggccttcatcttcctcatccactgtctgctcaacggccaggtacgagaagaatacaagaggtggatcactgggaagacgaagcccagctcccagtcccagacctcaaggatcttgctgtcctccatgccatccgcttccaagacgggt

SEQ ID NO: 90073 - protein, 745 aa, Artificial Sequence
  derived and/or modified sequence
MRGFNLLLFWGCCVMHSWEGHIRPTRKPNTKGNNCRDSTLCPAYATCTNTVDSYYCACKQGFLSSNGQNHFKDPGVRCKDIDECTEMCPINSTCTNTPGSYFCTCHPGFAPSNGQLNFTDQGVECRDIDECRQDPSTCGPNSICTNALGSYSCGCIAGFHPNPEGSQKDGNFSCQRVLFKCKEDVIPDNKQIQQCQEGTAVKPAYVSFCAQINNIFSVLDKVCENKTTVVSLKNTTESFVPVLKQISTWTKFTKEETSSLATVFLESVESMTLASFWKPSANITPAVRTEYLDIESKVINKECSEENVTLDLVAKGDKMKIGCSTIEESESTETTGVAFVSFVGMESVLNERFFKDHQAPLTTSEIKLKMNSRVVGGIMTGEKKDGFSDPIIYTLENIQPKQKFERPICVSWSTDVKGGRWTSFGCVILEASETYTICSCNQMANLAVIMASGELTMDFSLYIISHVGIIISLVCLVLAIATFLLCRSIRNHNTYLHLHLCVCLLLAKTLFLAGIHKTDNKMGCAIIAGFLHYLFLACFFWMLVEAVILFLMVRNLKVVNYFSSRNIKMLHICAFGYGLPMLVVVISASVQPQGYGMHNRCWLNTETGFIWSFLGPVCTVIVINSLLLTWTLWILRQRLSSVNAEVSTLKDTRLLTFKAFAQLFILGCSWVLGIFQIGPVAGVMAYLFTIINSLQGAFIFLIHCLLNGQVREEYKRWITGKTKPSSQSQTSRILLSSMPSASKTG

SEQ ID NO: 90074 - DNA, 2238 bp, Artificial Sequence
  derived and/or modified sequence
atgcggggctttaatctgctcctgttttggggttgctgcgtcatgcattcttgggagggccatattcgcccaacccggaagccaaatacaaagggcaataactgcagggacagcactctctgtccagcctatgcgacatgcacaaataccgtcgatagttactactgtgcttgtaagcagggatttctgtcatctaacgggcagaatcatttcaaagaccccggtgtaaggtgcaaggacatcgatgagtgcaccgagatgtgtccaatcaatagcacctgcaccaacacacctggatcctacttctgcacttgtcaccccggatttgcacctagtaatgggcagctaaacttcaccgatcagggcgtggaatgtagggatatagatgagtgccggcaggatccttctacctgcgggcctaacagtatctgtaccaacgcactcggaagctacagttgcggatgcattgcagggtttcaccctaatcctgagggctcacagaaagacgggaacttctcctgtcaaagggttctgttcaaatgcaaggaggacgtcatcccagataacaagcagatccagcaatgtcaggaaggaacagcagtgaagcccgcttatgtgagcttctgcgctcaaattaacaacatctttagcgtgctcgataaagtgtgcgaaaataaaactacggtggtgtcgctgaaaaacacaaccgagagctttgtgcccgtgttgaaacaaatctcaacttggaccaaatttacaaaggaggaaactagttctctggcaaccgtgttcctcgagtccgtcgagtcaatgacccttgcgtccttctggaaaccaagtgcaaatatcacgcctgctgtcaggacagaatacttggacatcgaatctaaagtaataaataaggagtgttccgaggagaatgtgacccttgatctagttgcaaagggcgacaagatgaaaattggctgcagcacaatcgaggaaagtgagtccacagagactactggtgtggcgttcgtcagctttgtcgggatggagagcgttcttaatgaaagattcttcaaagatcaccaggctcccctgactacctcagagatcaaacttaaaatgaatagccgagtagtgggcggaataatgaccggtgagaagaaagatgggttttccgaccctataatttatacactggaaaacatccagcctaagcagaaattcgaaaggcccatctgcgtatcctggtccactgatgtgaaaggaggacgttggaccagtttcggctgcgttatcctcgaagcctctgagacatataccatctgcagttgtaaccagatggctaatcttgctgtgatcatggcatccggcgagctgacgatggatttctccttgtacataatatcacatgtgggaattatcataagcttggtttgtcttgtcctggccatcgcaacgtttctcctctgcaggagcattagaaaccacaacacgtacctacatctccacctttgtgtgtgtctgctgctcgccaaaacgctttttcttgctggaatacacaagacagataataagatgggttgtgccataattgccggatttttgcattaccttttcctggcttgctttttttggatgcttgtagaggccgttatcttatttctgatggttcggaacctgaaagtggtaaattacttttcgtccaggaacatcaagatgctccatatttgtgctttcggatacgggctaccaatgctggtggtggtgatatccgcctccgtccagccacaggggtacggaatgcacaataggtgttggctgaacacagaaaccgggtttatttggagtttcctcggacctgtgtgcaccgtcatcgtgattaattctctcctcctgacatggaccttgtggatattgagacagagacttagcagcgtgaatgcggaagtgagtaccctgaaagatacccggttgcttacctttaaagcttttgcgcagttgttcattctcggttgctcctgggtcctggggatattccagatcggacccgtagccggcgtaatggcttatctgttcacaatcattaactctctgcaaggcgctttcatctttctgattcactgccttctgaacggccaagtgcgtgaggagtacaaacgttggattactggcaaaactaaaccatcctctcagagccagaccagccgtattctgctgagctcaatgccatcagcttctaagacaggatag

SEQ ID NO: 90075 - DNA, 2238 bp, Artificial Sequence
  derived and/or modified sequence
atgaggggcttcaacctgctgctcttctggggctgctgcgtgatgcacagctgggagggccacatccggcccaccaggaagcccaacaccaagggcaacaactgccgggacagcaccctgtgcccagcctatgccacctgcaccaacacagtggacagctactactgtgcctgcaagcagggcttcctgagcagcaatggccagaaccacttcaaggaccccggggtgcgctgcaaggacattgatgaatgtacagagatgtgccccatcaacagcacctgcaccaacaccccaggcagctacttctgcacctgccaccctggctttgcccccagcaatggccagctgaacttcacagaccagggcgtggagtgccgggacattgatgagtgccggcaggaccccagcacctgtggccccaacagcatctgcaccaatgccctgggcagctacagctgtggctgcatcgccggcttccaccccaaccctgagggcagccagaaggatggcaacttcagctgccagagggtgctcttcaagtgcaaggaggatgtgatcccagacaacaagcagatccagcagtgccaggagggcacagctgtgaagccagcctacgtgtccttctgtgcccagatcaacaacatcttctctgtgctggacaaggtgtgtgagaacaagaccaccgtggtgtccctgaagaacaccacagagagctttgtgcctgtgctgaagcagatcagcacctggaccaagttcaccaaggaggagaccagcagcctggccaccgtcttcctggagagcgtggagagcatgaccctggccagcttctggaagcccagcgccaacatcaccccagctgtgaggacagagtacctggacatcgagagcaaggtgatcaacaaggagtgcagcgaggagaatgtgaccctggacctggtggccaagggggacaagatgaagattggctgcagcaccatcgaggagagcgagagcacagagaccactggagtggcctttgtgtcctttgtgggcatggagagcgtgctgaatgaacgcttcttcaaggaccaccaggcccccctgaccaccagcgagatcaagctgaagatgaacagccgggtggtgggcggcatcatgaccggggagaagaaggatggcttcagtgaccccatcatctacaccctggagaacatccagcccaagcagaagtttgagcggcccatctgtgtgtcctggagcacagatgtgaagggcggccgctggaccagctttggctgcgtcatcctggaggccagcgagacctacaccatctgcagctgcaaccagatggccaacctggccgtcatcatggccagcggggagctgaccatggacttcagcctgtacatcatcagccacgtgggcatcatcatcagcctggtgtgcctggtgctggccatcgccaccttcctgctgtgccgcagcatccggaaccacaacacctacctgcacctgcacctgtgtgtgtgcctgctgctggccaagaccctcttcctggccggcatccacaagacagacaacaagatgggctgtgccatcatcgccggcttcctgcactacctgttcctggcctgcttcttctggatgctggtggaggccgtcatcctcttcctgatggtgaggaacctgaaggtggtgaactacttcagcagcaggaacatcaagatgctgcacatctgtgccttcggctacggcctgcccatgctggtggtggtgatcagcgcctctgtgcagccccagggctacggcatgcacaaccgctgctggctgaacacagaaacaggcttcatctggagcttcctgggccctgtgtgcaccgtgattgtcatcaacagcctgctgctgacctggaccctgtggatcctgcggcagaggctgagctctgtgaatgctgaggtgtccaccctgaaggacacccggctgctgaccttcaaggcctttgcccagctgttcatcctgggctgctcctgggtgctgggcatcttccagatcggccctgtggccggcgtgatggcctacctgttcaccatcatcaacagcctgcagggcgccttcatcttcctgatccactgcctgctgaatggccaggtgcgggaggagtacaagcgctggatcaccgggaagaccaagcccagcagccagagccagaccagccgcatcctgctgagctccatgcccagcgccagcaagacaggatag

SEQ ID NO: 90076 - DNA, 2238 bp, Artificial Sequence
  derived and/or modified sequence
atgcggggcttcaacctgctgctgttctggggctgctgcgtgatgcactcctgggaggggcatatccggccaacacggaaaccaaacaccaaggggaataactgcagggattcgaccttatgtccagcgtatgcgacgtgcaccaacacagttgattcctattattgtgcttgtaagcagggttttttatcatcaaacggacagaatcacttcaaagacccaggggtacgttgtaaggacatcgatgaatgtacagaaatgtgccctatcaattctacatgcaccaacactcccggctcctatttttgcacctgtcacccaggattcgcgccctccaacgggcagctgaacttcacagaccagggagtggagtgtagagacatcgacgaatgtcgacaggacccatctacttgcggaccaaatagtatctgtaccaacgctcttggaagttacagctgtggctgtatcgccggatttcatcccaaccctgagggatcccagaaggatggcaatttctcatgtcagcgggttctattcaaatgcaaagaggacgtgatacctgataataaacaaatccagcagtgtcaggagggcaccgccgtaaagcctgcgtacgtgtctttttgcgcacagattaataacatattctccgtgctggataaggtgtgtgaaaataagactacagtcgtttctctcaaaaacaccaccgaaagtttcgttccagtccttaagcagatttccacatggaccaagtttaccaaggaggagaccagctctctggccaccgttttccttgagagtgttgagtcaatgacattggcctctttctggaaacctagcgctaatattaccccagccgtgagaacagagtatctcgatatagagagcaaggtcattaacaaggagtgtagtgaagagaatgtcactctagacttagtggccaagggggataaaatgaagatcggctgtagtaccatcgaggagtcggagtctactgaaacgactggcgtggccttcgtttcttttgtgggcatggagagtgttctgaatgagaggtttttcaaagaccaccaagcacccctgacgacctctgaaatcaaactaaagatgaatagtagggtggttggcgggatcatgactggagaaaagaaagacggattctcagaccccattatctacacactggagaacattcagccaaagcagaaatttgagcggcctatctgcgtatcctggtcaactgacgtaaagggcgggcgctggaccagcttcggctgtgtgattctggaggcctctgagacatataccatttgctcttgtaatcagatggccaacctagctgttattatggccagcggggagctcaccatggacttctcgttgtacattattagtcatgtcggaattatcattagtctcgtgtgtctagtgctggctattgcaactttcttactgtgccgttccatccgcaaccataacacgtacttacacctgcacctctgcgtatgtctgctgctggctaagacacttttcctggcgggtattcataagaccgacaataaaatgggctgcgcgatcatcgccggattcttacactatctctttttagcctgcttcttttggatgctcgtcgaagccgtgatcctgttccttatggtccgcaatctgaaggtagtcaactacttctcctctcggaatattaaaatgctccatatctgcgcattcgggtacggtctgcctatgctggtggtagtgatcagcgcttccgtccagcctcagggctatggaatgcataatcgatgctggctgaacaccgagacagggttcatatggagctttctcggcccagtgtgtaccgtcatcgttatcaatagcctactcctgacttggacactgtggatactcaggcaacggttgtcttcagtgaacgccgaagtatcaactcttaaggatactagattgttgacatttaaagccttcgctcaactgtttattctgggatgtagctgggttctgggcattttccagatcggccccgtcgctggggtgatggcgtatctatttaccattatcaatagcttgcagggagcatttatatttctgatccactgcctgctcaatggccaggtgagagaggaatacaagaggtggatcacagggaaaaccaagccaagctcccagagccagacgtctaggattttactcagtagtatgccttccgcttccaagacaggctag

SEQ ID NO: 90077 - DNA, 2238 bp, Artificial Sequence
  derived and/or modified sequence
atgcggggattcaacctgctgctcttttgggggtgctgcgtcatgcacagctgggaaggccatattcgcccaacaaggaaacctaacactaagggtaacaattgtagggacagtacactatgtcccgcatacgccacatgtactaacacagtggattcctattattgcgcctgcaagcaaggatttctatctagtaatggacaaaaccatttcaaagatccaggcgtccggtgtaaggatattgatgaatgcacagagatgtgccccataaactccacttgtactaatactcccggatcttacttttgcacatgtcacccaggttttgcccctagtaatggtcagctgaattttacggaccagggagttgaatgccgtgacatcgatgaatgcagacaggatcccagtacatgtggccctaacagtatatgcaccaacgccctgggcagctacagttgcggctgcatcgccggttttcaccccaaccccgagggtagccagaaggatggcaatttttcttgtcagcgcgtgctctttaaatgtaaagaggacgtgattcctgacaacaaacagatccagcagtgccaggagggaactgcggtcaagccagcatatgtgagtttttgcgctcagattaacaatattttcagcgttctggataaagtctgcgagaataagaccactgtcgtgagcctgaagaacaccacagagtccttcgtgcccgtactaaaacaaatatcgacttggaccaaattcacaaaagaggagacgtcaagtcttgccactgtcttcctcgaatctgtggagtctatgactctagcatccttttggaaacctagtgccaacattactcccgcagtgcgtaccgagtacttggatatcgaaagcaaggtgattaataaagagtgcagtgaggagaacgtcacacttgaccttgtggccaagggcgataagatgaaaatcggatgttccacaatcgaggaatctgaaagtactgagaccactggggtcgcctttgtatccttcgttggtatggagagcgtgcttaacgagcggtttttcaaagatcatcaggccccacttaccaccagcgagatcaaactcaagatgaactcacgggtggtaggtgggattatgaccggagaaaagaaagacggcttctctgaccccattatctacaccctcgaaaatatccaaccaaagcagaagtttgaacgaccaatatgcgtgtcatggagtacagatgtgaaagggggacgatggacctctttcggctgcgtgatattggaggcgtccgagacatatactatatgctcctgcaaccaaatggcgaatctggctgttattatggcaagtggggagctgaccatggattttagtctgtatattatcagccatgtgggcataataataagcctggtctgcctggttttagctatcgccaccttcctcttatgcaggtccatacgaaaccacaacacatacctccatttacacttgtgcgtgtgtctactcctcgccaaaactctgtttcttgccggaatccacaagactgataataagatggggtgcgccataatcgccggttttctgcactatctgtttctggcttgctttttctggatgctcgtcgaggctgtgatactctttctgatggtgcggaatctcaaagttgttaattacttctcttctagaaatatcaaaatgctgcacatttgtgccttcgggtacggcctccccatgttggtggtggtaatttccgcctccgtgcagccacaggggtatggaatgcacaatcgctgttggctaaatactgagaccgggttcatctggagttttttaggaccagtgtgtacagttatcgttatcaacagcctcctgctcacatggacattgtggatactgcggcagaggctctcgtcggtcaacgccgaagtttccaccctcaaagatacgagactgttgacctttaaggcattcgcccagcttttcatcttggggtgttcctgggttctcggtattttccaaatagggcctgtggctggagtgatggcataccttttcaccatcattaactctctgcagggcgctttcattttcctcattcattgcttattgaacggtcaggtccgggaggagtacaagcgctggataaccgggaaaacgaaaccaagcagtcagtcccagactagccgaatcctgttaagcagcatgcccagtgcttctaagacaggctag

SEQ ID NO: 90078 - DNA, 2238 bp, Artificial Sequence
  derived and/or modified sequence
atgagaggcttcaacctgctgctgttctggggctgctgcgtgatgcacagctgggagggccacatcagacccaccagaaagcccaacaccaagggcaacaactgcagagacagcaccctgtgccccgcctacgccacctgcaccaacaccgtggacagctactactgcgcctgcaagcagggcttcctgagcagcaacggccagaaccacttcaaggaccccggcgtgagatgcaaggacatcgacgagtgcaccgagatgtgccccatcaacagcacctgcaccaacacccccggcagctacttctgcacctgccaccccggcttcgcccccagcaacggccagctgaacttcaccgaccagggcgtggagtgcagagacatcgacgagtgcagacaggaccccagcacctgcggccccaacagcatctgcaccaacgccctgggcagctacagctgcggctgcatcgccggcttccaccccaaccccgagggcagccagaaggacggcaacttcagctgccagagagtgctgttcaagtgcaaggaggacgtgatccccgacaacaagcagatccagcagtgccaggagggcaccgccgtgaagcccgcctacgtgagcttctgcgcccagatcaacaacatcttcagcgtgctggacaaggtgtgcgagaacaagaccaccgtggtgagcctgaagaacaccaccgagagcttcgtgcccgtgctgaagcagatcagcacctggaccaagttcaccaaggaggagaccagcagcctggccaccgtgttcctggagagcgtggagagcatgaccctggccagcttctggaagcccagcgccaacatcacccccgccgtgagaaccgagtacctggacatcgagagcaaggtgatcaacaaggagtgcagcgaggagaacgtgaccctggacctggtggccaagggcgacaagatgaagatcggctgcagcaccatcgaggagagcgagagcaccgagaccaccggcgtggccttcgtgagcttcgtgggcatggagagcgtgctgaacgagagattcttcaaggaccaccaggcccccctgaccaccagcgagatcaagctgaagatgaacagcagagtggtgggcggcatcatgaccggcgagaagaaggacggcttcagcgaccccatcatctacaccctggagaacatccagcccaagcagaagttcgagagacccatctgcgtgagctggagcaccgacgtgaagggcggcagatggaccagcttcggctgcgtgatcctggaggccagcgagacctacaccatctgcagctgcaaccagatggccaacctggccgtgatcatggccagcggcgagctgaccatggacttcagcctgtacatcatcagccacgtgggcatcatcatcagcctggtgtgcctggtgctggccatcgccaccttcctgctgtgcagaagcatcagaaaccacaacacctacctgcacctgcacctgtgcgtgtgcctgctgctggccaagaccctgttcctggccggcatccacaagaccgacaacaagatgggctgcgccatcatcgccggcttcctgcactacctgttcctggcctgcttcttctggatgctggtggaggccgtgatcctgttcctgatggtgagaaacctgaaggtggtgaactacttcagcagcagaaacatcaagatgctgcacatctgcgccttcggctacggcctgcccatgctggtggtggtgatcagcgccagcgtgcagccccagggctacggcatgcacaacagatgctggctgaacaccgagaccggcttcatctggagcttcctgggccccgtgtgcaccgtgatcgtgatcaacagcctgctgctgacctggaccctgtggatcctgagacagagactgagcagcgtgaacgccgaggtgagcaccctgaaggacaccagactgctgaccttcaaggccttcgcccagctgttcatcctgggctgcagctgggtgctgggcatcttccagatcggccccgtggccggcgtgatggcctacctgttcaccatcatcaacagcctgcagggcgccttcatcttcctgatccactgcctgctgaacggccaggtgagagaggagtacaagagatggatcaccggcaagaccaagcccagcagccagagccagaccagcagaatcctgctgagcagcatgcccagcgccagcaagaccggctag

SEQ ID NO: 90079 - DNA, 2670 bp, Artificial Sequence
  derived and/or modified sequence
gaatgacagaactacagcataatgcgtggcttcaacctgctcctcttctggggatgttgtgttatgcacagctgggaagggcacataagacccacacggaaaccaaacacaaagggtaataactgtagagacagtaccttgtgcccagcttatgccacctgcaccaatacagtggacagttactattgcgcttgcaaacaaggcttcctgtccagcaatgggcaaaatcacttcaaggatccaggagtgcgatgcaaagatattgatgaatgcactgaaatgtgccccatcaattcaacatgcaccaacactcctgggagctacttttgcacctgccaccctggctttgcaccaagcaatggacagttgaatttcacagaccaaggagtggaatgtagagatattgatgagtgccgccaagatccatcaacctgtggtcctaattctatctgcaccaatgccctgggctcctacagctgtggctgcattgcaggctttcatcccaatccagaaggctcccagaaagatggcaacttcagctgccaaagggttctcttcaaatgtaaggaagatgtgatacccgataataagcagatccagcaatgccaagagggaaccgcagtgaaacctgcatatgtctccttttgtgcacaaataaataacatcttcagcgttctggacaaagtgtgtgaaaataaaacgaccgtagtttctctgaagaatacaactgagagctttgtccctgtgcttaaacaaatatccacgtggactaaattcaccaaggaagagacgtcctccctggccacagtcttcctggagagtgtggaaagcatgacactggcatctttttggaaaccctcagcaaatatcactccggctgttcggacggaatacttagacattgagagcaaagttatcaacaaagaatgcagtgaagagaatgtgacgttggacttggtagccaagggggataagatgaagatcgggtgttccacaattgaggaatctgaatccacagagaccactggtgtggcttttgtctcctttgtgggcatggaatcggttttaaatgagcgcttcttcaaagaccaccaggctcccttgaccacctctgagatcaagctgaagatgaattctcgagtcgttgggggcataatgactggagagaagaaagacggcttctcagatccaatcatctacactctggagaacattcagccaaagcagaagtttgagaggcccatctgtgtttcctggagcactgatgtgaagggtggaagatggacatcctttggctgtgtgatcctggaagcttctgagacatataccatctgcagctgtaatcagatggcaaatcttgccgttatcatggcgtctggggagctcacgatggacttttccttgtacatcattagccatgtaggcattatcatctccttggtgtgcctcgtcttggccatcgccacctttctgctgtgtcgctccatccgaaatcacaacacctacctccacctgcacctctgcgtgtgtctcctcttggcgaagactctcttcctcgccggtatacacaagactgacaacaagatgggctgcgccatcatcgcgggcttcctgcactaccttttccttgcctgcttcttctggatgctggtggaggctgtgatactgttcttgatggtcagaaacctgaaggtggtgaattacttcagctctcgcaacatcaagatgctgcacatctgtgcctttggttatgggctgccgatgctggtggtggtgatctctgccagtgtgcagccacagggctatggaatgcataatcgctgctggctgaatacagagacagggttcatctggagtttcttggggccagtttgcacagttatagtgatcaactcccttctcctgacctggaccttgtggatcctgaggcagaggctttccagtgttaatgccgaagtctcaacgctaaaagacaccaggttactgaccttcaaggcctttgcccagctcttcatcctgggctgctcctgggtgctgggcatttttcagattggacctgtggcaggtgtcatggcttacctgttcaccatcatcaacagcctgcagggggccttcatcttcctcatccactgtctgctcaacggccaggtacgagaagaatacaagaggtggatcactgggaagacgaagcccagctcccagtcccagacctcaaggatcttgctgtcctccatgccatccgcttccaagacgggttaaagtcctttcttgctttcaaatatgctatggagccacagttgaggacagtagtttcctgcaggagcctaccctgaaatctcttctcagcttaacatggaaatgaggatcccaccagccccagaaccctctggggaagaatgttgggggcggtcttcctgtggttgtatgcactgatgagaaatcaggcgtttctgctccaaacgaccattttatcttcgtgctctgcaacttcttcaattccagagtttctgagaacagacccaaattcaatggcatgaccaagaacacctggctaccattttgttttctcctgcccttgttggtgcatggttctaagcatgcccctccagagcctatcatacgcctgatacagagaacctctcaataaatgatttgtcgcctgtctgactg

SEQ ID NO: 90080 - protein, 709 aa, Artificial Sequence
  derived and/or modified sequence
MRGFNLLLFWGCCVMHSWEGHIRPTRKPNTKGNNCRDSTLCPAYATCTNTVDSYYCACKQGFLSSNGQNHFKDPGVRCKDIDECSQSPQPCGPNSSCKNLSGRYKCSCLDGFSSPTGNDWVPGKPGNFSCTDINECLTSRVLFKCKEDVIPDNKQIQQCQEGTAVKPAYVSFCAQINNIFSVLDKVCENKTTVVSLKNTTESFVPVLKQISTWTKFTKEETSSLATVFLESVESMTLASFWKPSANITPAVRTEYLDIESKVINKECSEENVTLDLVAKGDKMKIGCSTIEESESTETTGVAFVSFVGMESVLNERFFKDHQAPLTTSEIKLKMNSRVVGGIMTGEKKDGFSDPIIYTLENIQPKQKFERPICVSWSTDVKGGRWTSFGCVILEASETYTICSCNQMANLAVIMASGELTMDFSLYIISHVGIIISLVCLVLAIATFLLCRSIRNHNTYLHLHLCVCLLLAKTLFLAGIHKTDNKMGCAIIAGFLHYLFLACFFWMLVEAVILFLMVRNLKVVNYFSSRNIKMLHICAFGYGLPMLVVVISASVQPQGYGMHNRCWLNTETGFIWSFLGPVCTVIVINSLLLTWTLWILRQRLSSVNAEVSTLKDTRLLTFKAFAQLFILGCSWVLGIFQIGPVAGVMAYLFTIINSLQGAFIFLIHCLLNGQVREEYKRWITGKTKPSSQSQTSRILLSSMPSASKTG

SEQ ID NO: 90081 - DNA, 2130 bp, Artificial Sequence
  derived and/or modified sequence
atgcgcggtttcaacttacttcttttttgggggtgttgcgtgatgcacagttgggaaggccacataaggcctacccgaaagcccaataccaaaggcaataactgtagagattctaccttatgcccagcctacgctacctgcacaaacaccgtagacagttactattgcgcttgcaagcaggggttcctgtcgtctaatgggcagaatcactttaaggatcccggtgtcagatgtaaagatatcgatgagtgcagtcagagcccacagccttgtggaccgaactcaagttgcaaaaatctctctgggcgctacaagtgcagctgcttggacggctttagcagccctactggtaatgactgggtccctggcaagcctggcaacttctcatgcacagacatcaacgagtgtctgacaagccgtgtactctttaagtgcaaagaggacgtcatacccgacaacaaacaaatccagcaatgccaggaaggcacggcagttaaaccagcctacgtctcgttctgtgcccagataaacaatatcttctctgtcctggacaaggtctgtgaaaacaagactacggtcgtgagcctgaaaaacactacagagagcttcgtgcccgtactgaagcagatttctacatggacgaagtttactaaagaagaaacctcctcacttgctactgttttcctcgagagtgtggagtctatgacgcttgcatctttttggaaaccctccgctaacattactccagcagtcagaactgaataccttgacattgagagcaaagtgattaataaagaatgttcagaggagaatgtcaccctggatctggtcgccaagggtgacaaaatgaaaattggatgcagtactatagaggagtccgaaagcaccgagaccactggggtcgctttcgtgagtttcgtcggcatggagtccgtgctaaatgagaggttcttcaaggaccaccaggcccctcttacaactagtgagatcaagctcaagatgaatagcagggtcgtgggaggcatcatgactggagaaaagaaggacgggttttctgatcctatcatctataccctagagaatattcagcccaaacagaagttcgaacgccctatctgcgtttcttggtctaccgacgtgaaaggcgggagatggaccagtttcggctgcgtgatcttggaggcatctgaaacgtacaccatttgctcctgtaatcaaatggctaatttggctgtgatcatggctagcggcgagctcaccatggatttctcactgtatattatcagccacgtggggatcattattagtctcgtttgtcttgttttggctattgcgactttcctactgtgccgcagcatccgcaatcacaatacctatctccaccttcacttatgtgtgtgcttactcctcgcaaaaaccctgttcctggcaggcatccacaagaccgataacaagatgggatgtgcgatcatcgctgggttcctgcactacctctttctggcatgctttttctggatgctggtcgaggccgtgatactgttcttgatggtgaggaatcttaaggttgtgaactacttttcttcccgaaatatcaaaatgcttcacatttgcgctttcgggtacggactccccatgctggtggtcgtgatttctgcttcagtgcagccccagggatatggaatgcacaatcgctgttggctgaataccgagacaggcttcatttggtccttcttgggcccagtatgcacggtgatcgtgatcaatagtctgctgctcacctggaccctctggattctgaggcaaagactgagtagcgtcaatgccgaggtctccaccctgaaagacacacggctgttgaccttcaaggctttcgcccagctctttatcttaggctgtagctgggtgctgggcatcttccagataggccctgtcgcaggcgtgatggcgtatctctttactattatcaactcactgcagggcgccttcatattcctcattcattgtctcctgaatggccaggtgcgagaagagtacaagcgttggattactggcaaaactaagccgagcagtcaaagccaaacctccaggatactcctatccagtatgccatctgcgtccaaaaccggatag

SEQ ID NO: 90082 - DNA, 2130 bp, Artificial Sequence
  derived and/or modified sequence
atgaggggcttcaacctgctgctcttctggggctgctgcgtgatgcacagctgggagggccacatccggcccaccaggaagcccaacaccaagggcaacaactgccgggacagcaccctgtgcccagcctatgccacctgcaccaacacagtggacagctactactgtgcctgcaagcagggcttcctgagcagcaatggccagaaccacttcaaggaccccggggtgcgctgcaaggacattgatgaatgttcccagagcccccagccctgtggccccaacagcagctgcaagaacctgagcggccgctacaagtgcagctgcctggatggcttcagcagccccactggaaatgactgggtgcctgggaagccaggcaacttcagctgcacagacatcaatgaatgtctgaccagccgggtgctcttcaagtgcaaggaggatgtgatcccagacaacaagcagatccagcagtgccaggagggcacagctgtgaagccagcctacgtgtccttctgtgcccagatcaacaacatcttctctgtgctggacaaggtgtgtgagaacaagaccaccgtggtgtccctgaagaacaccacagagagctttgtgcctgtgctgaagcagatcagcacctggaccaagttcaccaaggaggagaccagcagcctggccaccgtcttcctggagagcgtggagagcatgaccctggccagcttctggaagcccagcgccaacatcaccccagctgtgaggacagagtacctggacatcgagagcaaggtgatcaacaaggagtgcagcgaggagaatgtgaccctggacctggtggccaagggggacaagatgaagattggctgcagcaccatcgaggagagcgagagcacagagaccactggagtggcctttgtgtcctttgtgggcatggagagcgtgctgaatgaacgcttcttcaaggaccaccaggcccccctgaccaccagcgagatcaagctgaagatgaacagccgggtggtgggcggcatcatgaccggggagaagaaggatggcttcagtgaccccatcatctacaccctggagaacatccagcccaagcagaagtttgagcggcccatctgtgtgtcctggagcacagatgtgaagggcggccgctggaccagctttggctgcgtcatcctggaggccagcgagacctacaccatctgcagctgcaaccagatggccaacctggccgtcatcatggccagcggggagctgaccatggacttcagcctgtacatcatcagccacgtgggcatcatcatcagcctggtgtgcctggtgctggccatcgccaccttcctgctgtgccgcagcatccggaaccacaacacctacctgcacctgcacctgtgtgtgtgcctgctgctggccaagaccctcttcctggccggcatccacaagacagacaacaagatgggctgtgccatcatcgccggcttcctgcactacctgttcctggcctgcttcttctggatgctggtggaggccgtcatcctcttcctgatggtgaggaacctgaaggtggtgaactacttcagcagcaggaacatcaagatgctgcacatctgtgccttcggctacggcctgcccatgctggtggtggtgatcagcgcctctgtgcagccccagggctacggcatgcacaaccgctgctggctgaacacagaaacaggcttcatctggagcttcctgggccctgtgtgcaccgtgattgtcatcaacagcctgctgctgacctggaccctgtggatcctgcggcagaggctgagctctgtgaatgctgaggtgtccaccctgaaggacacccggctgctgaccttcaaggcctttgcccagctgttcatcctgggctgctcctgggtgctgggcatcttccagatcggccctgtggccggcgtgatggcctacctgttcaccatcatcaacagcctgcagggcgccttcatcttcctgatccactgcctgctgaatggccaggtgcgggaggagtacaagcgctggatcaccgggaagaccaagcccagcagccagagccagaccagccgcatcctgctgagctccatgcccagcgccagcaagacaggatag

SEQ ID NO: 90083 - DNA, 2130 bp, Artificial Sequence
  derived and/or modified sequence
atgcggggcttcaacctgctgctgttctggggctgctgcgtgatgcactcctgggaggggcatatcagacccactaggaaacccaacacaaaggggaacaactgtagggatagcacactgtgtccggcctacgctacatgcactaataccgttgattcctactattgtgcctgcaagcaggggttcttgagttccaatggtcagaaccactttaaggatccaggggttagatgcaaggacatcgacgaatgcagccagagcccccaaccctgcggccctaatagttcctgcaagaatttgagcggacgatataaatgctcgtgccttgatggcttcagttcgcccaccgggaatgattgggtacccggcaaaccagggaatttctcttgtaccgacatcaacgaatgcctgactagccgggtgttgtttaaatgtaaggaagacgtgatccccgacaacaaacagatccaacagtgtcaggagggcaccgccgtgaaaccggcctatgtgagcttttgcgcacagattaacaacatcttctccgtcctggacaaagtctgcgagaacaaaacaaccgttgttagcttgaaaaataccacggagtcattcgtgccagtacttaagcagatatcgacctggacaaaattcactaaagaggaaaccagctccctggccacagtttttctcgagtcagtggagtccatgaccctggcttctttctggaagccctcggccaatatcacgccagccgtcagaacagaatatctagatattgaaagtaaggtgatcaacaaagagtgttcagaagagaatgtgactctggatctggttgccaaaggcgacaaaatgaaaattggctgctctaccatagaagagtcagaaagcacagaaactactggagtggcttttgtctccttcgtgggaatggagtccgtgctaaacgaaaggtttttcaaggatcatcaggccccactgaccacaagcgaaatcaagctgaaaatgaatagccgcgtcgtgggaggtattatgaccggcgagaagaaggacggtttttccgatcccattatttacaccctcgagaacatccaacccaagcagaaattcgaacgccctatatgtgttagctggagtacagacgtgaagggggggagatggacctctttcggctgcgttatccttgaggcgtctgaaacatataccatctgttcctgtaatcagatggctaatctggccgtgataatggcgagtggtgagcttacaatggacttctccctgtatatcatctcccacgtaggaatcatcatctcacttgtgtgcttggtgctggctatagcaaccttcctcctttgccgctccatcagaaaccacaacacttacctgcaccttcacctgtgcgtgtgtctcctacttgccaaaaccctctttctggctggaattcacaaaactgataacaaaatggggtgcgcgatcattgccgggtttctccattacctgttcttggcctgtttcttctggatgcttgtagaggcggttatccttttcctcatggtccgcaacctaaaagtggtaaattatttctcttcgagaaatattaagatgcttcatatctgtgccttcggatacggactcccaatgctcgtcgtggtgatctccgcaagtgtgcagccgcagggctacggcatgcacaatcgctgttggttaaacaccgaaactgggtttatctggtcttttctgggcccagtgtgcaccgtgatcgtgattaattctctgttgctgacctggactctctggattctgcgccagcgcctctctagcgttaatgcggaagtctcaactcttaaggacaccaggctgctgacctttaaagcctttgcgcagctgttcattctagggtgttcctgggtgttgggcatcttccaaatcgggccggtcgccggagtgatggcttatctgtttactatcataaactctctgcaaggggcctttattttcctgatacactgcttgctaaacggccaggtgagagaagagtataagcggtggatcactggcaagacaaagcccagcagtcagtctcagacgtcccgcatactgctctccagcatgccttccgcatccaagaccgggtag

SEQ ID NO: 90084 - DNA, 2130 bp, Artificial Sequence
  derived and/or modified sequence
atgcgcggtttcaatctgctgctattctggggttgctgcgtcatgcatagctgggaagggcacatccgcccaactagaaaaccgaatacaaagggaaataattgtcgggactcaacgctgtgtcccgcatatgctacatgtacaaacactgtggactcatattactgtgcttgtaaacagggcttcctgtctagtaatggtcaaaaccactttaaagaccctggcgtccgctgtaaggacatcgacgagtgctcccagagtcctcaaccctgtgggccaaatagcagctgcaaaaacctgagcggacgttataaatgctcatgcctcgatggcttctcctctcctacagggaatgattgggtcccgggaaagcccggtaatttctcctgcaccgatatcaatgagtgtctcacatcaagggtgctctttaagtgtaaagaagacgtgatacctgacaacaagcagattcaacagtgtcaggagggcactgccgtgaagcccgcttacgtatccttctgcgcccagatcaataatatcttctccgtccttgataaggtgtgcgaaaataagactaccgtcgtgtccctgaaaaataccaccgaatcattcgtgcctgtcttaaaacagatctccacttggacaaagttcacaaaagaggaaacttctagtctcgcaacagtgtttcttgagtccgtcgagagtatgacacttgcctcattctggaaaccatctgctaatatcacgccagcggtgaggaccgagtatctggatatcgaatccaaggttataaacaaggagtgttccgaggagaacgttaccctggatctggttgcgaaaggggacaagatgaagatcggttgctcaaccatcgaggagtccgagtccaccgaaacaactggggtcgccttcgtaagtttcgtggggatggagtccgtccttaacgagcgctttttcaaagaccaccaggctcctctcaccacctctgagatcaaactgaagatgaacagcagggtggtggggggaattatgaccggcgagaagaaagatggattctccgaccccattatttacaccttggagaatatacagccaaagcagaagttcgaacggcctatctgtgtgtcctggtcaacagacgtcaaaggtggccgttggacaagttttggatgcgtgatcctggaggcctcagagacgtataccatctgtagctgcaaccaaatggcgaatctggctgtgattatggctagtggtgagctgaccatggacttcagtctttatataatctcccacgttggaatcatcattagcttggtctgtctagttctcgcgattgccacattcctgctgtgcagatctatccggaatcacaacacatatctgcatttgcacctttgcgtgtgccttttattagccaagaccctttttctggcaggcatacataagaccgacaataaaatggggtgcgcaatcattgccggattcctgcactacctgtttctagcatgcttcttctggatgctagtggaggctgtcatcctattcctcatggtgaggaacctgaaagtagtaaactacttctcatccaggaatatcaagatgttacacatttgcgccttcggttatggacttcctatgctcgtcgttgttatctcggcctccgttcagccccaaggctacggcatgcacaaccggtgctggttaaatacagagaccgggttcatctggtcgttcctcggtccagtgtgtacagttatcgtgatcaactccctactgctcacatggaccttgtggatactcagacagaggctatcatccgttaacgccgaagtgtctactttaaaagacacccggttgctcacatttaaagcttttgcacaacttttcattctcggctgctcatgggtcttgggcatctttcagattggcccagtggccggagtgatggcctacctctttacaattattaattcactccagggcgctttcatcttcctaatccactgcctgctcaatggtcaagtgagagaggaatacaaaagatggataacaggcaaaacaaaaccatcctctcagtcgcagaccagccggatcctattaagtagcatgccgtctgcctccaaaaccggatag

SEQ ID NO: 90085 - DNA, 2130 bp, Artificial Sequence
  derived and/or modified sequence
atgagaggcttcaacctgctgctgttctggggctgctgcgtgatgcacagctgggagggccacatcagacccaccagaaagcccaacaccaagggcaacaactgcagagacagcaccctgtgccccgcctacgccacctgcaccaacaccgtggacagctactactgcgcctgcaagcagggcttcctgagcagcaacggccagaaccacttcaaggaccccggcgtgagatgcaaggacatcgacgagtgcagccagagcccccagccctgcggccccaacagcagctgcaagaacctgagcggcagatacaagtgcagctgcctggacggcttcagcagccccaccggcaacgactgggtgcccggcaagcccggcaacttcagctgcaccgacatcaacgagtgcctgaccagcagagtgctgttcaagtgcaaggaggacgtgatccccgacaacaagcagatccagcagtgccaggagggcaccgccgtgaagcccgcctacgtgagcttctgcgcccagatcaacaacatcttcagcgtgctggacaaggtgtgcgagaacaagaccaccgtggtgagcctgaagaacaccaccgagagcttcgtgcccgtgctgaagcagatcagcacctggaccaagttcaccaaggaggagaccagcagcctggccaccgtgttcctggagagcgtggagagcatgaccctggccagcttctggaagcccagcgccaacatcacccccgccgtgagaaccgagtacctggacatcgagagcaaggtgatcaacaaggagtgcagcgaggagaacgtgaccctggacctggtggccaagggcgacaagatgaagatcggctgcagcaccatcgaggagagcgagagcaccgagaccaccggcgtggccttcgtgagcttcgtgggcatggagagcgtgctgaacgagagattcttcaaggaccaccaggcccccctgaccaccagcgagatcaagctgaagatgaacagcagagtggtgggcggcatcatgaccggcgagaagaaggacggcttcagcgaccccatcatctacaccctggagaacatccagcccaagcagaagttcgagagacccatctgcgtgagctggagcaccgacgtgaagggcggcagatggaccagcttcggctgcgtgatcctggaggccagcgagacctacaccatctgcagctgcaaccagatggccaacctggccgtgatcatggccagcggcgagctgaccatggacttcagcctgtacatcatcagccacgtgggcatcatcatcagcctggtgtgcctggtgctggccatcgccaccttcctgctgtgcagaagcatcagaaaccacaacacctacctgcacctgcacctgtgcgtgtgcctgctgctggccaagaccctgttcctggccggcatccacaagaccgacaacaagatgggctgcgccatcatcgccggcttcctgcactacctgttcctggcctgcttcttctggatgctggtggaggccgtgatcctgttcctgatggtgagaaacctgaaggtggtgaactacttcagcagcagaaacatcaagatgctgcacatctgcgccttcggctacggcctgcccatgctggtggtggtgatcagcgccagcgtgcagccccagggctacggcatgcacaacagatgctggctgaacaccgagaccggcttcatctggagcttcctgggccccgtgtgcaccgtgatcgtgatcaacagcctgctgctgacctggaccctgtggatcctgagacagagactgagcagcgtgaacgccgaggtgagcaccctgaaggacaccagactgctgaccttcaaggccttcgcccagctgttcatcctgggctgcagctgggtgctgggcatcttccagatcggccccgtggccggcgtgatggcctacctgttcaccatcatcaacagcctgcagggcgccttcatcttcctgatccactgcctgctgaacggccaggtgagagaggagtacaagagatggatcaccggcaagaccaagcccagcagccagagccagaccagcagaatcctgctgagcagcatgcccagcgccagcaagaccggctag

SEQ ID NO: 90086 - DNA, 2556 bp, Artificial Sequence
  derived and/or modified sequence
gaatgacagaactacagcataatgcgtggcttcaacctgctcctcttctggggatgttgtgttatgcacagctgggaagggcacataagacccacacggaaaccaaacacaaagggtaataactgtagagacagtaccttgtgcccagcttatgccacctgcaccaatacagtggacagttactattgcgcttgcaaacaaggcttcctgtccagcaatgggcaaaatcacttcaaggatccaggagtgcgatgcaaagatattgatgaatgttctcaaagcccccagccctgtggtcctaactcatcctgcaaaaacctgtcagggaggtacaagtgcagctgtttagatggtttctcttctcccactggaaatgactgggtcccaggaaagccgggcaatttctcctgtactgatatcaatgagtgcctcaccagcagggttctcttcaaatgtaaggaagatgtgatacccgataataagcagatccagcaatgccaagagggaaccgcagtgaaacctgcatatgtctccttttgtgcacaaataaataacatcttcagcgttctggacaaagtgtgtgaaaataaaacgaccgtagtttctctgaagaatacaactgagagctttgtccctgtgcttaaacaaatatccacgtggactaaattcaccaaggaagagacgtcctccctggccacagtcttcctggagagtgtggaaagcatgacactggcatctttttggaaaccctcagcaaatatcactccggctgttcggacggaatacttagacattgagagcaaagttatcaacaaagaatgcagtgaagagaatgtgacgttggacttggtagccaagggggataagatgaagatcgggtgttccacaattgaggaatctgaatccacagagaccactggtgtggcttttgtctcctttgtgggcatggaatcggttttaaatgagcgcttcttcaaagaccaccaggctcccttgaccacctctgagatcaagctgaagatgaattctcgagtcgttgggggcataatgactggagagaagaaagacggcttctcagatccaatcatctacactctggagaacattcagccaaagcagaagtttgagaggcccatctgtgtttcctggagcactgatgtgaagggtggaagatggacatcctttggctgtgtgatcctggaagcttctgagacatataccatctgcagctgtaatcagatggcaaatcttgccgttatcatggcgtctggggagctcacgatggacttttccttgtacatcattagccatgtaggcattatcatctccttggtgtgcctcgtcttggccatcgccacctttctgctgtgtcgctccatccgaaatcacaacacctacctccacctgcacctctgcgtgtgtctcctcttggcgaagactctcttcctcgccggtatacacaagactgacaacaagatgggctgcgccatcatcgcgggcttcctgcactaccttttccttgcctgcttcttctggatgctggtggaggctgtgatactgttcttgatggtcagaaacctgaaggtggtgaattacttcagctctcgcaacatcaagatgctgcacatctgtgcctttggttatgggctgccgatgctggtggtggtgatctctgccagtgtgcagccacagggctatggaatgcataatcgctgctggctgaatacagagacagggttcatctggagtttcttggggccagtttgcacagttatagtgatcaactcccttctcctgacctggaccttgtggatcctgaggcagaggctttccagtgttaatgccgaagtctcaacgctaaaagacaccaggttactgaccttcaaggcctttgcccagctcttcatcctgggctgctcctgggtgctgggcatttttcagattggacctgtggcaggtgtcatggcttacctgttcaccatcatcaacagcctgcagggggccttcatcttcctcatccactgtctgctcaacggccaggtacgagaagaatacaagaggtggatcactgggaagacgaagcccagctcccagtcccagacctcaaggatcttgctgtcctccatgccatccgcttccaagacgggttaaagtcctttcttgctttcaaatatgctatggagccacagttgaggacagtagtttcctgcaggagcctaccctgaaatctcttctcagcttaacatggaaatgaggatcccaccagccccagaaccctctggggaagaatgttgggggcggtcttcctgtggttgtatgcactgatgagaaatcaggcgtttctgctccaaacgaccattttatcttcgtgctctgcaacttcttcaattccagagtttctgagaacagacccaaattcaatggcatgaccaagaacacctggctaccattttgttttctcctgcccttgttggtgcatggttctaagcatgcccctccagagcctatcatacgcctgatacagagaacctctcaataaatgatttgtcgcctgtc

SEQ ID NO: 90087 - protein, 1183 aa, Artificial Sequence
  derived and/or modified sequence
MTSLRWLKLNRTGLCYLPEELAALQKLEHLSVSHNNLTTLHGELSSLPSLRAIVARANSLKNSGVPDDIFKLDDLSVLDLSHNQLTECPRELENAKNMLVLNLSHNRQLPAMTALQTLHLRSTQRTQSNLPTSLEGLSNLADVDLSCNDLTRVPECLYTLPSLRRLNLSSNQITELSLCIDQWVHVETLNLSRNQLTSLPSAICKLSKLKKLYLNSNKLDFDGLPSGIGKLTNLEEFMAANNNLELVPESLCRCPKLRKLVLNKNHLVTLPEAIHFLTEIEVLDVRENPNLVMPPKPADRAAEWYNIDFSLQNQLRLAGASPATVAAAAAGSGPKDPMARKMRLRRRKDSAQDDQAKQVLKGMSDVAQEKNKKQEESADARAPSGKVRRWDQGLEKPRLDYSEFFTEDVGQLPGLTIWQIENFVPVLVEEAFHGKFYEADCYIVLKTFLDDSGSLNWEIYYWIGGEATLDKKACSAIHAVNLRNYLGAECRTVREEMGDESEEFLQVFDNDISYIEGGTASGFYTVEDTHYVTRMYRVYGKKNIKLEPVPLKGTSLDPRFVFLLDRGLDIYVWRGAQATLSSTTKARLFAEKINKNERKGKAEITLLVQGQELPEFWEALGGEPSEIKKHVPEDFWPPQPKLYKVGLGLGYLELPQINYKLSVEHKQRPKVELMPRMRLLQSLLDTRCVYILDCWSDVFIWLGRKSPRLVRAAALKLGQELCGMLHRPRHATVSRSLEGTEAQVFKAKFKNWDDVLTVDYTRNAEAVLQSPGLSGKVKRDAEKKDQMKADLTALFLPRQPPMSLAEAEQLMEEWNEDLDGMEGFVLEGKKFARLPEEEFGHFYTQDCYVFLCRYWVPVEYEEEEKKEDKEEKAEGKEGEEATAEAEEKQPEEDFQCIVYFWQGREASNMGWLTFTFSLQKKFESLFPGKLEVVRMTQQQENPKFLSHFKRKFIIHRGKRKAVQGAQQPSLYQIRTNGSALCTRCIQINTDSSLLNSEFCFILKVPFESEDNQGIVYAWVGRASDPDEAKLAEDILNTMFDTSYSKQVINEGEEPENFFWVGIGAQKPYDDDAEYMKHTRLFRCSNEKGYFAVTEKCSDFCQDDLADDDIMLLDNGQEVYMWVGTQTSQVEIKLSLKACQVYIQHMRSKEHERPRRLRLVRKGNEQHAFTRCFHAWSAFCKALA

SEQ ID NO: 90088 - DNA, 3975 bp, Artificial Sequence
  derived and/or modified sequence
agcccggcgcggcccggcagcgagagcggcgccatggaggccaccggggtgctgccgttcgtgcgtggcgtggacctcagcggcaacgacttcaagggcggctacttccctgagaatgtcaaggccatgaccagcctgcggtggctgaagctgaaccgcactggcctctgctacctgcccgaggagctggccgccctgcagaagctggaacacttgtctgtgagccacaacaacctgaccacgcttcatggggagctgtccagcctgccatcgctgcgcgccatcgtggcccgagccaacagtctgaagaattccggagtccccgatgacatcttcaagctagatgatctctcagtcctggacttgagccacaaccagctgacagagtgcccgcgggagctggagaacgccaagaacatgctggtgctgaacctcagccacaacaggcagctcccagcgatgacggccctgcagaccctgcacctgcggagcacccagcgcacccagagcaacctgcccaccagcctggagggtctgagcaacctcgcagacgtggatctgtcctgcaatgacctgacacgggtgcccgagtgtctgtacaccctccccagcctgcgccgcctcaacctcagcagcaaccagatcacggagctgtccctgtgcatagaccagtgggtgcacgtggaaactctgaacctgtcccgaaatcagctcacctcactgccctcagccatttgcaagctgagcaagctgaagaagctgtacctgaattccaacaagctggactttgacgggctgccctcaggcattggcaagctcaccaacctggaagagttcatggctgccaacaacaacctggagctggtccctgaaagtctctgcaggtgcccaaagctgaggaaacttgtcctgaacaagaaccacctggtgaccctcccagaagccatccatttcctgacggagatcgaggtcctggatgtgcgggagaaccccaacctggtcatgccgcccaagcccgcagaccgtgccgctgagtggtacaacatcgacttctcgctgcagaaccagctgcggctagcgggtgcctctcctgctaccgtggctgcagctgcagctgggagtgggcccaaggaccctatggctcgcaagatgcgactgcggaggcgcaaggattcagcccaggatgaccaggccaagcaggtgctgaagggcatgtcagatgttgcccaggagaagaacaaaaagcaggaggagagcgcagatgcccgggcccccagcgggaaggtgcggcgttgggaccagggcctggagaagccccgccttgactactccgagttcttcacggaggacgtgggccagctgcccggactgaccatctggcagatagagaacttcgtgcctgtgctggtggaggaagccttccacggcaagttctacgaggctgactgctacattgtgctcaagacctttctggatgacagcggctccctcaactgggagatctactactggattggcggggaggccacactcgacaagaaagcttgctctgccatccacgctgtcaacttgcgcaactacctgggtgctgagtgccgcactgtccgggaggagatgggcgatgagagcgaggagttcctgcaggtgtttgacaacgacatctcctacattgagggtggaacagccagtggcttctacactgtggaagacacacactatgtcaccaggatgtatcgtgtgtatgggaaaaagaacatcaagttggagcctgtgcccctcaaggggacctctctggacccaaggtttgttttcctgctggaccgagggctagacatctacgtatggcggggggcccaggccacactgagcagcaccaccaaggccaggctctttgcagagaaaattaacaagaatgagcggaaagggaaggctgagatcacactgctggtgcagggccaggagctcccagagttctgggaggcactgggtggggagccctctgagatcaagaagcacgtgcctgaagacttctggccgccgcagcccaagctgtacaaggtgggcctgggcttgggctacctggagctgccacagatcaactacaagctctccgtggaacataagcagcgtcccaaggtggagctgatgccaagaatgcggctgctgcagagtctgctggacacgcgctgcgtgtacattctggactgttggtccgacgtgttcatctggctcggccgcaagtccccgcgcctggtgcgcgctgccgccctcaagctgggtcaggagctgtgcgggatgctgcaccggccacgccatgccacggtcagccgcagcctcgagggcaccgaggcgcaggtgttcaaggccaagttcaagaattgggacgatgtgttgacggtggactacacacgcaatgcggaggccgtgctgcagagcccgggtctctccgggaaggtgaaacgcgacgccgagaagaaagaccagatgaaggctgacctcactgcgcttttcctgccgcggcagccgcccatgtcgctggccgaggcggagcagctgatggaggagtggaacgaagacctagacggcatggagggtttcgtgctggagggcaagaagtttgcgcggctgccggaagaggagtttggccacttctacacgcaggactgctacgtcttcctctgcaggtactgggtgcctgtggagtacgaggaggaggaaaagaaggaagacaaggaggagaaggccgagggcaaagaaggcgaggaagcaaccgctgaggcagaggagaagcagccagaggaggacttccagtgcatcgtgtacttctggcagggccgtgaagcctccaatatgggctggctcaccttcaccttcagcctgcaaaagaagttcgagagcctcttccctgggaagctggaggtggtacgcatgacgcagcagcaggagaaccccaagttcctgtcccatttcaagaggaagttcatcatccaccggggcaagaggaaggcggtccagggcgcccaacagcccagcctctaccagatccgcaccaacggcagcgccctctgcacccggtgcatccagatcaacaccgactccagcctcctcaactccgagttctgcttcatcctcaaggttccctttgagagtgaggacaaccagggcatcgtgtatgcctgggtgggccgggcatcagaccctgacgaagccaagttggcagaagacatcctgaacaccatgtttgacacctcctacagcaagcaggttatcaacgaaggtgaggagcctgagaacttcttctgggtgggcattggggcacagaagccctatgatgacgatgccgagtacatgaaacacacacgtctcttccggtgctccaacgagaagggctactttgcagtgactgagaaatgctccgacttttgccaagatgacctggcagatgatgacatcatgttgctagacaatggccaagaggtctacatgtgggtggggacccagactagccaggtggagatcaagctgagcctgaaggcctgccaggtatatatccagcacatgcggtccaaggaacatgagcggccgcgccggctgcgcctggtccgcaagggcaatgagcagcacgcctttacccgctgcttccacgcctggagcgccttctgcaaggccctggcctaagacaggctggcacagccccaggcttggtgaggaagaggaaggggcctcatccactgtctgctagcaaagaatgtactcaggtgacaccacctgctccagccacgtccagtgccacagtccccagtagcctcaagcagcaccaatggggatgaccctgacaggtgccctcaggggtctgggaaatccaactctctccacagtgtgagtgcacgtgtgaagccccctcactcttccgctagggataaagcagatgtggatgccctttaagagatattaaatgcttttattttcaatatt

SEQ ID NO: 90089 - DNA, 3552 bp, Artificial Sequence
  derived and/or modified sequence
atgacttcactgcgatggttaaaacttaacaggacaggtctgtgctatctccctgaagagctcgccgctctacagaagctggaacacctgagcgtgtctcacaataaccttacaactttacatggcgaactctcctctttaccttccctgagggccattgtggcacgggccaactctttgaagaacagcggagtgcctgatgacatttttaaactcgatgacctcagtgtccttgatttgtcacacaatcagctcacagagtgtccgagagaactggagaatgctaagaatatgctcgtcctcaacctgagccacaatcggcagctccccgctatgaccgcactgcagacgcttcatctccgatctactcagagaactcagtcaaatctgcctacttcactggagggtctgagcaacttggccgatgtcgatctctcctgcaacgacctaacccgggtacctgagtgtctgtacacactcccatccctacgtagactcaacctctcttcaaaccagataacggagctgagcctgtgcatcgaccaatgggtccatgtcgaaaccctcaatctctcgcgtaaccaacttacgagtctgccctctgcaatatgcaaactcagcaaactgaagaagctctacttgaactctaacaagctggactttgacggtctccccagtggcatcggaaagctcaccaacctggaagaattcatggcggccaataataatctggaattagttccagaaagtctatgccgctgtcccaagctgcggaaattggtcttgaacaagaatcacttggttactcttcctgaggctatccatttcctcactgaaatcgaagtcctggatgtgcgcgagaatcctaacctggtaatgcctccaaaaccggccgatcgcgcagcggagtggtacaatattgatttctcactgcagaatcagctccgtctggctggtgcgtccccagctactgtggccgcagcggcagcagggagcggaccaaaggatcctatggcccgtaaaatgagacttcgcaggaggaaggatagcgcgcaggatgatcaagccaaacaggtgttaaagggtatgagcgacgtggctcaagagaagaataagaaacaagaagagagcgccgacgcccgcgccccaagcggaaaggttcgccgctgggatcagggcctcgaaaaaccccgtctggattacagcgagttcttcaccgaagatgtgggtcagctgccagggttgaccatctggcaaattgagaactttgtcccggtcctggtggaagaggccttccatggcaagttttatgaggcggactgctacattgtgcttaaaacctttctggacgactccggcagtctgaactgggagatttattactggattggcggagaagctacgctggacaagaaagcgtgtagcgccatccacgcagtcaatctgcggaactatctgggtgccgaatgcaggaccgttagggaggagatgggtgatgagtctgaggagtttctacaagtcttcgacaacgatatcagctatatcgaggggggcacggccagcgggttttatactgtagaggacacacactatgtaacgaggatgtaccgggtttatggcaaaaaaaacataaagctcgagcccgtacccctgaaggggaccagtttggatccaagatttgttttcctcttggacagaggactggatatatatgtgtggcggggagcacaggcaactctaagctctacaacaaaagctcggctgtttgctgagaaaataaacaaaaacgagaggaaagggaaggctgagattacactgctcgttcaaggccaggagctgcccgagttttgggaggccctgggaggcgagccatcagagatcaaaaagcatgtgcctgaggacttctggcctcctcagccgaaactgtacaaagtcgggctgggcctcggctacctcgagctgcctcagataaactataagctgtcggtggagcataaacaacgacctaaggtagaacttatgccacgcatgcggctgctgcagtcgctcttggatactcgctgcgtgtatatcttggactgctggtcagatgtcttcatctggctcgggcggaaaagtccgagactggtgagggctgccgcgcttaaattgggacaggaactttgcggcatgttgcatcgaccccggcatgccacagtctcaaggtccttggaagggacagaagcccaagtatttaaggcgaagttcaagaattgggatgacgtcttgacagtcgattacactaggaatgctgaagcagtgctacagtctcccggcctgtcaggcaaagtaaagagagacgccgagaaaaaggatcaaatgaaagccgatttgacagccctgtttcttcctcgtcaaccccctatgtcgctggcggaagccgagcagctgatggaagagtggaacgaggaccttgatggcatggaggggtttgtactggagggcaaaaagtttgcgaggctgcctgaagaagaatttggacatttctacacacaggattgttacgtcttcctctgcagatactgggtgcctgtcgagtacgaggaagaagagaagaaagaggataaggaggaaaaagccgagggcaaggagggcgaagaggcgaccgctgaagctgaagagaagcagcctgaagaggatttccagtgcattgtgtatttctggcaggggcgggaggccagcaatatggggtggctgacattcaccttctctctgcagaaaaagtttgagtccctattcccagggaaattggaggttgtgcggatgacacaacagcaggagaatcccaagttcctgtctcattttaagagaaagtttatcatacataggggaaagcgcaaggctgtgcagggcgcccagcagccatcactgtaccagatacggaccaacggctccgctctttgtactagatgcatccagatcaataccgacagtagtctgctcaactcggagttttgtttcatacttaaagtgcccttcgaatctgaagacaatcagggtatcgtgtatgcctgggttggccgggcctctgaccccgatgaggcaaaattggccgaggacatcctgaataccatgttcgacacctcttattccaagcaagtaattaatgagggggaggagcccgaaaattttttctgggtcggaattggggcacagaagccctacgacgacgatgcagagtatatgaaacacacaagactatttagatgcagcaatgagaaaggttattttgctgttactgagaaatgttcagacttctgccaggacgacctggctgatgatgatattatgttgctggacaatggtcaagaggtgtatatgtgggtggggacacagacctcacaggtggagatcaagttaagcttgaaggcctgccaggtctacattcagcacatgcgcagtaaggagcatgagagaccacggcggctaaggctcgtaagaaaaggtaatgagcaacacgcttttacccgatgttttcacgcttggagcgctttttgtaaagccctcgcctag

SEQ ID NO: 90090 - DNA, 3552 bp, Artificial Sequence
  derived and/or modified sequence
atgaccagcctgcgctggctgaagctgaacagaacaggcctgtgctacctgcctgaggagctggccgccctgcagaagctggagcacctgtctgtgagccacaacaacctgaccaccctgcatggagagctgagcagcctgcccagcctgcgggccatcgtggcccgggccaacagcctgaagaacagcggcgtgcctgatgacatcttcaagctggatgacctgtctgtgctggacctgagccacaaccagctgacagaatgtccccgggagctggagaatgccaagaacatgctggtgctgaacctgagccacaaccggcagctgcctgccatgacagccctgcagaccctgcacctgcggagcacccagaggacccagagcaacctgcccaccagcctggagggcctgagcaacctggctgatgtggacctgagctgcaatgacctgaccagggtgcctgaatgtctgtacaccctgcccagcctgcggcggctgaacctgagcagcaaccagatcacagagctgagcctgtgcatcgaccagtgggtgcacgtggagaccctgaacctgagcaggaaccagctgaccagcctgcccagcgccatctgcaagctgagcaagctgaagaagctgtacctgaacagcaacaagctggactttgatggcctgcccagcggcatcggcaagctgaccaacctggaggagttcatggccgccaacaacaacctggagctggtgcctgagagcctgtgccgctgccccaagctgaggaagctggtgctgaacaagaaccacctggtgaccctgcctgaggccatccacttcctgacagaaattgaggtgctggatgtgcgggagaaccccaacctggtgatgccacccaagccagctgacagagctgctgagtggtacaacatcgacttcagcctgcagaaccagctgcggctggccggggccagccctgccaccgtggccgctgctgctgctggcagcggccccaaggaccccatggccaggaagatgaggctgcggcggaggaaggacagcgcccaggatgaccaggccaagcaggtgctgaagggcatgtctgatgtggcccaggagaagaacaagaagcaggaggagagcgcagatgcccgggcccccagcggcaaggtgcggcgctgggaccagggcctggagaagccccggctggactacagcgagttcttcacagaagatgtgggccagctgcccggcctgaccatctggcagattgaaaattttgtgcctgtgctggtggaggaggccttccacggcaagttctatgaagctgactgctacatcgtgctgaagaccttcctggatgacagcggcagcctgaactgggagatctactactggattggaggagaggccaccctggacaagaaggcctgcagcgccatccatgctgtgaacctgaggaactacctgggcgcagaatgtagaacagtgcgggaggagatgggagatgaaagtgaggagttcctgcaggtgtttgacaatgacatctcctacattgaaggaggaacagccagcggcttctacacagtggaggacacccactacgtgaccaggatgtacagagtgtatggcaagaagaacatcaagctggagcctgtgcccctgaagggcaccagcctggaccccaggtttgtgttcctgctggaccggggcctggacatctacgtgtggaggggggcccaggccaccctgagcagcaccaccaaggcccggctgtttgctgagaagatcaacaagaatgaaaggaagggcaaggccgagatcaccctgctggtgcagggccaggagctgcctgagttctgggaggccctgggcggggagcccagcgagatcaagaagcacgtgcctgaggacttctggccaccccagcccaagctgtacaaggtgggcctgggcctgggctacctggagctgccccagatcaactacaagctgtctgtggagcacaagcagaggcccaaggtggagctgatgcccaggatgaggctgctgcagagcctgctggacacccgctgtgtgtacatcctggactgctggagcgatgtgttcatctggctgggcaggaagagcccccggctggtgcgggctgctgccctgaagctgggccaggagctgtgtggcatgctgcaccggcccaggcatgccaccgtgagccgcagcctggagggcacagaggcccaggtgttcaaggccaagttcaagaactgggatgatgtgctgactgtggactacaccagaaatgctgaggccgtgctgcagagccctggcctgagcggcaaggtgaagagagatgctgagaagaaggaccagatgaaggctgacctgacagccctcttcctgccccggcagccccccatgagcctggccgaggccgagcagctgatggaggagtggaatgaagacctggatggcatggagggctttgtgctggagggcaagaagtttgcccggctgcctgaggaggagtttggccacttctacacccaggactgctacgtgttcctgtgccgctactgggtgcctgtggagtatgaggaggaggagaagaaggaggacaaggaggagaaggccgagggcaaggagggggaggaggccacagctgaggccgaggagaagcagcctgaggaggacttccagtgcatcgtgtacttctggcagggccgggaggccagcaacatgggctggctgaccttcaccttcagcctgcagaagaagtttgagagcctcttccctgggaagctggaggtggtgaggatgacccagcagcaggagaaccccaagttcctgagccacttcaagaggaagttcatcatccaccggggcaagaggaaggctgtgcagggcgcccagcagcccagcctgtaccagatccgcaccaacggcagcgccctgtgcacccgctgcatccagatcaacacagacagcagcctgctgaacagcgagttctgcttcatcctgaaggtgccctttgaaagtgaggacaaccagggcatcgtgtatgcctgggtgggccgggccagtgaccctgatgaggccaagctggccgaggacatcctgaacaccatgtttgacaccagctacagcaagcaggtgatcaatgaaggagaggagcctgagaacttcttctgggtgggcatcggggcccagaagccctatgatgatgatgctgagtacatgaagcacaccaggctcttccgctgcagcaatgagaagggctactttgctgtgacagagaagtgcagcgacttctgccaggatgacctggctgatgatgacatcatgctgctggacaatggccaggaggtgtacatgtgggtgggcacccagaccagccaggtggagatcaagctgagcctgaaggcctgccaggtgtacatccagcacatgaggagcaaggagcacgagcggccccggcggctgcggctggtgaggaaaggaaatgagcagcacgccttcacccgctgcttccacgcctggagcgccttctgcaaggccctggcctag

SEQ ID NO: 90091 - DNA, 3552 bp, Artificial Sequence
  derived and/or modified sequence
atgaccagcctgcggtggctgaagctgaaccggaccggcctgtgctacctgcccgaggagctcgctgcactgcaaaaactggaacatttaagtgtgtctcataataatctcacaacactgcacggggaattgtcaagtctcccgagccttcgagcgatcgtagccagggctaacagcctaaaaaacagtggagttcctgacgatatttttaagctggacgacctaagtgtgcttgatcttagccacaatcagctgactgagtgcccaagagaactggaaaacgcgaagaacatgctggtgcttaacctgtcacataataggcagctgccggccatgacagcactccaaaccttgcatctccggagtacacagagaacacagtctaacctccccacttcactggaggggctctcaaacctcgcagacgtggatttgtcttgtaacgacctcacacgggtcccagagtgcctgtataccctgcctagtctaaggaggctcaacctgtcaagcaatcagattaccgagctaagcctttgcattgaccagtgggtacacgtggaaacattgaacctatctcggaaccagctgactagcctacccagtgccatttgtaagctctccaagctgaagaaactttacctcaattccaacaagttagactttgatggcctaccctcaggaattggaaagcttactaatctggaggagttcatggcagccaataataatctggagcttgtaccagagagcctttgccgctgccccaaactgaggaagctagttctgaacaagaaccatctcgtcacccttccagaagccattcacttcctgactgaaatcgaggtgctcgacgtgagggaaaatccaaacctggttatgcctcctaagcctgccgaccgagcagccgagtggtacaacatagactttagcctgcagaatcagcttaggcttgctggcgcttcccccgcaacagtggcggccgctgctgccggttccggtcctaaggacccaatggcgcgcaaaatgcgccttagacggaggaaggactctgctcaagacgatcaggccaagcaagtcctgaaaggtatgagcgatgttgcacaggagaaaaataaaaagcaggaagagtccgccgacgcgcgtgcccccagcggaaaggtgagacgctgggatcagggcctcgaaaaaccacgcctcgattactctgagttttttactgaggacgtgggacagttacctgggctcactatctggcaaatcgagaactttgttcctgtacttgtcgaagaggccttccatggcaaattttatgaagccgattgttatattgtcctaaaaacgttccttgacgactctgggtccctgaattgggagatatattactggatcgggggagaagcaactctggacaaaaaagcttgttctgctatccacgcagtgaacctacgtaattacctgggtgccgaatgtagaacggtcagggaggagatgggcgatgagtcggaggaattcctccaggtctttgacaacgacatctcctatattgaggggggcaccgcatctggcttttacaccgtggaggatacgcattacgttactcgaatgtacagagtctatggaaaaaagaatatcaaactggaacctgtgcctctgaagggtacatctctggatccccgctttgtgttcctcctggatcgtggcctggacatatatgtctggcgcggagcacaggcaaccctcagttccactactaaagcacgactgttcgcagagaagatcaacaagaacgagagaaagggtaaagccgaaattaccctgttggtacagggacaagagctacccgaattctgggaggcacttggtggggagccctccgagatcaagaaacacgttcccgaggatttttggcctccccagccaaagctttataaagtgggactcgggctcggctacttagagcttcctcagattaactacaagctctccgtcgaacataagcagaggccgaaggtcgaactaatgccacgcatgcggctgctgcagtccctcttggacaccaggtgtgtttatatcctggactgttggagtgacgttttcatttggctggggcgcaaaagccctcggctcgtgagagcagccgccctgaaactgggccaggagctgtgcggtatgctgcacaggccaagacacgctacagtgagcaggtccctggagggaacggaggcccaagtttttaaggctaaatttaagaactgggatgacgtcttgacagtcgactacacacggaacgctgaggcagtcctgcagtcgccaggcctgagtggtaaggtaaagcgtgacgcggagaagaaagaccaaatgaaggcagacctgaccgccttgttcctgcccaggcagcctcccatgagtctggccgaggccgaacaactgatggaagagtggaacgaggaccttgacggaatggaaggctttgtgctggagggtaaaaaattcgctcgtttacccgaagaggaatttggccacttctacacacaggactgttatgtgtttttgtgtcgctactgggtccctgttgaatacgaagaggaagaaaaaaaggaagataaagaggagaaagccgagggcaaggaaggcgaggaggccaccgcagaagcagaggagaagcaaccagaggaagattttcagtgtatcgtctatttctggcaaggtagggaggctagtaatatgggctggctgaccttcaccttttctctccaaaagaagtttgaatctctctttcccggcaagttagaggttgtgcggatgacccagcagcaagagaacccaaagtttttatcccatttcaaaaggaagttcatcattcatcgcgggaagaggaaggccgtgcaaggcgcccagcaaccttcattgtaccagattcggaccaacggtagcgccctgtgcacccggtgtattcagattaacactgatagctccctgttaaactccgagttctgtttcattttgaaagtcccatttgagagtgaagacaatcagggtatcgtctacgcctgggttggtcgtgcctccgatcccgacgaggccaaactggccgaagatattttaaatacaatgttcgacacatcatatagtaaacaggtgatcaacgaaggcgaagaaccagagaatttcttttgggtcggcatcggtgctcagaagccctacgatgatgatgcagagtacatgaaacacactagactcttccggtgcagcaatgaaaaagggtatttcgctgtgacagaaaagtgttccgacttctgccaggacgaccttgcagacgacgatatcatgctgttggataatggccaggaggtgtacatgtgggtcggaactcagacttcccaggttgaaataaagttgtcactcaaggcctgccaggtctacatccaacacatgaggtccaaggaacatgaacggccaagaaggctgaggctcgttaggaagggaaacgagcagcatgccttcacaagatgcttccacgcttggtctgctttctgtaaggccctggcatag

SEQ ID NO: 90092 - DNA, 3552 bp, Artificial Sequence
  derived and/or modified sequence
atgacctccctgagatggcttaaattgaatcgtactgggctgtgttatctgcccgaggaactcgcagcgctgcagaagttggagcacctcagtgtctcacacaacaaccttacgacccttcacggagaactatcgtccttaccctcgttgagggccattgtggctagagcaaactcgctgaaaaattcgggcgtgcctgatgacatcttcaagttggatgatctgtccgtccttgacctctctcacaaccaactgactgaatgccccagggagctggaaaacgccaagaacatgctggtcctgaatctgtctcacaatcggcagctgcccgcaatgacagccttgcagaccctccacttgcggagtacccagcgaacgcaaagcaacttacctacctctctggaaggcctgtctaaccttgctgatgtggacctcagctgtaatgatctgacaagagtgcctgaatgcctttacactctgcccagcctccgacgtctgaatctgtccagcaaccagattaccgaactttcactctgcattgatcagtgggtgcatgtggaaaccctcaatttatcaaggaatcagctcacttccctgccttcagctatttgcaaattgtctaaactgaagaaactctatcttaattcaaacaaactcgacttcgatggcctcccttccggtattggcaagctgaccaatctggaggaatttatggcagccaataacaacctggaactggtgcccgaatcactgtgtcggtgtcccaaactaagaaaacttgtgcttaacaagaaccacctcgttacactgccagaggccatccattttctcaccgaaatagaagttctggatgtgcgcgaaaaccccaaccttgtgatgccacctaaaccagccgacagagctgcagagtggtacaatatcgacttctccctccaaaatcaactgcgactagctggggctagtcctgcaactgttgctgctgcggcagccggatccggcccaaaggacccaatggccagaaaaatgcgcctgcgccgaaggaaggactccgcgcaggacgaccaggctaaacaggtcctgaagggtatgtctgatgtcgcccaggagaagaataagaagcaggaggaaagcgccgacgccagagcaccctctggcaaagtgcggaggtgggaccagggcctggagaaacccaggcttgactattctgaatttttcactgaagatgtcggtcagctgccgggattgacaatttggcagatcgaaaattttgtgcccgtgctcgtcgaggaagcgttccacgggaagttctatgaagccgattgttacattgtcctcaagacattcctggacgactccggcagtctcaactgggaaatttactactggatcggcggtgaggccactcttgataagaaagcctgtagcgctatccacgctgtgaatctccgcaactatctgggggcagaatgccgcacagtccgcgaggaaatgggagatgagagcgaagagtttcttcaggtcttcgacaatgatatttcctacattgaagggggaaccgcaagcggcttttataccgtggaggatacacattatgtgactcgcatgtatcgagtctacggaaaaaagaacatcaaactggaacctgtcccacttaaaggaacaagcctggaccctcgctttgtgtttctgctagacagagggttagacatttatgtttggaggggcgcacaggctaccctttctagcaccaccaaagcgaggttgtttgctgaaaagatcaacaagaacgagaggaaaggcaaagccgaaatcaccctccttgtccagggacaggagctgccagagttctgggaggccttaggcggtgaaccatcagagattaaaaaacatgttcccgaggacttttggccaccacagccaaagctttataaggtaggcctgggcctcggctacctagagcttccccagatcaattataagttgagtgtagagcacaagcagagacccaaggtggaattgatgccccgtatgaggcttctccagagtctcttagacaccagatgtgtgtacattctggactgttggagcgacgtctttatctggctagggaggaaaagccctcggctggttcgcgctgccgcactgaagctcggacaggagttatgcggcatgctacaccgccctcgccacgcaaccgtgagccgcagtcttgaaggcactgaagcgcaagtctttaaggccaagtttaagaactgggatgatgtcttgacagtcgactatactcggaacgctgaagcagttcttcagtctccaggcctgtctggaaaagtgaaacgggacgcggagaagaaggaccagatgaaggccgacctcactgcccttttccttcctagacagcctcccatgtcccttgcggaggcggagcagcttatggaagagtggaatgaggacctggatggaatggaaggctttgttctggaagggaagaagtttgctcgtctgccagaagaggaattcggacacttctacacgcaggattgttatgtattcctgtgtaggtattgggtacctgttgaatacgaggaggaggagaagaaggaagataaagaagaaaaagctgaggggaaggagggggaagaggccacagctgaggcagaggagaagcaaccggaagaggactttcaatgtattgtgtatttctggcaggggagagaggcatccaatatgggttggcttacatttacatttagtcttcagaaaaaatttgaatctctttttcctggcaagctggaggtggtgcgtatgactcaacagcaggagaaccctaagttcttatcccatttcaagcggaaattcattattcacagagggaaacgaaaagctgtgcagggagcccagcagccctctttgtaccaaattcggacaaatggttccgcactatgtacaaggtgtatacagataaacactgattcttccctgctcaattcagagttctgttttatcctcaaggttccgtttgaatccgaggataatcaggggattgtgtatgcctgggttggacgagcctctgaccctgacgaggccaagctcgctgaggatattttgaacacaatgtttgacacttcctacagtaagcaagtgatcaacgagggggaagagccggagaacttcttctgggttgggatcggagctcagaagccttatgacgacgatgccgagtacatgaagcacacaaggctgtttagatgctcgaacgaaaaggggtatttcgccgtgaccgaaaagtgttccgacttttgtcaggacgacctggctgacgacgacatcatgctgcttgataacggacaggaagtgtatatgtgggtgggcacacagacgtctcaggtcgaaattaagctctccttgaaagcatgtcaagtttatatccagcatatgcggagtaaggaacatgagagacccagacggctgcgactggtccgcaagggcaatgagcagcatgcatttactcggtgctttcatgcctggtcggccttctgcaaagctctggcgtag

SEQ ID NO: 90093 - DNA, 3552 bp, Artificial Sequence
  derived and/or modified sequence
atgaccagcctgagatggctgaagctgaacagaaccggcctgtgctacctgcccgaggagctggccgccctgcagaagctggagcacctgagcgtgagccacaacaacctgaccaccctgcacggcgagctgagcagcctgcccagcctgagagccatcgtggccagagccaacagcctgaagaacagcggcgtgcccgacgacatcttcaagctggacgacctgagcgtgctggacctgagccacaaccagctgaccgagtgccccagagagctggagaacgccaagaacatgctggtgctgaacctgagccacaacagacagctgcccgccatgaccgccctgcagaccctgcacctgagaagcacccagagaacccagagcaacctgcccaccagcctggagggcctgagcaacctggccgacgtggacctgagctgcaacgacctgaccagagtgcccgagtgcctgtacaccctgcccagcctgagaagactgaacctgagcagcaaccagatcaccgagctgagcctgtgcatcgaccagtgggtgcacgtggagaccctgaacctgagcagaaaccagctgaccagcctgcccagcgccatctgcaagctgagcaagctgaagaagctgtacctgaacagcaacaagctggacttcgacggcctgcccagcggcatcggcaagctgaccaacctggaggagttcatggccgccaacaacaacctggagctggtgcccgagagcctgtgcagatgccccaagctgagaaagctggtgctgaacaagaaccacctggtgaccctgcccgaggccatccacttcctgaccgagatcgaggtgctggacgtgagagagaaccccaacctggtgatgccccccaagcccgccgacagagccgccgagtggtacaacatcgacttcagcctgcagaaccagctgagactggccggcgccagccccgccaccgtggccgccgccgccgccggcagcggccccaaggaccccatggccagaaagatgagactgagaagaagaaaggacagcgcccaggacgaccaggccaagcaggtgctgaagggcatgagcgacgtggcccaggagaagaacaagaagcaggaggagagcgccgacgccagagcccccagcggcaaggtgagaagatgggaccagggcctggagaagcccagactggactacagcgagttcttcaccgaggacgtgggccagctgcccggcctgaccatctggcagatcgagaacttcgtgcccgtgctggtggaggaggccttccacggcaagttctacgaggccgactgctacatcgtgctgaagaccttcctggacgacagcggcagcctgaactgggagatctactactggatcggcggcgaggccaccctggacaagaaggcctgcagcgccatccacgccgtgaacctgagaaactacctgggcgccgagtgcagaaccgtgagagaggagatgggcgacgagagcgaggagttcctgcaggtgttcgacaacgacatcagctacatcgagggcggcaccgccagcggcttctacaccgtggaggacacccactacgtgaccagaatgtacagagtgtacggcaagaagaacatcaagctggagcccgtgcccctgaagggcaccagcctggaccccagattcgtgttcctgctggacagaggcctggacatctacgtgtggagaggcgcccaggccaccctgagcagcaccaccaaggccagactgttcgccgagaagatcaacaagaacgagagaaagggcaaggccgagatcaccctgctggtgcagggccaggagctgcccgagttctgggaggccctgggcggcgagcccagcgagatcaagaagcacgtgcccgaggacttctggcccccccagcccaagctgtacaaggtgggcctgggcctgggctacctggagctgccccagatcaactacaagctgagcgtggagcacaagcagagacccaaggtggagctgatgcccagaatgagactgctgcagagcctgctggacaccagatgcgtgtacatcctggactgctggagcgacgtgttcatctggctgggcagaaagagccccagactggtgagagccgccgccctgaagctgggccaggagctgtgcggcatgctgcacagacccagacacgccaccgtgagcagaagcctggagggcaccgaggcccaggtgttcaaggccaagttcaagaactgggacgacgtgctgaccgtggactacaccagaaacgccgaggccgtgctgcagagccccggcctgagcggcaaggtgaagagagacgccgagaagaaggaccagatgaaggccgacctgaccgccctgttcctgcccagacagccccccatgagcctggccgaggccgagcagctgatggaggagtggaacgaggacctggacggcatggagggcttcgtgctggagggcaagaagttcgccagactgcccgaggaggagttcggccacttctacacccaggactgctacgtgttcctgtgcagatactgggtgcccgtggagtacgaggaggaggagaagaaggaggacaaggaggagaaggccgagggcaaggagggcgaggaggccaccgccgaggccgaggagaagcagcccgaggaggacttccagtgcatcgtgtacttctggcagggcagagaggccagcaacatgggctggctgaccttcaccttcagcctgcagaagaagttcgagagcctgttccccggcaagctggaggtggtgagaatgacccagcagcaggagaaccccaagttcctgagccacttcaagagaaagttcatcatccacagaggcaagagaaaggccgtgcagggcgcccagcagcccagcctgtaccagatcagaaccaacggcagcgccctgtgcaccagatgcatccagatcaacaccgacagcagcctgctgaacagcgagttctgcttcatcctgaaggtgcccttcgagagcgaggacaaccagggcatcgtgtacgcctgggtgggcagagccagcgaccccgacgaggccaagctggccgaggacatcctgaacaccatgttcgacaccagctacagcaagcaggtgatcaacgagggcgaggagcccgagaacttcttctgggtgggcatcggcgcccagaagccctacgacgacgacgccgagtacatgaagcacaccagactgttcagatgcagcaacgagaagggctacttcgccgtgaccgagaagtgcagcgacttctgccaggacgacctggccgacgacgacatcatgctgctggacaacggccaggaggtgtacatgtgggtgggcacccagaccagccaggtggagatcaagctgagcctgaaggcctgccaggtgtacatccagcacatgagaagcaaggagcacgagagacccagaagactgagactggtgagaaagggcaacgagcagcacgccttcaccagatgcttccacgcctggagcgccttctgcaaggccctggcctag

SEQ ID NO: 90094 - DNA, 876 bp, Artificial Sequence
  derived and/or modified sequence
atgatcggcgacggcgaggactacttcctgagcctgttcggcgacagcaagaagctgaccgcccacagcaactacacccagaagaccctgaagtacttcagcatgatcctggaggaggtgggccagttcaccagcagcagcctgggcgacgtggagatcgccgaggtgaacgtgaagggcctgttcgtgaagctgatcaacagcagcctggacaaggagatggccatcggcgaccacatcctgcagcagaacgtgaacggccagaccatcagcctgtacagattcctgcccaacatcgtgatgcaggccaacagcaccgtgaccgtgtgggccgccgccagcgaggccaagcaccagccccccagcgacttcctgtggaaggagcaggacaagttcagagccagccccgactgcatcaccatcctgtgcaagcccaacggccaggccatcgcctggtacacccccatccactggaagcaggcctgggagaagctggacgccgacgtggagttcaacagatgcagcgtggtgagccccaccttcagaaagagagtgttccagtggaccgccagcaccgccaccatcaccaaggagaagcaggaccagcccaagaaggacatcagcaactaccaggtggagcaggcccaggtgctgctgaagagagagaaggagatcccccccaccgtgttccccaacagaagcccctggtgccagaacccctacgtgagcgcccacccctactgccccctgatcgagccccacaacaccagcaccgccggcggcagactggacagacagcccagaaccagaagcaccagacccaacagagccagcggcagcaagaagaagaagaccagcgagagccagaagcagtag

SEQ ID NO: 90095 - DNA, 876 bp, Artificial Sequence
  derived and/or modified sequence
atgatcggagacggagaagattactttctgagtctgttcggagactctaagaaactgaccgctcatagcaactacactcagaagacactaaaatacttctctatgattctggaggaagtgggacaattcacctcatcttcacttggagatgttgagatcgccgaggtcaatgtgaaagggctgttcgtcaaactgataaactcaagtctcgataaggagatggctatcggggatcacattctccagcagaatgtgaacgggcagacgatcagtctgtatcggtttctccctaacattgtcatgcaagccaattctacagtaaccgtctgggccgctgcctcagaagccaagcaccagcccccatctgatttcctctggaaggaacaagacaagtttcgtgcaagtccggactgtatcaccatactctgtaagcccaacgggcaagctattgcctggtacacccctatacattggaaacaagcctgggaaaagctggatgcggatgtagaattcaacagatgctctgttgttagccctacattcagaaagagagtctttcagtggaccgcttccactgctactattactaaggaaaaacaggaccagccgaaaaaggacatttccaactaccaggtggagcaggcacaagtgttgttaaagcgggagaaggagattcctccaaccgtgtttccaaaccggtccccatggtgtcagaacccttacgtcagcgcgcatccttactgtcccctaatagagccccataatacgtcaacggctggcgggaggctagaccgacaaccccgtacccgctccacgcgccctaatcgtgcttccggtagtaaaaaaaagaagacaagcgaatcccaaaagcagtag

SEQ ID NO: 90096 - DNA, 876 bp, Artificial Sequence
  derived and/or modified sequence
atgattggagatggagaggactacttcctgagcctgtttggagacagcaagaagctgacagcccacagcaactacacccagaagaccctgaagtacttctccatgatcctggaggaggtgggccagttcaccagcagcagcctgggagatgtggagattgctgaggtgaatgtgaagggcctgtttgtgaagctgatcaacagcagcctggacaaggagatggccatcggggaccacatcctgcagcagaatgtgaatggccagaccatcagcctgtaccgcttcctgcccaacatcgtgatgcaggccaacagcacagtgacagtgtgggccgccgccagcgaggccaagcaccagccccccagcgacttcctgtggaaggagcaggacaagttccgggccagcccagactgcatcaccatcctgtgcaagcccaacggccaggccatcgcctggtacacccccatccactggaagcaggcctgggagaagctggatgctgatgtggagttcaaccgctgcagcgtggtgagccccaccttcaggaagagggtcttccagtggacagccagcacagccaccatcaccaaggagaagcaggaccagcccaagaaggacatcagcaactaccaggtggagcaggcccaggtgctgctgaagcgggagaaggagatcccccccaccgtcttccccaacagaagcccctggtgccagaacccctacgtgtctgcccacccctactgccccctgattgagccccacaacaccagcacagctgggggccgcctggaccggcagcccaggaccaggagcacccggcccaacagagccagcggcagcaagaagaagaagaccagcgagagccagaagcagtag

SEQ ID NO: 90097 - DNA, 876 bp, Artificial Sequence
  derived and/or modified sequence
atgatcggcgacggcgaggactacttcctgagcctgttcggcgacagtaagaagctcaccgcccattcaaactacacacagaagacccttaaatacttttcaatgatcttagaggaggttgggcagtttacctcctcttctttaggtgacgtggagatcgccgaggtgaatgtgaagggactctttgtgaaattaataaacagctccctggacaaagaaatggctattggagatcatattctgcaacaaaatgtcaacggacagacaatcagcctttaccggttcttaccgaatattgttatgcaagccaactccactgtgaccgtgtgggctgctgcgagcgaggccaagcaccagcctcctagcgacttcctttggaaagagcaggataagtttcgggccagccccgattgcattacaatattgtgcaaacccaacggacaggctatcgcctggtatacacctatacattggaagcaggcttgggagaaattggatgcagatgtggagtttaatcgctgctctgttgttagcccgacatttaggaaaagagttttccagtggacagccagtaccgctactatcacaaaggaaaagcaggaccagcctaagaaagatattagtaattaccaggtggagcaagcacaggtcctgctgaaacgcgagaaagagattcctcctaccgtttttccaaaccggtccccatggtgccagaacccctacgtgtccgcccatccctactgcccactcatagagccccacaacacctccacagcggggggacgattagaccggcagccacgcactcggagcacaagacctaatcgagcctctggaagcaaaaagaaaaaaacttctgagtcgcagaagcagtag

SEQ ID NO: 90098 - DNA, 876 bp, Artificial Sequence
  derived and/or modified sequence
atgatcggtgacggtgaggactacttcctatctttgtttggcgactcaaaaaaactgaccgcccactccaattatactcaaaagacgttgaaatactttagcatgatcttagaagaggtgggacaatttactagctcctccctcggcgatgtggaaatcgctgaagtcaacgtgaagggattgttcgtgaagctcatcaactcctcactggataaggagatggctatcggcgatcacattttgcagcagaatgtcaatggacagaccatcagcctctacagatttttacccaatattgtgatgcaggctaactccaccgtcaccgtctgggcagctgcaagcgaagccaagcatcagccaccctctgatttcctctggaaagaacaggacaaattcagagccagcccagattgtatcaccattctttgcaagccaaacggtcaggcaatcgcatggtatactccgatccattggaagcaggcttgggaaaagcttgacgccgatgtcgaattcaatagatgtagcgtggtgagtccaacattcagaaaacgcgtcttccaatggacggccagtactgctactattaccaaagaaaagcaggaccaacctaaaaaggacatcagtaactatcaggtagaacaggcacaggtactgctcaaaagggagaaggagatccccccaacagttttccctaatagaagtccatggtgtcagaatccttatgtcagtgctcatccatattgtcccctcatcgaaccacataatacctcgacagccggtggacgtcttgatcggcagcctcgcacaagatctaccaggcccaatagggcaagtggctctaagaagaaaaaaacgtctgaaagtcagaaacagtag

SEQ ID NO: 90099 - protein, 1320 aa, Artificial Sequence
  derived and/or modified sequence
MQDDSIEASTSISQLLRESYLAETRHRGNNERSRAEPSSNPCHFGSPSGAAEGGGGQDDLPDLSAFLSQEELDESVNLARLAINYDPLEKADETQARKRLSPDQMKHSPNLSFEPNFCQDNPRSPTSSKESPQEAKRPQYCSETQSKKVFLNKAADFIEELSSLFKSHSSKRIRPRACKNHKSKLESQNKVMQENSSSFSDLSERRERSSVPIPIPADTRDNEVNHALEQQEAKRREAEQAASEAAGGDTTPGSSPSSLYYEEPLGQPPRFTQKLRSREVPEGTRVQLDCIVVGIPPPQVRWYCEGKELENSPDIHIVQAGNLHSLTIAEAFEEDTGRYSCFASNIYGTDSTSAEIYIEGVSSSDSEGDPNKEEMNRIQKPNEVSSPPTTSAVIPPAVPQAQHLVAQPRVATIQQCQSPTNYLQGLDGKPIIAAPVFTKMLQNLSASEGQLVVFECRVKGAPSPKVEWYREGTLIEDSPDFRILQKKPRSMAEPEEICTLVIAEVFAEDSGCFTCTASNKYGTVSSIAQLHVRGNEDLSNNGSLHSANSTTNLAAIEPQPSPPHSEPPSVEQPPKPKLEGVLVNHNEPRSSSRIGLRVHFNLPEDDKGSEASSEAGVVTTRQTRPDSFQERFNGQATKTPEPSSPVKEPPPVLAKPKLDSTQLQQLHNQVLLEQHQLQNPPPSSPKEFPFSMTVLNSNAPPAVTTSSKQVKAPSSQTFSLARPKYFFPSTNTTAATVAPSSSPVFTLSSTPQTIQRTVSKESLLVSHPSVQTKSPGGLSIQNEPLPPGPTEPTPPPFTFSIPSGNQFQPRCVSPIPVSPTSRIQNPVAFLSSVLPSLPAIPPTNAMGLPRSAPSMPSQGLAKKNTKSPQPVNDDNIRETKNAVIRDLGKKITFSDVRPNQQEYKISSFEQRLMNEIEFRLERTPVDESDDEIQHDEIPTGKCIAPIFDKRLKHFRVTEGSPVTFTCKIVGIPVPKVYWFKDGKQISKRNEHCKMRREGDGTCSLHIESTTSDDDGNYTIMAANPQGRISCSGHLMVQSLPIRSRLTSAGQSHRGRSRVQERDKEPLQERFFRPHFLQAPGDMVAHEGRLCRLDCKVSGLPPPELTWLLNGQPVLPDASHKMLVRETGVHSLLIDPLTQRDAGTYKCIATNKTGQNSFSLELSVVAKEVKKAPVILEKLQNCGVPEGHPVRLECRVIGMPPPVFYWKKDNETIPCTRERISMHQDTTGYACLLIQPAKKSDAGWYTLSAKNEAGIVSCTARLDIYAQWHHQIPPPMSVRPSGSRYGSLTSKGLDIFSAFSSMESTMVYSCSSRSVVESDEL

SEQ ID NO: 90100 - protein, 507 aa, Artificial Sequence
  derived and/or modified sequence
MQDDSIEASTSISQLLRESYLAETRHRGNNERSRAEPSSNPCHFGSPSGAAEGGGGQDDLPDLSAFLSQEELDESVNLARLAINYDPLEKADETQARKRLSPDQMKHSPNLSFEPNFCQDNPRSPTSSKESPQEAKRPQYCSETQSKKVFLNKAADFIEELSSLFKSHSSKRIRPRACKNHKSKLESQNKVMQENSSSFSDLSERRERSSVPIPIPADTRDNEVNHALEQQEAKRREAEQAASEAAGGDTTPGSSPSSLYYEEPLGQPPRFTQKLRSREVPEGTRVQLDCIVVGIPPPQVRWYCEGKELENSPDIHIVQAGNLHSLTIAEAFEEDTGRYSCFASNIYGTDSTSAEIYIEGVSSSDSEGDPNKEEMNRIQKPNEVSSPPTTSAVIPPAVPQAQHLVAQPRVATIQQCQSPTNYLQGLDGKPIIAAPVFTKMLQNLSASEGQLVVFECRVKGAPSPKVEWYREGTLIEDSPDFRILQKKPRSMAEPGKDDFNFNLLVYE

SEQ ID NO: 90101 - protein, 1320 aa, Artificial Sequence
  derived and/or modified sequence
MQDDSIEASTSISQLLRESYLAETRHRGNNERSRAEPSSNPCHFGSPSGAAEGGGGQDDLPDLSAFLSQEELDESVNLARLAINYDPLEKADETQARKRLSPDQMKHSPNLSFEPNFCQDNPRSPTSSKESPQEAKRPQYCSETQSKKVFLNKAADFIEELSSLFKSHSSKRIRPRACKNHKSKLESQNKVMQENSSSFSDLSERRERSSVPIPIPADTRDNEVNHALEQQEAKRREAEQAASEAAGGDTTPGSSPSSLYYEEPLGQPPRFTQKLRSREVPEGTRVQLDCIVVGIPPPQVRWYCEGKELENSPDIHIVQAGNLHSLTIAEAFEEDTGRYSCFASNIYGTDSTSAEIYIEGVSSSDSEGDPNKEEMNRIQKPNEVSSPPTTSAVIPPAVPQAQHLVAQPRVATIQQCQSPTNYLQGLDGKPIIAAPVFTKMLQNLSASEGQLVVFECRVKGAPSPKVEWYREGTLIEDSPDFRILQKRPVCMEHIEEICTLVIAEVFAEDSGCFTCTASNKYGTVSSIAQLHVRGNEDLSNNGSLHSANSTTNLAAIEPQPSPPHSEPPSVEQPPKPKLEGVLVNHNEPRSSSRIGLRVHFNLPEDDKGSEASSEAGVVTTRQTRPDSFQERFNGQATKTPEPSSPVKEPPPVLAKPKLDSTQLQQLHNQVLLEQHQLQNPPPSSPKEFPFSMTVLNSNAPPAVTTSSKQVKAPSSQTFSLARPKYFFPSTNTTAATVAPSSSPVFTLSSTPQTIQRTVSKESLLVSHPSVQTKSPGGLSIQNEPLPPGPTEPTPPPFTFSIPSGNQFQPRCVSPIPVSPTSRIQNPVAFLSSVLPSLPAIPPTNAMGLPRSAPSMPSQGLAKKNTKSPQPVNDDNIRETKNAVIRDLGKKITFSDVRPNQQEYKISSFEQRLMNEIEFRLERTPVDESDDEIQHDEIPTGKCIAPIFDKRLKHFRVTEGSPVTFTCKIVGIPVPKVYWFKDGKQISKRNEHCKMRREGDGTCSLHIESTTSDDDGNYTIMAANPQGRISCSGHLMVQSLPIRSRLTSAGQSHRGRSRVQERDKEPLQERFFRPHFLQAPGDMVAHEGRLCRLDCKVSGLPPPELTWLLNGQPVLPDASHKMLVRETGVHSLLIDPLTQRDAGTYKCIATNKTGQNSFSLELSVVAKEVKKAPVILEKLQNCGVPEGHPVRLECRVIGMPPPVFYWKKDNETIPCTRERISMHQDTTGYACLLIQPAKKSDAGWYTLSAKNEAGIVSCTARLDIYAQWHHQIPPPMSVRPSGSRYGSLTSKGLDIFSAFSSMESTMVYSCSSRSVVESDEL

SEQ ID NO: 90102 - DNA, 3963 bp, Artificial Sequence
  derived and/or modified sequence
atgcaggacgacagcatcgaggccagcaccagcatcagccagctgctgagagagagctacctggccgagaccagacacagaggcaacaacgagagaagcagagccgagcccagcagcaacccctgccacttcggcagccccagcggcgccgccgagggcggcggcggccaggacgacctgcccgacctgagcgccttcctgagccaggaggagctggacgagagcgtgaacctggccagactggccatcaactacgaccccctggagaaggccgacgagacccaggccagaaagagactgagccccgaccagatgaagcacagccccaacctgagcttcgagcccaacttctgccaggacaaccccagaagccccaccagcagcaaggagagcccccaggaggccaagagaccccagtactgcagcgagacccagagcaagaaggtgttcctgaacaaggccgccgacttcatcgaggagctgagcagcctgttcaagagccacagcagcaagagaatcagacccagagcctgcaagaaccacaagagcaagctggagagccagaacaaggtgatgcaggagaacagcagcagcttcagcgacctgagcgagagaagagagagaagcagcgtgcccatccccatccccgccgacaccagagacaacgaggtgaaccacgccctggagcagcaggaggccaagagaagagaggccgagcaggccgccagcgaggccgccggcggcgacaccacccccggcagcagccccagcagcctgtactacgaggagcccctgggccagccccccagattcacccagaagctgagaagcagagaggtgcccgagggcaccagagtgcagctggactgcatcgtggtgggcatcccccccccccaggtgagatggtactgcgagggcaaggagctggagaacagccccgacatccacatcgtgcaggccggcaacctgcacagcctgaccatcgccgaggccttcgaggaggacaccggcagatacagctgcttcgccagcaacatctacggcaccgacagcaccagcgccgagatctacatcgagggcgtgagcagcagcgacagcgagggcgaccccaacaaggaggagatgaacagaatccagaagcccaacgaggtgagcagcccccccaccaccagcgccgtgatcccccccgccgtgccccaggcccagcacctggtggcccagcccagagtggccaccatccagcagtgccagagccccaccaactacctgcagggcctggacggcaagcccatcatcgccgcccccgtgttcaccaagatgctgcagaacctgagcgccagcgagggccagctggtggtgttcgagtgcagagtgaagggcgcccccagccccaaggtggagtggtacagagagggcaccctgatcgaggacagccccgacttcagaatcctgcagaagaagcccagaagcatggccgagcccgaggagatctgcaccctggtgatcgccgaggtgttcgccgaggacagcggctgcttcacctgcaccgccagcaacaagtacggcaccgtgagcagcatcgcccagctgcacgtgagaggcaacgaggacctgagcaacaacggcagcctgcacagcgccaacagcaccaccaacctggccgccatcgagccccagcccagccccccccacagcgagccccccagcgtggagcagccccccaagcccaagctggagggcgtgctggtgaaccacaacgagcccagaagcagcagcagaatcggcctgagagtgcacttcaacctgcccgaggacgacaagggcagcgaggccagcagcgaggccggcgtggtgaccaccagacagaccagacccgacagcttccaggagagattcaacggccaggccaccaagacccccgagcccagcagccccgtgaaggagcccccccccgtgctggccaagcccaagctggacagcacccagctgcagcagctgcacaaccaggtgctgctggagcagcaccagctgcagaaccccccccccagcagccccaaggagttccccttcagcatgaccgtgctgaacagcaacgccccccccgccgtgaccaccagcagcaagcaggtgaaggcccccagcagccagaccttcagcctggccagacccaagtacttcttccccagcaccaacaccaccgccgccaccgtggcccccagcagcagccccgtgttcaccctgagcagcaccccccagaccatccagagaaccgtgagcaaggagagcctgctggtgagccaccccagcgtgcagaccaagagccccggcggcctgagcatccagaacgagcccctgccccccggccccaccgagcccacccccccccccttcaccttcagcatccccagcggcaaccagttccagcccagatgcgtgagccccatccccgtgagccccaccagcagaatccagaaccccgtggccttcctgagcagcgtgctgcccagcctgcccgccatcccccccaccaacgccatgggcctgcccagaagcgcccccagcatgcccagccagggcctggccaagaagaacaccaagagcccccagcccgtgaacgacgacaacatcagagagaccaagaacgccgtgatcagagacctgggcaagaagatcaccttcagcgacgtgagacccaaccagcaggagtacaagatcagcagcttcgagcagagactgatgaacgagatcgagttcagactggagagaacccccgtggacgagagcgacgacgagatccagcacgacgagatccccaccggcaagtgcatcgcccccatcttcgacaagagactgaagcacttcagagtgaccgagggcagccccgtgaccttcacctgcaagatcgtgggcatccccgtgcccaaggtgtactggttcaaggacggcaagcagatcagcaagagaaacgagcactgcaagatgagaagagagggcgacggcacctgcagcctgcacatcgagagcaccaccagcgacgacgacggcaactacaccatcatggccgccaacccccagggcagaatcagctgcagcggccacctgatggtgcagagcctgcccatcagaagcagactgaccagcgccggccagagccacagaggcagaagcagagtgcaggagagagacaaggagcccctgcaggagagattcttcagaccccacttcctgcaggcccccggcgacatggtggcccacgagggcagactgtgcagactggactgcaaggtgagcggcctgcccccccccgagctgacctggctgctgaacggccagcccgtgctgcccgacgccagccacaagatgctggtgagagagaccggcgtgcacagcctgctgatcgaccccctgacccagagagacgccggcacctacaagtgcatcgccaccaacaagaccggccagaacagcttcagcctggagctgagcgtggtggccaaggaggtgaagaaggcccccgtgatcctggagaagctgcagaactgcggcgtgcccgagggccaccccgtgagactggagtgcagagtgatcggcatgcccccccccgtgttctactggaagaaggacaacgagaccatcccctgcaccagagagagaatcagcatgcaccaggacaccaccggctacgcctgcctgctgatccagcccgccaagaagagcgacgccggctggtacaccctgagcgccaagaacgaggccggcatcgtgagctgcaccgccagactggacatctacgcccagtggcaccaccagatccccccccccatgagcgtgagacccagcggcagcagatacggcagcctgaccagcaagggcctggacatcttcagcgccttcagcagcatggagagcaccatggtgtacagctgcagcagcagaagcgtggtggagagcgacgagctgtag

SEQ ID NO: 90103 - DNA, 1524 bp, Artificial Sequence
  derived and/or modified sequence
atgcaggacgacagcatcgaggccagcaccagcatcagccagctgctgagagagagctacctggccgagaccagacacagaggcaacaacgagagaagcagagccgagcccagcagcaacccctgccacttcggcagccccagcggcgccgccgagggcggcggcggccaggacgacctgcccgacctgagcgccttcctgagccaggaggagctggacgagagcgtgaacctggccagactggccatcaactacgaccccctggagaaggccgacgagacccaggccagaaagagactgagccccgaccagatgaagcacagccccaacctgagcttcgagcccaacttctgccaggacaaccccagaagccccaccagcagcaaggagagcccccaggaggccaagagaccccagtactgcagcgagacccagagcaagaaggtgttcctgaacaaggccgccgacttcatcgaggagctgagcagcctgttcaagagccacagcagcaagagaatcagacccagagcctgcaagaaccacaagagcaagctggagagccagaacaaggtgatgcaggagaacagcagcagcttcagcgacctgagcgagagaagagagagaagcagcgtgcccatccccatccccgccgacaccagagacaacgaggtgaaccacgccctggagcagcaggaggccaagagaagagaggccgagcaggccgccagcgaggccgccggcggcgacaccacccccggcagcagccccagcagcctgtactacgaggagcccctgggccagccccccagattcacccagaagctgagaagcagagaggtgcccgagggcaccagagtgcagctggactgcatcgtggtgggcatcccccccccccaggtgagatggtactgcgagggcaaggagctggagaacagccccgacatccacatcgtgcaggccggcaacctgcacagcctgaccatcgccgaggccttcgaggaggacaccggcagatacagctgcttcgccagcaacatctacggcaccgacagcaccagcgccgagatctacatcgagggcgtgagcagcagcgacagcgagggcgaccccaacaaggaggagatgaacagaatccagaagcccaacgaggtgagcagcccccccaccaccagcgccgtgatcccccccgccgtgccccaggcccagcacctggtggcccagcccagagtggccaccatccagcagtgccagagccccaccaactacctgcagggcctggacggcaagcccatcatcgccgcccccgtgttcaccaagatgctgcagaacctgagcgccagcgagggccagctggtggtgttcgagtgcagagtgaagggcgcccccagccccaaggtggagtggtacagagagggcaccctgatcgaggacagccccgacttcagaatcctgcagaagaagcccagaagcatggccgagcccggcaaggacgacttcaacttcaacctgctggtgtacgagtag

SEQ ID NO: 90104 - DNA, 3963 bp, Artificial Sequence
  derived and/or modified sequence
atgcaggacgacagcatcgaggccagcaccagcatcagccagctgctgagagagagctacctggccgagaccagacacagaggcaacaacgagagaagcagagccgagcccagcagcaacccctgccacttcggcagccccagcggcgccgccgagggcggcggcggccaggacgacctgcccgacctgagcgccttcctgagccaggaggagctggacgagagcgtgaacctggccagactggccatcaactacgaccccctggagaaggccgacgagacccaggccagaaagagactgagccccgaccagatgaagcacagccccaacctgagcttcgagcccaacttctgccaggacaaccccagaagccccaccagcagcaaggagagcccccaggaggccaagagaccccagtactgcagcgagacccagagcaagaaggtgttcctgaacaaggccgccgacttcatcgaggagctgagcagcctgttcaagagccacagcagcaagagaatcagacccagagcctgcaagaaccacaagagcaagctggagagccagaacaaggtgatgcaggagaacagcagcagcttcagcgacctgagcgagagaagagagagaagcagcgtgcccatccccatccccgccgacaccagagacaacgaggtgaaccacgccctggagcagcaggaggccaagagaagagaggccgagcaggccgccagcgaggccgccggcggcgacaccacccccggcagcagccccagcagcctgtactacgaggagcccctgggccagccccccagattcacccagaagctgagaagcagagaggtgcccgagggcaccagagtgcagctggactgcatcgtggtgggcatcccccccccccaggtgagatggtactgcgagggcaaggagctggagaacagccccgacatccacatcgtgcaggccggcaacctgcacagcctgaccatcgccgaggccttcgaggaggacaccggcagatacagctgcttcgccagcaacatctacggcaccgacagcaccagcgccgagatctacatcgagggcgtgagcagcagcgacagcgagggcgaccccaacaaggaggagatgaacagaatccagaagcccaacgaggtgagcagcccccccaccaccagcgccgtgatcccccccgccgtgccccaggcccagcacctggtggcccagcccagagtggccaccatccagcagtgccagagccccaccaactacctgcagggcctggacggcaagcccatcatcgccgcccccgtgttcaccaagatgctgcagaacctgagcgccagcgagggccagctggtggtgttcgagtgcagagtgaagggcgcccccagccccaaggtggagtggtacagagagggcaccctgatcgaggacagccccgacttcagaatcctgcagaagagacccgtgtgcatggagcacatcgaggagatctgcaccctggtgatcgccgaggtgttcgccgaggacagcggctgcttcacctgcaccgccagcaacaagtacggcaccgtgagcagcatcgcccagctgcacgtgagaggcaacgaggacctgagcaacaacggcagcctgcacagcgccaacagcaccaccaacctggccgccatcgagccccagcccagccccccccacagcgagccccccagcgtggagcagccccccaagcccaagctggagggcgtgctggtgaaccacaacgagcccagaagcagcagcagaatcggcctgagagtgcacttcaacctgcccgaggacgacaagggcagcgaggccagcagcgaggccggcgtggtgaccaccagacagaccagacccgacagcttccaggagagattcaacggccaggccaccaagacccccgagcccagcagccccgtgaaggagcccccccccgtgctggccaagcccaagctggacagcacccagctgcagcagctgcacaaccaggtgctgctggagcagcaccagctgcagaaccccccccccagcagccccaaggagttccccttcagcatgaccgtgctgaacagcaacgccccccccgccgtgaccaccagcagcaagcaggtgaaggcccccagcagccagaccttcagcctggccagacccaagtacttcttccccagcaccaacaccaccgccgccaccgtggcccccagcagcagccccgtgttcaccctgagcagcaccccccagaccatccagagaaccgtgagcaaggagagcctgctggtgagccaccccagcgtgcagaccaagagccccggcggcctgagcatccagaacgagcccctgccccccggccccaccgagcccacccccccccccttcaccttcagcatccccagcggcaaccagttccagcccagatgcgtgagccccatccccgtgagccccaccagcagaatccagaaccccgtggccttcctgagcagcgtgctgcccagcctgcccgccatcccccccaccaacgccatgggcctgcccagaagcgcccccagcatgcccagccagggcctggccaagaagaacaccaagagcccccagcccgtgaacgacgacaacatcagagagaccaagaacgccgtgatcagagacctgggcaagaagatcaccttcagcgacgtgagacccaaccagcaggagtacaagatcagcagcttcgagcagagactgatgaacgagatcgagttcagactggagagaacccccgtggacgagagcgacgacgagatccagcacgacgagatccccaccggcaagtgcatcgcccccatcttcgacaagagactgaagcacttcagagtgaccgagggcagccccgtgaccttcacctgcaagatcgtgggcatccccgtgcccaaggtgtactggttcaaggacggcaagcagatcagcaagagaaacgagcactgcaagatgagaagagagggcgacggcacctgcagcctgcacatcgagagcaccaccagcgacgacgacggcaactacaccatcatggccgccaacccccagggcagaatcagctgcagcggccacctgatggtgcagagcctgcccatcagaagcagactgaccagcgccggccagagccacagaggcagaagcagagtgcaggagagagacaaggagcccctgcaggagagattcttcagaccccacttcctgcaggcccccggcgacatggtggcccacgagggcagactgtgcagactggactgcaaggtgagcggcctgcccccccccgagctgacctggctgctgaacggccagcccgtgctgcccgacgccagccacaagatgctggtgagagagaccggcgtgcacagcctgctgatcgaccccctgacccagagagacgccggcacctacaagtgcatcgccaccaacaagaccggccagaacagcttcagcctggagctgagcgtggtggccaaggaggtgaagaaggcccccgtgatcctggagaagctgcagaactgcggcgtgcccgagggccaccccgtgagactggagtgcagagtgatcggcatgcccccccccgtgttctactggaagaaggacaacgagaccatcccctgcaccagagagagaatcagcatgcaccaggacaccaccggctacgcctgcctgctgatccagcccgccaagaagagcgacgccggctggtacaccctgagcgccaagaacgaggccggcatcgtgagctgcaccgccagactggacatctacgcccagtggcaccaccagatccccccccccatgagcgtgagacccagcggcagcagatacggcagcctgaccagcaagggcctggacatcttcagcgccttcagcagcatggagagcaccatggtgtacagctgcagcagcagaagcgtggtggagagcgacgagctgtag

SEQ ID NO: 90105 - DNA, 6013 bp, Artificial Sequence
  derived and/or modified sequence
aaaaataatgccatttttttgaatgatgaactatggtataatgcatttagtgttcattccaaacgtcaatcaataaataacatgggcctctagctataagggaaattctataggtaaaagaactgattgacccccacccccataggtgctgtcctgctatggaatccctttgctcagttttctcctgtccaatcaggtggaatgtttcacaggcacatggtttatacagctcaaaataacttgggacctgtgagctgacaaatgctctggctccggtggtgacaggttgtccagcttcttacagccatcttcactgaaactaaggttaactcctcactctctatggacggctactctctatttccaagggcgtgaagaatttccctcttctcctgtgctttcatctaaaagttctccctggataattatcattgcagtggagtgcctggattggacatcctcatctgggtcaactaaaaaaagaaagcatgcaagacgacagcatagaagcttctacttccatatctcagcttctaagagagagctatttagctgaaaccagacatcggggaaacaatgagaggagtcgagcggagccctcctccaacccttgccatttcggcagtccttctggggccgctgaaggaggcggaggccaagatgaccttccagatctttcagcctttctgagccaagaagaattagacgaaagtgtcaatttggcaagactggccatcaattacgaccctttggagaaggcagatgaaactcaagctagaaaacgactttctcctgatcagatgaaacactcacctaatttaagttttgagcctaacttctgccaggataaccctcgaagtcccaccagctctaaagaaagcccccaggaggcaaaaaggccacagtattgttctgaaacccagtccaaaaaagtatttttaaataaggctgccgacttcattgaagagctatcctcccttttcaaatcccacagctccaaaaggattagacctcgtgcctgcaaaaaccacaagagtaaactggaatctcaaaacaaagttatgcaggaaaacagctccagtttctcagatctgtcagaaagacgagaaagatcttctgttcccatccctatccctgcggataccagggataatgaagtgaatcacgccctggaacagcaggaagccaagaggcgtgaagcggagcaggctgccagtgaggcggctggtggagacactacaccagggtcttccccttcatctctgtactatgaagaacctctggggcaacctccccggttcactcaaaagttacggagcagagaagttccagaaggaactcgagtacagttggattgcatagtggtaggaattccaccacctcaagtaaggtggtactgtgaaggcaaggagcttgaaaattccccagatattcacatcgtccaggcaggaaatctgcactcactgaccattgcggaagcctttgaagaggacacaggacgctattcctgctttgcttctaacatctatgggacagattcgacttctgctgagatttatatagaaggggtttcttcttctgactcagaaggcgaccctaacaaggaagagatgaatcgaatccagaagccaaatgaggtgtcatctcctcccactacctctgcagtcattcctccagcagtaccccaagcccagcatttggtggcccaacctcgtgtggcaaccatccagcagtgtcagagccccaccaattacttgcagggattggatggaaaacctatcattgcagctcctgtgtttacaaagatgctacaaaatttgtcagcttctgagggtcagctggttgtctttgaatgcagagtaaaaggagctccatctcctaaggttgagtggtatagagaagggactttaatagaagattctccagattttaggattttacagaaaaaacctcgatccatggcagagccagaggagatttgcaccttggtcattgctgaggtgtttgcagaagattctgggtgcttcacatgtactgcaagcaacaaatacggcacagtgtcaagcattgcacagctgcacgtgagaggaaatgaggacctcagcaacaacgggtctcttcactcagccaactctaccaccaacctggcagctattgagccacagccctccccaccccactcagagcctccatctgtggaacaaccccccaaacccaaactcgagggggttctggtgaaccacaatgagccccggtccagctccaggattgggcttcgtgtgcacttcaacctgcctgaagatgacaaaggaagtgaagcatcctccgaggctggtgtggtgaccaccagacagaccaggcccgattctttccaggagaggttcaacggacaggcaacaaaaaccccagagccttcttcccccgtgaaagagccccctccagttctggccaaacccaaacttgattccactcagttacaacagcttcataaccaagtcttactggaacaacaccaattgcaaaacccacctccttcatctcctaaggagtttcctttcagcatgactgttttgaactccaatgctcccccagcggtgacaacatccagtaagcaggtgaaggctccttcatcacagacgttcagcttggcccggccgaagtatttcttcccctccacgaacaccaccgcagcaactgtggccccttccagctctccggtgttcactttgagcagcactcctcaaactattcagaggacagtgagcaaagaaagcctcttagtgtctcacccctctgtgcaaaccaaatctccaggagggctttccatccaaaatgagccactcccaccaggcccaacagaaccaacaccaccaccattcacattttccatccccagcggaaaccagtttcagccccgctgtgtgtccccaattcctgtctctcctaccagccggattcagaacccagtggctttcctcagctctgttctgccttctctccctgccatcccacccacaaatgccatggggctgcctagaagtgcaccatccatgccatcccagggattagcgaagaaaaatacaaagtctcctcaaccagtgaatgatgataacattcgtgaaactaagaacgcagtgattcgagacttggggaaaaaaataactttcagtgatgtcagaccaaaccagcaggagtacaaaatttcaagctttgagcagaggctgatgaatgaaatagagtttcgcttggaacgtactcctgttgatgaatcagatgatgaaattcaacatgatgagatccccacgggcaagtgtattgctcccatctttgacaagagactcaagcacttccgggtcacagaaggctctccagttacattcacctgcaaaattgttgggatacctgttccaaaggtttactggttcaaagatgggaagcagatttctaagagaaatgagcactgcaaaatgaggcgagaaggagatgggacatgctctctgcacattgaatccactaccagtgatgacgatggcaactacaccatcatggcagccaacccccaggggagaatcagctgttctggccacttgatggtacaaagtttgcccattcgcagtcggctaacctctgctggtcagtctcacaggggaagatcccgagtgcaagaaagagacaaagagcccctacaggaacgctttttccgaccacatttcctgcaggctcctggggatatggtagctcatgaggggcgcctctgtcggctggactgtaaggtgagtggtttaccgcccccggagctgacatggctactcaatggccaacctgtgctaccagatgcctcccacaagatgctggtcagggagaccggagtccactctctgctcattgacccactcactcagcgcgacgcagggacctataagtgcatcgctaccaacaaaaccgggcagaattcttttagtctggagctctctgtagtagccaaagaggtgaagaaagcacctgtgatcctggagaaactacagaactgcggtgttcccgaaggccaccccgtgagactggagtgccgcgtgataggcatgcccccacctgtgttctactggaagaaagacaatgagaccatcccttgcaccagagagaggatcagtatgcaccaggacacaacagggtatgcctgccttctcattcagccagccaagaaatcagacgctggatggtacacgttgtcagccaagaatgaagccggcatcgtgtcgtgcactgccaggctggatatatacgctcagtggcaccatcagatcccaccgcccatgtctgtccggcccagtggcagtcgctacggatctctcaccagtaaaggacttgacatattttctgccttttcctccatggaaagcacgatggtgtattcatgctcttctcggagtgtagtggagagtgatgaactttaagaatgtctaggtacctgctgtgtaagagagcggactgtggagggggaatgagaacaagccagacttggtggtttccaagcaaccgaagttgagtaagttcccacactgctggacctgtggcaaagagtgctttgaataagtcagctagggattcttgcagtctcagctgagggagaaaggtagggctgtgccttctaaagattccaacagagatgtgagaagataatacagatgaaccaaagatgtcacacagttgccatccactgctttgggaaaaaactagcatgctcccctgctccctgttgtgttagggatgtttaggtcatactaggagcaattaggagccatatgcctgggctgagaagagctaggcagtagtgaccttaggatatgactaactcaccaaacaatgccaaggagaaaggcggacaggtcaccatcacctttcatcgattacatgtatagcagtagttttggtgaattcaccaaatcagcttccacttagcattaggaggtcatgccatacaactcacgtatgcgggcaaacacttttgatttgcatatcctgggtgtactgagccacataataaggtgtcaaaatgtgcttgagattccaaaaacttgctgaaacacttgatattgcacagtgcacttattttgtggccaaagcatggccttaccagcttgtctgcactattttcttttgggtggtgactgtttttttctgactttgcatatccctagacactagaactaaaggattggtaataaaccaatcagaaagaaatcctctgtggggtcactttaaaaactactagcttcaactaccacttacaaaatgtgcaagagtcatcatttgcccataaaatacacctcatgggctcctacccctttccccaaaagtctgaaagtgtaggaggaaggaagagatacaaacaaggagaggaaatgatgggagagtgttgtttttgtcacttgccccagcagagcaggggttttggaaggagaggtctttaatagctttgaaatgctttgagatcattggtcaaattgcattttctatgtagagaatattctgctaggtggaaaagttgggagaaaggggaatatgcatctttattctaatcaccaattcaaaccctgcctcttaaggaatttttagacttaagttcactgtgatatccctagtacctagaagagtacctagcacaaagtagacattcaataaatatttgctggttgaatgaatcttctgttattatgtctattataagataacctaatcttatattctgcaggaatatgccacccacacaccagtccaaacactgccctgggaatgctcatcacagcacagtttgctctaggctgtgcagggaaatgaattgcaggtgtctgttttcaattccctgtgctggaatccctggtgctgtctgtgccaagcacactcagctggcattgtatttgtgtgaacagacagtaactgcttagaaaggcttgaaactgtcttcacttcaaggcaaggatttccagcataaaaataaattcattcactggagaaa

SEQ ID NO: 90106 - DNA, 3963 bp, Artificial Sequence
  derived and/or modified sequence
atgcaagacgactctatagaagcttcaacctctataagccaattacttagagaaagctacctggccgaaaccaggcatcgaggtaataatgagcgctcccgggcggagccatcatccaatccgtgtcattttggctcaccgtctggcgctgctgaaggagggggcggtcaggacgacttgcccgacctatctgcttttttatcgcaagaggagttggacgagtccgtgaatctggctcgcttggccataaattacgaccctctggagaaagcggatgaaacacaggcccggaaacggctgagtcccgaccagatgaagcactccccaaacctgtccttcgagcctaatttctgccaggataatccaaggtcccccactagcagcaaggagtccccccaagaagcgaagcggccacagtactgttcagagacacagtctaaaaaggtgtttttgaataaggccgctgacttcattgaagaactgagttcgctgttcaaatctcactcctctaaacgcattcggccccgcgcatgcaagaatcacaaatctaaactcgagtcccagaataaagtaatgcaggagaatagctcttctttttcagatctcagcgagaggagggagcgctccagcgttcctatcccaattccagccgataccagggacaatgaggtcaatcacgccctggagcagcaggaagctaaaaggcgggaggccgaacaagccgcctcagaagccgctggtggggacacaactcctggatcttccccatcttcactttactacgaagagccattgggccaacctccaaggttcacccagaagctccggtccagggaagttcccgagggcacccgggtgcagttggactgtattgtggtcggcatcccccctccgcaagtacgctggtattgcgagggaaaagagctggagaattcaccggatattcatatcgtccaggctggcaacctgcactccttgacaattgcagaggccttcgaagaggacactgggcggtacagctgcttcgcctccaacatttacggaaccgacagcacctctgctgagatctatatagaaggggtttcatcttccgattcggagggcgaccctaacaaggaggagatgaaccgaatccagaagcctaacgaagtcagttcccctcctacaacaagcgccgtgatccccccagcggtcccacaggcacaacacctggtcgcccagccgcgagtggccactattcagcaatgtcagtcgcccaccaattacttgcagggcctggatggtaagccaattatcgcggctcccgtctttaccaaaatgctccaaaatctttcagcgagcgaggggcagcttgtggttttcgagtgtagagtgaagggagccccatctcctaaagttgagtggtacagggagggaaccctgatcgaagacagccccgacttcagaatcctgcaaaagaagccgcggtccatggcagaacctgaggagatctgtacattagtgatagcagaagtgttcgctgaagacagcggctgtttcacatgcacggccagcaataaatacggcaccgtttcatctattgcacagctgcacgtaagaggtaatgaggatttgagcaacaatggatctctccacagcgcgaactccaccacaaacctagccgccatcgagcctcagccgtcaccccctcattccgaaccacctagtgtagagcagcccccaaagcctaagttggagggggtgcttgtgaatcacaacgagccaaggtcatcttcccgtattgggttaagagtgcatttcaatttgcctgaggacgataagggcagcgaggcaagctccgaagccggtgttgttactactagacagacgcgcccggatagctttcaggagcgttttaatgggcaggcaaccaaaacccctgagccaagctctcccgtgaaggagccaccccctgtgcttgcaaaaccaaagctagactctactcagctgcaacaactgcacaaccaagtgctgctggagcagcatcagctgcaaaatccccctccctcgtcgcccaaggaatttccctttagtatgactgtgctaaactcaaacgcgccacctgcagttacaactagctctaaacaagtaaaggctccgagctcccagaccttcagcctcgccagacccaagtacttttttccatccacaaacaccactgcagcaacggtcgcaccgtccagctccccagtgttcacgctctcttctaccccacagaccattcagcgaactgtgtcaaaggaatctttacttgtatctcacccgagtgtgcagactaaatcccccggggggctgtctatccagaacgaacctttgcctcctgggcccacagaacctacccctccaccatttacattctccatcccttccggaaaccagttccaacccaggtgtgttagtcctattcccgtctccccaacaagccgcatccagaaccccgttgcttttctgagtagcgtcctcccatctcttcctgctatcccccccaccaatgcaatgggcttgccgaggtcagccccatctatgccatcccaaggactggcgaagaagaatactaaatcacctcagccggtgaatgacgacaacatccgagagactaagaatgcagtgattcgggacctcgggaagaagattacattcagcgatgtgaggcccaatcagcaagaatataagatcagttcctttgaacagcggctcatgaacgagattgagttcagattggaaagaacccctgtggatgagtccgacgatgaaattcagcatgacgagatacccactggtaagtgtatcgcaccgatcttcgacaaacggctgaagcatttccgcgtgacagaggggtctcctgtgacgtttacctgtaagattgtcggcatcccagtgccaaaggtgtattggtttaaagatgggaagcagattagcaaaagaaatgaacactgcaaaatgcgacgcgaaggagatggaacttgtagtctccatattgaaagtaccacctccgacgacgatgggaattacacaattatggccgctaatccgcaaggacggatctcgtgctccggccatctcatggtccagagccttccgattcggtccaggcttacatcggctggccaatcccatcggggacgtagcagggttcaagagagagacaaagagcccctgcaggagaggttttttcgccctcactttctgcaagctccaggagatatggtcgcacacgaaggcagactctgtcgcctggactgcaaggtttccggactccccccacctgagctgacttggctgctgaacgggcagccagttcttcctgatgcttcccacaagatgcttgtgcgggagactggcgtgcacagtcttcttatcgacccactgacccagcgagatgccggcacttacaagtgtatcgcgacaaacaaaactgggcaaaacagtttcagcttagaactgagcgtcgtcgctaaggaagttaaaaaggcccccgttatcctggaaaagctgcagaactgtggagtgcctgaaggacatccagtacgcctggagtgcagagtcattggcatgccaccaccagtcttctactggaagaaggataacgaaacaatcccttgtacgagagagcggatttccatgcatcaggacacgactggctacgcatgtttgctcatccagccggccaaaaagtctgatgctgggtggtacacgctgtcagcgaagaacgaagccggcatagtgtcttgtaccgcccgcctggatatctacgcgcagtggcaccatcagatcccaccgcctatgtcggtgagaccttcaggctctcgctatggatctctgactagtaagggactcgatatttttagcgctttcagcagtatggaaagtacaatggtttatagctgctcctcccgctccgtggtggaaagtgacgaattgtag

SEQ ID NO: 90107 - DNA, 1524 bp, Artificial Sequence
  derived and/or modified sequence
atgcaagacgatagcattgaggctagtacaagtatttctcagttgctgcgtgaatcctatctggctgaaacacgccaccgaggaaataacgagcggagcagagctgagcccagcagtaacccctgtcactttggaagccccagtggggctgctgagggtgggggcggacaggatgacctcccggacctttccgcttttcttagccaggaagaactcgatgagtccgtgaacctcgctcggctcgcaatcaactacgatcccctggaaaaggcagatgagacacaagcccggaagagactgtcgccagatcagatgaagcactccccgaatctaagcttcgagcccaacttttgtcaagacaaccctagatctcccacctcttctaaggagtccccacaggaggcaaagaggccccagtattgcagcgaaactcagtctaagaaagtttttctgaacaaagctgcagactttatcgaggaattgtcatcactgtttaagagccactcctcaaagcgtatcaggcccagagcctgtaagaaccataagagcaagctggagagtcagaacaaggtgatgcaggagaattcctcctcgttctccgatctgtcagagcgcagagagcggtctagcgtgcccattcccatccctgccgatacacgggataacgaggtaaaccacgccctggaacagcaggaggcaaagcgaagagaggccgaacaggccgcatcagaggctgcggggggtgatacaactcctggcagcagtccgtccagcctgtattacgaggagcctctcgggcaacccccacgattcacgcagaagctgcgctcgagagaggtgccggaagggacacgtgtccagctggattgtatcgtggtcggcattccgcctccacaagtccggtggtactgcgaagggaaggagctggaaaactctccggatattcatattgtgcaggctgggaatttacactccctgactatcgcagaagcttttgaagaggatactggaaggtacagctgtttcgctagcaatatctacgggactgactctaccagtgctgagatctacatcgagggcgtgagctccagcgactccgaaggcgacccgaataaagaggaaatgaatagaatacagaaaccaaacgaggtgtcatctccgcctacaaccagcgccgtgattcccccagcggttcctcaggcccagcatctggtagcccagcctcgcgtggcaaccatccagcagtgccagagcccaactaattacctgcagggactcgatggaaaacctataatagcggcaccagtgttcactaagatgctacagaatttgtctgcttccgaaggccagctagtcgttttcgagtgcagagtcaagggagccccctccccaaaagttgagtggtacagagagggaacacttatagaggacagtcctgattttagaatcttgcagaaaaaaccaagatccatggcagaaccaggaaaggatgactttaatttcaacttactggtgtatgaatag

SEQ ID NO: 90108 - DNA, 3963 bp, Artificial Sequence
  derived and/or modified sequence
atgcaggatgactccatagaggcaagtacttcaataagtcagctgcttcgggagagctatctggctgagacccggcatagagggaacaatgaaagatctcgagccgaacccagctcgaacccatgccatttcgggtcaccatctggggccgccgaaggcggcggagggcaggacgacctcccagatctgtccgcctttttgtcccaagaggagctagacgaaagcgtaaatctagcaagacttgcgataaattacgaccctctcgaaaaggctgatgaaactcaggcgcggaagcgtctgtccccagaccagatgaaacattctcccaatctttcatttgagcccaatttttgccaggacaatcctcgcagtccaacatcctcaaaagaatctccccaggaggctaagcgacctcagtattgttcggagacacagtcgaaaaaagtctttctcaacaaggccgccgattttatcgaggaactgagctcgttgtttaagtctcactcgtccaagcgaattcgaccaagagcctgtaaaaaccataaatcgaagctagaatcacagaataaagtgatgcaagagaactctagtagcttttccgacctctcggagagaagagagcggtcatctgtgcctattccaattcccgctgacacacgggacaatgaagttaatcatgcccttgaacaacaggaagcgaaacggagagaggcagagcaggcagccagtgaggccgccggaggcgacacgactccagggtctagcccctcctctctttattacgaggagcccttaggccagcccccccgatttacacagaagctcaggagcagagaagttcctgagggtaccagggtgcagctggattgcattgtagtaggtataccgcccccacaagtgagatggtactgtgaaggtaaagagctggaaaacagccccgacatccacatcgtgcaggctggaaaccttcacagcctaaccatcgcagaggctttcgaagaggacacagggcgttactcctgctttgcctctaatatttatgggacagatagcactagtgctgagatctacatcgaaggggtatcttctagtgatagcgagggagatcctaacaaagaggagatgaacaggatccagaagccgaatgaagtaagcagccctccaacgacaagcgctgtcattcccccagccgtcccgcaggcccagcatctcgtggctcaaccacgggtagctaccatacaacagtgtcagagccccaccaactatctgcagggtctggatggcaagcctattattgctgctcccgtgttcacaaagatgctgcaaaaccttagtgcctccgagggccagctggtggtgtttgagtgtcgcgtgaagggcgcccccagccctaaggtcgaatggtatcgagagggtacccttatagaggacagtccggatttccggattctgcagaaaagacccgtgtgtatggagcacattgaggaaatatgtaccctagtcatagcagaggtgtttgcagaagatagtggctgtttcacatgcaccgcctccaacaagtacggcaccgtttctagtatcgcccagctgcacgtacgtgggaatgaggacctgtccaacaacggttcattacattctgcaaacagtaccaccaaccttgccgccattgaaccccagccaagcccacctcatagtgaaccaccctccgtggaacagccgccgaagcctaaacttgaaggcgtgttagtgaatcataatgagccgaggtccagctcacgaattgggctaagggtccatttcaatctgcctgaagacgataaagggtccgaggcctccagcgaggccggggtcgttactacgaggcagacaaggcccgatagctttcaggagcgtttcaatggtcaggccaccaaaaccccagagcctagctccccagtgaaggagcctccccccgtccttgcgaaacccaagcttgacagcacccagttacagcagctgcacaaccaggtgttgctcgagcagcatcaactgcagaatcctcctccaagctcaccaaaggagttccccttctccatgactgtactcaacagcaacgcaccccctgccgtaacgactagtagtaagcaggtcaaagcacctagttcccaaacgtttagtctggctaggcccaagtacttttttccatctacgaataccacggctgccacagtggctccttcctcctctccagtgttcaccctgtctagcacaccccagacaattcagcggacagtatcaaaagaaagcctgttggttagccacccgagcgtgcaaacaaagtcccccggcggcttgagcattcagaacgagcctctgcccccagggcccacagagccgaccccccctcctttcacattttcaatcccatcgggcaatcagtttcagcctcgatgcgtatcacccatcccagtgagtcccacgagccgtatccagaatcctgttgcctttctgtcctctgttctgccttccttacccgctattccaccaacgaatgccatgggtctcccgcggtcagccccttccatgccctcacaaggcctcgcgaagaagaataccaagtctccccagccagtgaacgacgacaacatcagagagaccaagaatgcggtaatcagggatctgggtaaaaagattaccttttccgatgtgagacctaaccagcaagaatataaaatctcgtcctttgagcagcgcctcatgaacgagatcgagtttagattagaacgcaccccagtagacgagagtgatgacgaaattcagcacgacgagatccccacgggcaagtgcatcgcccccatttttgataaacgcctcaagcacttccgagtgacggaaggctctccagtgactttcacctgcaagatagtaggcatacccgtgcctaaggtttattggttcaaggatggcaagcagattagtaaaagaaacgaacactgtaagatgcggcgggaaggggatggcacttgcagcttacatattgaatctacgacatcggatgacgatggaaattacaccataatggccgccaatcctcaaggcaggataagctgctcaggccacttgatggtgcagagcctcccgatcagatccagactaacaagcgccggtcagtcccacaggggtcgtagtagagttcaggagcgcgacaaggagccattacaagaacgcttcttcaggcctcattttctccaagctccgggcgacatggtggcccatgagggccgcctgtgccggttggactgtaaggtttccggactgccaccaccagaattgacctggctgctgaatggccaacccgttttgccggacgcgtcacacaaaatgctggtccgcgaaacaggggtccactcactgctcatcgatcccctgactcagcgcgatgcaggcacatataagtgtatagctaccaacaagacaggccagaattcctttagtctggagctgtccgtggtagccaaggaggtaaagaaggcccctgtgattctcgaaaaactccaaaattgcggcgttccggaaggccatcccgtacggctagagtgtcgggtgatcggcatgccccctccagtgttctattggaaaaaggacaatgagacgataccatgcactagagagcggatctccatgcaccaggataccaccgggtatgcatgcctgttgatacagcctgcaaagaaatctgacgctggctggtacacactgtcagcaaaaaacgaagctgggatcgtgagctgcactgctcgccttgacatttatgcacagtggcaccaccagatccctccccctatgtctgttagaccatctgggtcacgctacggatcactcacctctaaaggtctcgacatcttctcggccttctcctccatggagagcaccatggtctactcctgttcctcgcgctcagtcgttgagtctgacgagctttag

SEQ ID NO: 90109 - DNA, 2126 bp, Artificial Sequence
  derived and/or modified sequence
aaatgctctggctccggtggtgacaggttgtccagcttcttacagccatcttcactgaaactaaggttaactcctcactctctatggacggctactctctatttccaagggcgtgaagaatttccctcttctcctgtgctttcatctaaaagttctccctggataattatcattgcagtggagtgcctggattggacatcctcatctgggtcaactaaaaaaagaaagcatgcaagacgacagcatagaagcttctacttccatatctcagcttctaagagagagctatttagctgaaaccagacatcggggaaacaatgagaggagtcgagcggagccctcctccaacccttgccatttcggcagtccttctggggccgctgaaggaggcggaggccaagatgaccttccagatctttcagcctttctgagccaagaagaattagacgaaagtgtcaatttggcaagactggccatcaattacgaccctttggagaaggcagatgaaactcaagctagaaaacgactttctcctgatcagatgaaacactcacctaatttaagttttgagcctaacttctgccaggataaccctcgaagtcccaccagctctaaagaaagcccccaggaggcaaaaaggccacagtattgttctgaaacccagtccaaaaaagtatttttaaataaggctgccgacttcattgaagagctatcctcccttttcaaatcccacagctccaaaaggattagacctcgtgcctgcaaaaaccacaagagtaaactggaatctcaaaacaaagttatgcaggaaaacagctccagtttctcagatctgtcagaaagacgagaaagatcttctgttcccatccctatccctgcggataccagggataatgaagtgaatcacgccctggaacagcaggaagccaagaggcgtgaagcggagcaggctgccagtgaggcggctggtggagacactacaccagggtcttccccttcatctctgtactatgaagaacctctggggcaacctccccggttcactcaaaagttacggagcagagaagttccagaaggaactcgagtacagttggattgcatagtggtaggaattccaccacctcaagtaaggtggtactgtgaaggcaaggagcttgaaaattccccagatattcacatcgtccaggcaggaaatctgcactcactgaccattgcggaagcctttgaagaggacacaggacgctattcctgctttgcttctaacatctatgggacagattcgacttctgctgagatttatatagaaggggtttcttcttctgactcagaaggcgaccctaacaaggaagagatgaatcgaatccagaagccaaatgaggtgtcatctcctcccactacctctgcagtcattcctccagcagtaccccaagcccagcatttggtggcccaacctcgtgtggcaaccatccagcagtgtcagagccccaccaattacttgcagggattggatggaaaacctatcattgcagctcctgtgtttacaaagatgctacaaaatttgtcagcttctgagggtcagctggttgtctttgaatgcagagtaaaaggagctccatctcctaaggttgagtggtatagagaagggactttaatagaagattctccagattttaggattttacagaaaaaacctcgatccatggcagagccaggtaaagatgatttcaactttaatttattagtatatgagtgattttatatatacaagaatacataatgaagttacactgagatgaataaaaagtgaaaaataaagttttaggaaaaaaagatccaaatgggccgggtgcagtggctcatgtctgtaattccagcactttgcgaggccgaggcgggcggattacttgagatcagaagttcaagaccagcctggcctacatgacaaaatgaaaccccatctctactaaaaatataaaaattagccaggcatagtggcgcacgtctgtaatcccagctacctgggaggctgaggcaggagaatcacttgagcctgggaggtggaggttgcagtgagccgagatcgtgacactacagtccagctgcgcgacagaacaagaatctgtctc

SEQ ID NO: 90110 - DNA, 3963 bp, Artificial Sequence
  derived and/or modified sequence
atgcaggatgacagcattgaggccagcaccagcatcagccagctgctgcgggagagctacctggccgagaccaggcaccggggcaacaatgaaagaagcagagctgagcccagcagcaacccctgccacttcggcagccccagcggggctgctgagggcggcggcggccaggatgacctgcctgacctgagcgccttcctgagccaggaggagctggatgaatctgtgaacctggcccggctggccatcaactatgaccccctggagaaggcagatgagacccaggccaggaagaggctgagcccagaccagatgaagcacagccccaacctgagctttgagcccaacttctgccaggacaaccccaggagccccaccagcagcaaggagagcccccaggaggccaagaggccccagtactgcagcgagacccagagcaagaaggtgttcctgaacaaggctgctgacttcatcgaggagctgagcagcctcttcaagagccacagcagcaagaggatccggccccgggcctgcaagaaccacaagagcaagctggagagccagaacaaggtgatgcaggagaacagcagcagcttcagtgacctgtctgaaagaagagagaggagctctgtgcccatccccatcccagctgacacccgggacaatgaggtgaaccacgccctggagcagcaggaggccaagagaagagaggccgagcaggccgccagcgaggccgccggcggggacaccaccccaggcagcagccccagcagcctgtactatgaggagcccctgggccagcccccacgcttcacccagaagctgcggagccgggaggtgcctgagggcaccagggtgcagctggactgcatcgtggtgggcatccccccaccccaggtgcgctggtactgtgagggcaaggagctggagaacagcccagacatccacatcgtgcaggccggcaacctgcacagcctgaccatcgccgaggcctttgaggaggacaccggccgctacagctgctttgccagcaacatctatggaacagacagcaccagcgctgagatctacatcgagggcgtgagcagcagtgacagcgagggggaccccaacaaggaggagatgaaccgcatccagaagcccaatgaggtgagcagcccccccaccaccagcgctgtgattcctcctgctgtgccccaggcccagcacctggtggcccagccccgggtggccaccatccagcagtgccagagccccaccaactacctgcagggcctggatggcaagcccatcatcgccgcccctgtgttcaccaagatgctgcagaacctgagcgccagcgagggccagctggtggtgtttgaatgtcgggtgaagggggcccccagccccaaggtggagtggtaccgggagggcaccctgattgaggacagcccagacttccgcatcctgcagaagaagcccaggtccatggccgagcctgaggagatctgcaccctggtgattgctgaggtgtttgctgaggacagcggctgcttcacctgcacagccagcaacaagtatggaacagtgagcagcatcgcccagctgcacgtgagaggaaatgaagacctgagcaacaacggcagcctgcacagcgccaacagcaccaccaacctggccgccatcgagccccagcccagccccccccacagcgagcccccatctgtggagcagccccccaagcccaagctggagggcgtgctggtgaaccacaatgagcccaggagcagcagccgcatcggcctgcgggtgcacttcaacctgcctgaagatgacaagggcagcgaggccagcagcgaggccggcgtggtgaccacccggcagaccaggccagacagcttccaggagcgcttcaacggccaggccaccaagaccccagagcccagcagccctgtgaaggagcccccacctgtgctggccaagcccaagctggacagcacccagctgcagcagctgcacaaccaggtgctgctggagcagcaccagctgcagaaccccccacccagcagccccaaggagttccccttctccatgacagtgctgaacagcaatgcccccccagctgtgaccaccagcagcaagcaggtgaaggcccccagcagccagaccttcagcctggcccggcccaagtacttcttccccagcaccaacaccacagctgccaccgtggcccccagcagcagccctgtgttcaccctgagcagcaccccccagaccatccagaggacagtgtccaaggagagcctgctggtgagccaccccagcgtgcagaccaagagccctgggggcctgagcatccagaatgagcccctgcccccaggccccacagagcccaccccaccacccttcaccttcagcatccccagcggcaaccagttccagccccgctgtgtgagccccatccctgtgagccccaccagccgcatccagaaccctgtggccttcctgagctctgtgctgcccagcctgcctgccatcccccccaccaatgccatgggcctgcccaggtctgcccccagcatgcccagccagggcctggccaagaagaacaccaagagcccccagcctgtgaatgatgacaacatccgggagaccaagaatgctgtgatccgggacctgggcaagaagatcaccttcagtgatgtgcggcccaaccagcaggagtacaagatcagcagctttgagcagaggctgatgaatgaaattgagttccggctggagaggacccctgtggatgaaagtgatgatgagatccagcatgatgagatccccactggaaaatgtattgcccccatctttgacaagaggctgaagcacttccgggtgacagagggcagccctgtgaccttcacctgcaagatcgtgggcatccctgtgcccaaggtgtactggttcaaggatggcaagcagatcagcaagagaaatgagcactgcaagatgagaagagaaggagatggcacctgcagcctgcacatcgagagcaccaccagtgatgatgatggcaactacaccatcatggccgccaacccccagggccgcatcagctgcagcggccacctgatggtgcagagcctgcccatccgcagccggctgaccagcgctggccagagccaccggggccgcagccgggtgcaggagcgggacaaggagcccctgcaggagcgcttcttccggccccacttcctgcaggcccctggggacatggtggcccacgagggccgcctgtgccgcctggactgcaaggtgtctggcctgcccccacctgagctgacctggctgctgaatggccagcctgtgctgcctgatgccagccacaagatgctggtgcgggagaccggggtgcacagcctgctgattgaccccctgacccagagagatgctggcacctacaagtgcatcgccaccaacaagacaggccagaacagcttcagcctggagctgtctgtggtggccaaggaggtgaagaaggcccctgtgatcctggagaagctgcagaactgtggggtgcctgagggccaccctgtgcggctggagtgcagggtcatcggcatgcctcctcctgtgttctactggaagaaggacaatgagaccatcccctgcacccgggagcgcatctccatgcaccaggacaccaccggctacgcctgcctgctgatccagcctgccaagaagagtgatgctggctggtacaccctgagcgccaagaatgaggccggcatcgtgtcctgcacagcccggctggacatctatgcccagtggcaccaccagatccccccacccatgtctgtgcggcccagcggcagccgctatggcagcctgaccagcaagggcctggacatcttcagcgccttcagctccatggagagcaccatggtgtacagctgcagcagccgctctgtggtggagagtgatgagctgtag

SEQ ID NO: 90111 - DNA, 1524 bp, Artificial Sequence
  derived and/or modified sequence
atgcaggatgacagcattgaggccagcaccagcatcagccagctgctgcgggagagctacctggccgagaccaggcaccggggcaacaatgaaagaagcagagctgagcccagcagcaacccctgccacttcggcagccccagcggggctgctgagggcggcggcggccaggatgacctgcctgacctgagcgccttcctgagccaggaggagctggatgaatctgtgaacctggcccggctggccatcaactatgaccccctggagaaggcagatgagacccaggccaggaagaggctgagcccagaccagatgaagcacagccccaacctgagctttgagcccaacttctgccaggacaaccccaggagccccaccagcagcaaggagagcccccaggaggccaagaggccccagtactgcagcgagacccagagcaagaaggtgttcctgaacaaggctgctgacttcatcgaggagctgagcagcctcttcaagagccacagcagcaagaggatccggccccgggcctgcaagaaccacaagagcaagctggagagccagaacaaggtgatgcaggagaacagcagcagcttcagtgacctgtctgaaagaagagagaggagctctgtgcccatccccatcccagctgacacccgggacaatgaggtgaaccacgccctggagcagcaggaggccaagagaagagaggccgagcaggccgccagcgaggccgccggcggggacaccaccccaggcagcagccccagcagcctgtactatgaggagcccctgggccagcccccacgcttcacccagaagctgcggagccgggaggtgcctgagggcaccagggtgcagctggactgcatcgtggtgggcatccccccaccccaggtgcgctggtactgtgagggcaaggagctggagaacagcccagacatccacatcgtgcaggccggcaacctgcacagcctgaccatcgccgaggcctttgaggaggacaccggccgctacagctgctttgccagcaacatctatggaacagacagcaccagcgctgagatctacatcgagggcgtgagcagcagtgacagcgagggggaccccaacaaggaggagatgaaccgcatccagaagcccaatgaggtgagcagcccccccaccaccagcgctgtgattcctcctgctgtgccccaggcccagcacctggtggcccagccccgggtggccaccatccagcagtgccagagccccaccaactacctgcagggcctggatggcaagcccatcatcgccgcccctgtgttcaccaagatgctgcagaacctgagcgccagcgagggccagctggtggtgtttgaatgtcgggtgaagggggcccccagccccaaggtggagtggtaccgggagggcaccctgattgaggacagcccagacttccgcatcctgcagaagaagcccaggtccatggccgagcccgggaaggatgacttcaacttcaacctgctggtgtatgaatag

SEQ ID NO: 90112 - DNA, 3963 bp, Artificial Sequence
  derived and/or modified sequence
atgcaggatgacagcattgaggccagcaccagcatcagccagctgctgcgggagagctacctggccgagaccaggcaccggggcaacaatgaaagaagcagagctgagcccagcagcaacccctgccacttcggcagccccagcggggctgctgagggcggcggcggccaggatgacctgcctgacctgagcgccttcctgagccaggaggagctggatgaatctgtgaacctggcccggctggccatcaactatgaccccctggagaaggcagatgagacccaggccaggaagaggctgagcccagaccagatgaagcacagccccaacctgagctttgagcccaacttctgccaggacaaccccaggagccccaccagcagcaaggagagcccccaggaggccaagaggccccagtactgcagcgagacccagagcaagaaggtgttcctgaacaaggctgctgacttcatcgaggagctgagcagcctcttcaagagccacagcagcaagaggatccggccccgggcctgcaagaaccacaagagcaagctggagagccagaacaaggtgatgcaggagaacagcagcagcttcagtgacctgtctgaaagaagagagaggagctctgtgcccatccccatcccagctgacacccgggacaatgaggtgaaccacgccctggagcagcaggaggccaagagaagagaggccgagcaggccgccagcgaggccgccggcggggacaccaccccaggcagcagccccagcagcctgtactatgaggagcccctgggccagcccccacgcttcacccagaagctgcggagccgggaggtgcctgagggcaccagggtgcagctggactgcatcgtggtgggcatccccccaccccaggtgcgctggtactgtgagggcaaggagctggagaacagcccagacatccacatcgtgcaggccggcaacctgcacagcctgaccatcgccgaggcctttgaggaggacaccggccgctacagctgctttgccagcaacatctatggaacagacagcaccagcgctgagatctacatcgagggcgtgagcagcagtgacagcgagggggaccccaacaaggaggagatgaaccgcatccagaagcccaatgaggtgagcagcccccccaccaccagcgctgtgattcctcctgctgtgccccaggcccagcacctggtggcccagccccgggtggccaccatccagcagtgccagagccccaccaactacctgcagggcctggatggcaagcccatcatcgccgcccctgtgttcaccaagatgctgcagaacctgagcgccagcgagggccagctggtggtgtttgaatgtcgggtgaagggggcccccagccccaaggtggagtggtaccgggagggcaccctgattgaggacagcccagacttccgcatcctgcagaagaggcctgtgtgcatggagcacatcgaggagatctgcaccctggtgattgctgaggtgtttgctgaggacagcggctgcttcacctgcacagccagcaacaagtatggaacagtgagcagcatcgcccagctgcacgtgagaggaaatgaagacctgagcaacaacggcagcctgcacagcgccaacagcaccaccaacctggccgccatcgagccccagcccagccccccccacagcgagcccccatctgtggagcagccccccaagcccaagctggagggcgtgctggtgaaccacaatgagcccaggagcagcagccgcatcggcctgcgggtgcacttcaacctgcctgaagatgacaagggcagcgaggccagcagcgaggccggcgtggtgaccacccggcagaccaggccagacagcttccaggagcgcttcaacggccaggccaccaagaccccagagcccagcagccctgtgaaggagcccccacctgtgctggccaagcccaagctggacagcacccagctgcagcagctgcacaaccaggtgctgctggagcagcaccagctgcagaaccccccacccagcagccccaaggagttccccttctccatgacagtgctgaacagcaatgcccccccagctgtgaccaccagcagcaagcaggtgaaggcccccagcagccagaccttcagcctggcccggcccaagtacttcttccccagcaccaacaccacagctgccaccgtggcccccagcagcagccctgtgttcaccctgagcagcaccccccagaccatccagaggacagtgtccaaggagagcctgctggtgagccaccccagcgtgcagaccaagagccctgggggcctgagcatccagaatgagcccctgcccccaggccccacagagcccaccccaccacccttcaccttcagcatccccagcggcaaccagttccagccccgctgtgtgagccccatccctgtgagccccaccagccgcatccagaaccctgtggccttcctgagctctgtgctgcccagcctgcctgccatcccccccaccaatgccatgggcctgcccaggtctgcccccagcatgcccagccagggcctggccaagaagaacaccaagagcccccagcctgtgaatgatgacaacatccgggagaccaagaatgctgtgatccgggacctgggcaagaagatcaccttcagtgatgtgcggcccaaccagcaggagtacaagatcagcagctttgagcagaggctgatgaatgaaattgagttccggctggagaggacccctgtggatgaaagtgatgatgagatccagcatgatgagatccccactggaaaatgtattgcccccatctttgacaagaggctgaagcacttccgggtgacagagggcagccctgtgaccttcacctgcaagatcgtgggcatccctgtgcccaaggtgtactggttcaaggatggcaagcagatcagcaagagaaatgagcactgcaagatgagaagagaaggagatggcacctgcagcctgcacatcgagagcaccaccagtgatgatgatggcaactacaccatcatggccgccaacccccagggccgcatcagctgcagcggccacctgatggtgcagagcctgcccatccgcagccggctgaccagcgctggccagagccaccggggccgcagccgggtgcaggagcgggacaaggagcccctgcaggagcgcttcttccggccccacttcctgcaggcccctggggacatggtggcccacgagggccgcctgtgccgcctggactgcaaggtgtctggcctgcccccacctgagctgacctggctgctgaatggccagcctgtgctgcctgatgccagccacaagatgctggtgcgggagaccggggtgcacagcctgctgattgaccccctgacccagagagatgctggcacctacaagtgcatcgccaccaacaagacaggccagaacagcttcagcctggagctgtctgtggtggccaaggaggtgaagaaggcccctgtgatcctggagaagctgcagaactgtggggtgcctgagggccaccctgtgcggctggagtgcagggtcatcggcatgcctcctcctgtgttctactggaagaaggacaatgagaccatcccctgcacccgggagcgcatctccatgcaccaggacaccaccggctacgcctgcctgctgatccagcctgccaagaagagtgatgctggctggtacaccctgagcgccaagaatgaggccggcatcgtgtcctgcacagcccggctggacatctatgcccagtggcaccaccagatccccccacccatgtctgtgcggcccagcggcagccgctatggcagcctgaccagcaagggcctggacatcttcagcgccttcagctccatggagagcaccatggtgtacagctgcagcagccgctctgtggtggagagtgatgagctgtag

SEQ ID NO: 90113 - DNA, 3963 bp, Artificial Sequence
  derived and/or modified sequence
atgcaggacgacagcatcgaggccagcaccagcatcagccagctgctgcgtgaaagctacctggctgagacgaggcatcgagggaacaatgaaaggtccagagccgaaccttcttctaacccatgtcatttcgggtccccctctggcgccgcagaaggggggggaggccaggacgatctgccagacttgtctgcgttcttgagtcaggaagagctggatgaatcagtaaatctggccaggctggccatcaactatgacccattagaaaaagccgacgagacccaggccagaaaaagactgagccccgaccaaatgaaacacagtccaaacctttcctttgagccgaatttctgtcaggacaacccccgatcaccaacatcatccaaggagtctccacaggaagccaaaaggcctcagtactgctcagagactcagagcaagaaggtgttcttgaacaaggcagccgactttatcgaggagttgagtagtctgttcaaatcccacagctccaagaggatccgccctcgggcctgtaagaatcacaagtcgaagttggaatctcagaataaagtgatgcaagagaactcctcttccttttcggatctgagcgaacgtagagagcggagttctgtgcctattccaatccctgcggacacgcgggacaatgaagtgaaccacgcgctcgaacagcaggaagcaaagagacgagaggcggagcaagccgcaagcgaggcggctgggggtgacacaacccccgggtccagtccatcaagtttgtattacgaggaaccactggggcaacccccgaggtttacccagaagctgaggagtcgggaggttcctgagggaacacgtgtacagctggactgtatcgtggtgggcatccctccaccccaggttcgctggtactgtgaagggaaggaactggagaactcgcctgacattcatatagtacaggcaggtaacttgcacagtctcactatagcggaagcctttgaagaggacaccggcaggtacagttgtttcgcgtccaacatttatgggacggactccacgagcgcggaaatatacattgagggagtttcctcatctgactctgaaggagatcccaataaagaggagatgaacaggatccagaagcctaatgaagtgtcatcgccacctactaccagcgcagtgatacccccagcagtgccacaggcccagcacctggtggcccagcctagggtcgcgacaatacagcagtgtcaatcccctacaaactatctccaagggttggatggaaagcctattatcgctgcgcccgtcttcaccaagatgttgcagaaccttagtgcttccgaagggcaactcgtagtttttgagtgtagggtgaagggtgctcccagcccaaaggtcgaatggtatcgcgagggaaccctgatcgaagactccccagatttcaggattttgcagaagaagcctcgttccatggctgagcctgaggagatttgcactttggtaatcgctgaagtgtttgcagaggacagcgggtgcttcacctgtaccgcctcgaacaaatacggcacggtttcatctattgcccagctgcacgtgcgcgggaatgaggatctctccaataacggatctctccactctgcaaactccaccactaatctcgccgccatcgagccccaaccaagtcccccacattctgaaccaccttccgtggagcagcccccaaagcccaaactggagggtgtcttggtgaatcataacgagccgaggagctctagtcggatcggactgagggtacacttcaacctccccgaggacgataagggttcagaagcctcgtccgaagctggagttgtgaccacccgccagacccgccccgactcatttcaggagcgcttcaacggccaggcaaccaagaccccggaaccgtcctcccccgtaaaagaaccaccccctgttctggccaaacccaaactggatagcacacaattacagcagctacataaccaggtgctcctcgaacagcaccagttacagaatccacccccctccagtcccaaggaattccctttttctatgaccgtgctgaattccaatgctccccctgcagtgacgacttccagtaagcaggtgaaagctccttcctcacaaacctttagcctggcgcgcccgaagtattttttcccctccactaatactacggctgcaaccgtcgccccttcctccagtcccgtatttacactatcttccaccccgcagacaattcagaggactgtaagtaaggagagcctactcgtgtcccatccctcagttcaaaccaagtcccctgggggactgagcattcagaatgagcccttgccccccggaccaaccgagccaacacctccgccttttaccttctcaatcccctctggtaaccagttccagccacgctgcgtgagccccatacccgtgagcccaactagccgtattcagaaccctgttgcatttttgtcctccgtcctgccgtcactgcccgctattccacccacaaatgccatggggttgcccagatccgccccctcgatgccttcgcaaggtttggcaaaaaaaaatacgaagtcccctcaacctgttaacgatgataacatacgcgagaccaagaacgccgtgatccgtgatctgggcaagaagatcacgttcagcgacgtccgtcctaaccaacaagaatataaaatcagtagttttgaacagcgtcttatgaatgagattgagtttagattggagcgcactcctgtggatgaatccgacgatgagatccagcatgatgagattcccaccgggaaatgtatcgcccctattttcgataagcgcctgaaacactttcgcgtgacggagggatcacctgtgacctttacttgtaagatagtgggcatccccgtgcccaaagtctactggttcaaagacgggaagcaaatctcgaagcgaaacgagcactgcaagatgcgccgcgaaggcgatggaacctgcagcttacacatcgaatccaccacctctgacgatgacggaaactataccatcatggctgccaatccgcagggtcggatttcatgcagcggccacttgatggtgcaatctctgcctattaggagcagactcacctcagccggccagtcacacaggggccgctctcgcgtgcaagagcgcgacaaggagccgctccaggaacgatttttccgcccacatttcctgcaggcccccggcgacatggtcgctcatgaaggacggctgtgccgcctggactgcaaggtgtctgggcttccaccaccagagctgacctggcttttaaacggacagcctgtcctgccagatgcatcacacaaaatgttagtgcgcgagacaggagtgcactctctgctgatcgatcctctgacacaaagggatgccggtacctataagtgtatcgccaccaacaagaccggacagaacagcttcagtctagaactctcagtcgtcgccaaggaggtcaaaaaggcacccgtgatcttggagaagctccagaactgtggcgtgcccgagggccatcctgtgcggctggagtgtcgtgtgattggcatgcctccgcccgtcttctattggaaaaaagataacgaaaccatcccctgtacccgggaaagaatcagtatgcaccaggatacaaccgggtatgcctgcttgctcattcaacccgccaaaaagagcgatgccgggtggtacactctgtcagcaaagaatgaagctggaattgtcagctgcaccgctcgactggatatttatgcccagtggcaccaccagatccccccacctatgtcagtacgacctagtggtagccggtatggtagtctcactagtaagggcctcgacatattctccgcctttagctcaatggaaagtaccatggtatatagctgtagttcccgaagcgtagtagagagcgatgagctttag

SEQ ID NO: 90114 - DNA, 1524 bp, Artificial Sequence
  derived and/or modified sequence
atgcaggacgacagcatcgaggccagcaccagcatcagccagctgctgagggaatcctacctggcagagactaggcatcgcggcaacaacgagcgctcccgagccgagccctcatccaatccttgtcatttcggtagtccatccggcgccgcggaaggcggcggggggcaggacgaccttccagatctgtctgcctttctgagtcaagaggaattggacgagagcgtcaacctcgcacggttggccattaattacgaccccctagagaaagccgatgagacacaggcccggaaacgactgtctcccgaccaaatgaagcattcccctaatctctcatttgagccgaacttttgccaggataaccctaggagccccacctcttccaaggagtcaccccaggaggctaagcgcccccagtattgctcagagactcaatctaagaaggtttttctgaacaaggccgccgatttcattgaagaattatcttctctgtttaaatcccattcttcaaaacgaattagacctcgagcatgcaaaaaccataaaagtaaactggaatcccagaacaaagtcatgcaggagaattctagctcctttagcgacctcagcgagagacgggagaggagctcagtgcctattcccattccagccgatacacgtgataacgaagtgaaccatgctctcgagcagcaggaagcaaagagaagagaagcagaacaagcagcttcggaggccgccggtggtgacacgaccccgggatcatccccctctagtttatattacgaggagccactcgggcagccaccacggtttactcagaaactgagatccagagaggtaccagaaggtaccagagttcagctggattgtatagtcgtgggaatcccacccccccaagttaggtggtactgtgaaggaaaggagttggaaaactcccctgacatacatattgtgcaggctggaaacctacattccctcactatcgctgaagctttcgaagaggacacaggccggtatagttgctttgcatcaaacatttatggaactgacagtacttctgctgaaatctacatcgagggagtgagcagcagcgactctgaaggggaccccaacaaagaggaaatgaatcggattcagaagcctaacgaagtgtcctcgcctcccactacttctgcagtgattcccccagcagtgccccaagcccagcacctggtagcccaacctcgggtggccactatccagcaatgccagtctccaactaactatctgcagggcctggatggcaagcctatcatcgcagctcctgtgtttacaaaaatgctacagaacctcagtgcgtccgagggccagctcgtggtgttcgagtgtcgtgtgaagggtgcccccagcccaaaggtggagtggtaccgcgaaggcactttgatcgaggactcccccgattttcgaatattgcagaaaaaaccccgttccatggccgagcccgggaaggacgattttaacttcaatctgcttgtgtacgagtag

SEQ ID NO: 90115 - DNA, 3963 bp, Artificial Sequence
  derived and/or modified sequence
atgcaggacgacagcatcgaggccagcaccagcatcagccagctgctcagggaatcttatcttgccgagactcgacacaggggaaataatgaacggtccagagctgaacccagctcgaacccctgccatttcggttcgccaagtggagccgctgagggtggaggaggacaggatgacctgcccgacttgtccgcattccttagtcaggaggagctggacgagagtgttaacctcgccaggctggctatcaattatgaccccctcgagaaagctgatgaaactcaagccagaaaaaggctgtcacccgaccagatgaagcactctcccaacctgtctttcgagccaaacttctgccaagataatccgagatcccccacatcctccaaggaatctccgcaggaggccaaaagaccccagtactgcagcgagacccaatctaagaaggtatttcttaacaaagctgctgatttcatcgaagagttgagctctctattcaagtcccacagttccaaacgcatccgtccccgggcgtgtaaaaaccacaagagcaaactggagtcacagaataaggttatgcaggaaaactcctctagcttcagcgatctatcagagcgaagggaacgatcttcagtgcccatccccatcccggctgacactagagataatgaagttaaccacgccctggagcagcaggaggccaagcgcagagaggcggaacaggctgcaagcgaggccgcgggcggcgacaccacgcctggatcctctccttccagcctctactatgaagaaccgctgggccagcctccaagattcacccagaagctgagaagtagagaggttccagaaggaacccgagtgcaactagattgcatcgtcgtggggattccccctccacaagtcaggtggtactgtgagggtaaagagctggagaactctccggacatccacatagtgcaggcagggaacctgcacagcctgacgatcgccgaggccttcgaggaagacaccgggaggtattcatgctttgcatcgaacatctatggcaccgactccacatctgccgagatctatatcgagggcgtaagcagctccgacagcgagggggacccaaataaggaagaaatgaatagaattcaaaagcccaatgaagtgagctccccccccaccacctctgcagttatcccccccgctgttccccaggcacagcacttggtagctcagcctcgggtcgcaaccattcagcaatgccagtcccccacaaactatcttcagggactggatggcaagccgattattgcagcaccggtgtttaccaagatgttgcagaacctctctgctagcgagggacaactggttgtgtttgaatgccgggtcaagggagccccttcccccaaagtggaatggtatagggaaggcaccctgatcgaggactccccagatttccgcatcctgcaaaaacggccagtttgtatggagcatatagaagagatttgcacgctggtcatcgccgaagtattcgcagaggacagtggatgtttcacctgcacagcaagtaacaagtacggaacagtctcgtccatagcccagctgcatgtacgcggaaacgaggacttgagcaacaatggttctctgcactccgcaaatagcactactaacctggcagcaattgaacctcagccatccccaccacactcggagcccccatcagtcgagcaacctcctaagcctaagctagagggtgttttagtcaaccacaatgaacctcgatcatcctcccggatcggtcttagggtacattttaatcttcctgaggacgacaaaggcagtgaggcctcatccgaggcaggagtcgtcactactagacaaacaaggcccgattccttccaagagcgctttaatggccaggccactaagactcccgaaccaagttctcctgttaaggagcctcctcctgtactggctaagcctaaactcgattcaactcagctgcagcagctccataatcaggtactcttggaacagcatcagctgcaaaaccccccccctagctcacccaaggagtttcccttctctatgacagtgctaaatagcaacgctcctccggctgtcacaacgagcagcaaacaggtaaaggccccatccagtcaaactttctctctggcaagacctaagtatttctttcccagtaccaacacaaccgctgccactgtggccccatcatcttcacccgtgttcaccttatctagtacccctcagacaatccagcgaaccgtttcgaaagaatccctgttagtgtctcatccctctgtgcaaacaaaatcacctgggggacttagtatccagaacgaacctcttccaccaggccccactgagcccactccccctccttttacctttagcattccttctggaaatcagtttcagccccgttgcgtgtctcctattccagtgagtcctacatcaagaatccagaatcctgtcgcttttctgtcttccgtgttaccttccttgccagccattccccccactaacgcaatgggcctacctcgttcagccccttccatgcccagccagggcctcgctaaaaagaatactaaaagtccccagccagtgaatgatgataatataagagaaactaaaaacgcagtaatacgggatctggggaaaaaaatcacattttccgatgttagaccaaatcaacaggagtacaagatctcttccttcgaacagagactcatgaacgagattgaattccgacttgagaggactccagtggacgagtccgatgatgaaatccagcacgacgaaatccccaccgggaagtgtatcgcccctatttttgacaagaggcttaagcactttagagtgacagagggatcccccgtgacctttacttgtaagattgtggggatccctgtaccaaaagtgtactggttcaaagacggcaagcagatttctaagagaaatgagcattgcaagatgcgtagagagggggacggaacttgcagtctgcatatcgagtccacaacttcagacgacgatggaaactatacaattatggccgctaatcctcaaggccgcatatcttgctccggccaccttatggtacaaagcttgccgatccgaagccgcctcacttcagccggccaatcacaccggggccggtcaagagtgcaggaacgcgacaaggagcctttgcaggagaggttcttccgaccccattttctccaagcacctggggatatggtggcacacgagggccggctgtgtaggctcgactgcaaggtgtccggcttgccgcccccggagttgacctggcttctcaacggacagcccgtgcttcccgatgcttcccataagatgctcgtacgagagaccggggtgcactccctactgatcgaccccctcacacaaagagatgctggtacctataaatgtattgcaacgaataagaccggccaaaacagtttcagcctggaactgagcgtggttgccaaagaagtcaagaaggctccggtgatcctggagaagttgcagaactgcggcgttcctgaaggccacccagtcagacttgaatgtagggtgattggaatgccccccccagtattctactggaaaaaagataacgagaccatcccttgtaccagagagcgcatttccatgcaccaagataccacaggctacgcctgccttcttatccagccagcaaagaagagcgatgccgggtggtatactctatccgccaagaacgaggctgggatcgtgagctgtacagcacgccttgacatttacgctcagtggcaccaccagatccccccacctatgagcgtccgcccgagtggcagcagatacggctctcttacttcaaaaggtctagacatattttcagctttcagttctatggaaagcaccatggtctactcttgttcctccagaagcgtagttgagtctgatgaattatag

SEQ ID NO: 90116 - DNA, 3963 bp, Artificial Sequence
  derived and/or modified sequence
atgcaggacgattccatcgaagccagtacctcaatcagccagcttttaagagagagctacctggccgaaacacgacatcggggtaacaacgagcggtctagggccgagccgtccagcaatccctgtcattttggctcaccctctggtgccgctgaaggcggtggaggccaggatgatctgcccgacctctccgcgtttctgtcacaggaggaactagacgaaagcgtgaatttggctagattggctattaactacgatccactggagaaagccgatgaaactcaggcccgaaaacggctgagcccagaccagatgaagcacagccccaacctgagcttcgagcccaatttttgccaagataatcccaggtctcccacgtccagcaaagagagtccacaggaggctaagagaccacagtactgttcggagactcagagcaagaaggttttcctgaacaaggccgcagacttcatagaggaactgtccagccttttcaaaagccattcatccaagagaatccggccacgcgcatgtaaaaatcacaagtccaagctcgagagccagaacaaagtgatgcaagaaaacagttcaagcttttcagatcttagcgaaagaagggagagatcatcagtcccaattccgatacccgctgacacccgagataatgaggttaaccatgctctggaacaacaggaggccaagcgacgggaagccgagcaggccgcaagtgaagccgctggaggcgataccacacccggttcctcccccagctctctctattatgaggagccattagggcaaccaccaagatttacacagaagcttaggagccgagaagttccggaaggaacacgggttcagctggattgcatcgtagtcggaatcccaccccctcaagtgaggtggtattgcgaaggaaaggaattggaaaacagcccagatatacatatagtccaggcagggaatctccactcactaaccatcgcggaggctttcgaggaagacactggaaggtactcatgcttcgccagcaatatctatggcacagactccacaagcgcggagatctacatcgaaggcgtctccagttccgacagtgagggagaccccaataaggaggaaatgaatcggattcagaagccaaacgaggtatcatccccgcctaccacatccgccgtaatcccacccgcagtgccccaagcccaacatctggtggcgcaaccacgggtggctaccatccagcagtgccagtcgcccaccaattacctgcagggccttgacggcaagccgattattgccgctcccgtctttactaaaatgctgcagaatctatctgcatctgagggacagctggtcgtcttcgagtgcagggtcaagggggcaccgtccccaaaagtggaatggtatcgagaaggtaccctaattgaagactcacctgatttccgcatcctgcagaagaagcctagatctatggccgagcctgaagagatctgcactctggttatcgctgaagtatttgccgaggactctggatgttttacctgtacagcatccaacaaatacggaaccgtttccagcatcgcacaattacacgtcagaggcaacgaggatctttccaataatgggtcattgcacagcgcaaactcaacaaccaatttagctgccatcgagccacagccttcccccccacatagcgaaccccctagcgtggagcagcccccaaaaccaaaattggagggcgtgctggtcaatcataacgaacccagaagtagctccagaataggcctgagagtgcatttcaatctcccggaagatgacaaaggaagtgaagcgtcatccgaagctggcgtcgtcacaactcgacagaccagacccgattctttccaggaacgtttcaatggccaagccaccaagacacctgaaccatcatcccccgtgaaagaaccccctcctgtactcgccaagcctaagctggattcaactcagcttcaacagctccacaaccaggtccttctcgagcagcaccagttgcagaatcctcctccgtcatcccccaaagaatttcccttctcaatgactgtactgaacagtaacgcacctccggctgttacgacttcaagcaagcaagtgaaggccccatccagccagaccttctcactcgcacggcctaagtattttttcccttccactaacacaaccgctgccacggtcgccccttcaagcagcccggtgttcaccctgtcaagcacaccccagaccattcagcggacagtgtccaaggaaagcctgctagtttcccacccctctgttcagaccaaatcccccggaggtctgtctattcagaatgaaccgttgcctccgggtcctacggaaccgacccccccaccattcactttcagcattccgtccgggaaccagtttcagcctcgatgcgttagccccattcccgtgtcccccaccagccggatccagaaccccgtggccttcttaagctccgtgcttccgtcactgccagccatcccccctaccaatgctatgggacttccaagatccgcaccctctatgcctagtcagggcttggctaagaagaatacgaagagtcctcagccagttaacgatgataatatcagagagactaaaaacgcagtgatccgcgatctgggtaagaaaatcactttttcagacgtccgacccaaccagcaggaatacaagatttcttcatttgaacagaggttgatgaacgaaatagaatttcgattagaaaggacccccgttgacgaaagcgacgatgagatacagcatgacgaaatccccaccgggaaatgcatcgccccaatatttgacaaacggttgaaacacttccgcgtaaccgagggttcgccggttacatttacgtgcaaaatcgtgggaatccctgtgcctaaggtgtactggttcaaggatgggaagcaaatcagtaaaagaaatgaacactgcaagatgcgccgagaaggggacggaacctgttctttacatattgagagcactacaagcgacgatgacggcaactacaccataatggccgctaatccacagggacggatttcctgcagtggacaccttatggttcagtctctgcctatccgttctcggctgaccagcgctggccagtcacacagaggcagatctagggttcaagagcgggataaggagcccttgcaggaaaggttttttcgaccccatttcctgcaggcccctggggacatggttgcccacgaaggaagactctgcagactagattgcaaagtttccgggctgccgcctcctgaacttacatggttgctgaatggtcagccggtgctaccagacgcttctcacaaaatgttagtgcgcgagaccggcgtccactctctgctcattgaccccctgactcagagagacgccggtacctataagtgcatcgccactaataaaaccggtcaaaactcattttcattggagttatccgtggtagcgaaagaggtgaaaaaagcaccagttatactggaaaagctccagaattgtggggtacctgagggccacccagtgcggcttgaatgcagggtcattggaatgcctcctcctgtcttctactggaagaaggacaatgaaacgataccttgtaccagagagagaatctccatgcatcaggacaccactggatatgcttgtctgctgatccagcctgcaaaaaaatccgatgccggatggtacaccctgtccgctaaaaacgaagccggaatcgtgagctgtactgctcgcttggacatctacgctcagtggcatcatcagatcccgccacccatgtccgtccgccctagtggctctcggtacggcagtctcacaagcaaggggttagatattttttctgcgttctctagcatggagtccaccatggtgtattcttgttcaagcagatcggtagttgaatcagatgagctgtag

SEQ ID NO: 90117 - DNA, 1524 bp, Artificial Sequence
  derived and/or modified sequence
atgcaggatgactccatcgaggcatctacctccatcagccagctgcttcgggaatcgtatctcgctgaaacgaggcaccgtggcaacaatgaacggagtagggccgagccttccagcaatccctgccactttggttccccttcgggagcagcggaaggcggaggcggtcaggacgacttgccagacctctctgcttttctttcccaggaggagcttgatgaatcagtaaatctggcacgtttagcaatcaactatgatccgctggaaaaggctgatgaaacccaggcacgcaagagattatctcccgatcagatgaaacattcccccaacctgtcgtttgagcctaacttctgtcaggataacccgaggagtccaactagttcaaaagaatctcctcaggaggctaagcggcctcaatactgttccgagactcagtctaagaaggtatttctgaataaggctgctgatttcattgaggagttgtcctccctttttaaaagccattcaagtaagaggatacgcccaagggcatgcaaaaaccacaaatctaagctggagagtcagaataaggtcatgcaggagaacagctcttcattctccgatctatctgaacggagagaacggagttcagtgcctatccctattcccgctgataccagggataatgaggtgaatcatgccctggagcagcaggaggcaaagcgacgggaggcagagcaggcagcttccgaggcggcagggggagacacgacaccgggatcatcaccctcttccctgtactatgaagagccacttggccagccgcctcgttttacacagaagctgcggagcagagaagtgcccgaaggaacacgagtccagcttgactgcatcgtggtcggaatcccccctcctcaggtgcgatggtactgtgaaggaaaagagcttgaaaactccccggatattcacattgtccaggccggtaaccttcactctctgacaattgctgaagcgttcgaagaggacaccggaagatattcatgttttgcctcgaacatctacggaacggattccaccagtgctgaaatctacatcgaaggcgtctcatcttctgactcagaaggcgacccgaacaaggaagaaatgaacaggattcagaagccgaacgaggtctcatcccccccaaccacaagcgctgtgatcccgcctgccgtgcctcaggctcagcacctggtggcacaaccaagagtggcaacaatccagcagtgccagagccccacgaattacttgcaaggcctcgatggcaaacctatcatcgccgctcctgtatttacaaaaatgctgcagaatttgtccgcctcggaaggccagctcgtcgtatttgagtgtagagtaaaaggggcaccaagcccaaaagtcgagtggtatagagaaggaacactgattgaggacagtcctgacttccggatcttgcagaagaagccaaggagcatggcagaacccggtaaggacgacttcaacttcaacctcctcgtctacgaatag

SEQ ID NO: 90118 - DNA, 3963 bp, Artificial Sequence
  derived and/or modified sequence
atgcaggacgattccatcgaagcttctactagtatcagccagctactgagagagagctaccttgcagagaccaggcaccgcggtaataacgagaggagcagagcagaaccctcgtctaacccttgccacttcggatcaccttccggtgctgctgaagggggaggaggccaggacgacctccccgatctgtctgctttcctgtctcaggaggaactggatgagagtgttaacctggcaaggctagccatcaattacgatccattggagaaggcagatgagacacaggcacgaaaacgcctctcccccgaccagatgaagcacagtccaaatttgagcttcgagcctaacttctgtcaggataatccccgttctcccacatcgagtaaggagtctcctcaggaggcaaaaaggccacaatactgttcggagactcaaagtaagaaggtattcctgaataaagcggctgatttcatcgaggagctaagttccttattcaagagccactctagcaaaaggatacgcccacgcgcttgtaaaaatcacaaatccaagcttgagtcacagaacaaggtgatgcaagagaacagcagcagtttctctgacttgtcagaacggagggagcgaagctctgtccccatccctatcccagcagacacccgagataacgaagtcaaccatgccttagagcaacaagaagccaagagacgcgaagcagaacaagccgcttcagaggccgcaggaggtgacacgactcctgggtcttccccctcttcgttatactacgaagaacccctgggacagcctcctcgatttacccagaagctccgctctagggaggttccagaagggacacgtgttcagctcgactgtattgtggtgggcattcctcccccacaagttcggtggtattgtgagggcaaggagttggagaatagccccgacatacatatcgtgcaagcgggaaacctccactctcttactatcgcagaagcctttgaagaggacaccggccgatattcttgctttgcaagtaatatttacggaacagatagcacctctgccgagatctacatcgagggcgtgtcatccagcgacagcgagggagaccctaacaaggaagagatgaacagaatccagaagccaaatgaagtcagttcaccacccaccactagtgccgtgatacctcctgccgttccccaggcccaacacctcgtcgctcagccccgagtcgcgactatccaacagtgccagtcaccaacgaactacctgcaaggtctagacggcaaaccaatcatagcggctcctgtcttcactaagatgctccagaatctctccgcatccgagggccaactagtcgtgttcgagtgtcgtgttaagggcgctcccagcccaaaggtggaatggtaccgcgagggaaccctgatcgaagacagccccgactttaggatcctgcagaaacgccctgtttgtatggagcacatagaggaaatatgtactcttgtgattgctgaagtgttcgctgaggattccggctgctttacttgcaccgctagcaacaagtatggcactgtttcctcaatagcccagttacatgtacgcggaaacgaagacctttccaacaatggcagccttcattctgctaacagtaccacaaatctcgccgcaattgagccacagccttccccaccccattctgagccaccgagcgtggagcagcctcctaagcctaagttagagggtgtgcttgtgaatcacaatgagcctcgctcaagttctaggatcggactgagagtgcactttaaccttcctgaggatgataaaggcagcgaggcctcgagcgaggccggagtggtcaccaccagacagactaggcccgactctttccaagagagattcaatggccaggctaccaagacgcccgagccgagcagtcccgtcaaagaacccccaccagtcctggcaaaacccaaactggactcaacccaattacagcagctgcataatcaggtcctgctcgaacaacaccagctgcaaaaccccccacccagcagcccgaaagagttccctttttccatgaccgtgctgaactccaatgccccacccgcagtgaccaccagcagcaagcaggtcaaagcaccgagtagccaaacattctcgcttgcaagaccgaaatatttcttcccttctaccaatactactgcagctaccgttgcccctagcagttcccccgtgttcactctttctagcacaccacagaccatccagagaacggtgagcaaagagtctctgctggtcagtcacccctctgtgcaaactaagtctccgggagggctcagtattcagaatgagccattaccacccggacccacagaacctacgcctccaccattcacctttagcataccctctggcaaccagtttcagcctagatgcgtgtctcctatcccagtttctcccacctcaagaattcagaatccggtggctttcctctccagcgtgctcccatctctgcctgcaatcccaccaacaaatgcgatgggactcccgcgtagcgctccttccatgccatctcaaggactggctaagaaaaacaccaaatctccacagccggtgaacgatgacaatatcagggagacgaagaatgccgtgattcgcgatctcgggaaaaagattaccttttccgacgtcaggcctaaccagcaggagtataaaattagtagctttgagcaaagactgatgaatgaaattgagtttagattggaaaggacacctgtggatgagagcgatgacgagatccagcacgacgagattcctactggcaagtgtatcgcaccgatcttcgataagcggcttaagcactttcgagtgactgaaggaagtcctgttacttttacctgcaaaatcgtcggaattccggtcccaaaggtctactggttcaaagacggtaaacaaatctccaaacgaaatgaacactgcaaaatgcgcagagaaggcgatggaacatgtagtctccacatcgagtctacaacttcagacgatgatgggaactacaccattatggccgcaaatcctcagggccgtatttcttgctcaggacatctgatggtgcagtcactgcccataagatccaggctcacgtcggccggacagtcacaccgaggcaggtcccgcgtacaagaaagagacaaagagccactgcaggaaagatttttccggcctcacttcctccaagcccctggtgacatggtggctcacgaaggcagactgtgtcggctagactgcaaagtgtcaggtcttcctccgccagagctgacgtggctgctcaacgggcagcccgttctccccgacgcctctcacaaaatgttagtacgcgaaactggggtgcattcacttctgattgacccactgactcagagggacgccggaacatataaatgcattgcaaccaataaaacagggcagaactcgtttagtctggaactgagcgtggtcgctaaagaggtcaaaaaggcacccgttattctcgaaaaactgcaaaattgcggtgtccctgaggggcacccagtcaggttggagtgcagagttatcggcatgccaccccctgtgttctactggaaaaaggacaacgaaactatcccatgtaccagggaacggatcagcatgcaccaggacaccaccggatacgcatgcctcctcatccaacccgctaagaagtcagatgcaggctggtacacgcttagcgccaagaacgaagccggaattgtatcttgcacggcgcgtctcgacatctatgcccagtggcaccaccagattcctccccctatgagtgtgagaccaagcgggtctaggtacggtagtctgacaagcaaaggactggatatatttagtgccttctcctccatggaatccactatggtttatagttgttcctctagaagcgtggtggaatcggacgagctttag

SEQ ID NO: 90119 - DNA, 5697 bp, Artificial Sequence
  derived and/or modified sequence
aaaaataatgccatttttttgaatgatgaactatggtataatgcatttagtgttcattccaaacgtcaatcaataaataacatgggcctctagctataagggaaattctataggtaaaagaactgattgacccccacccccataggtgctgtcctgctatggaatccctttgctcagttttctcctgtccaatcaggtggaatgtttcacaggcacatggtttatacagctcaaaataacttgggacctgtgagctgacaaatgctctggctccggtggtgacaggttgtccagcttcttacagccatcttcactgaaactaaggttaactcctcactctctatggacggctactctctatttccaagggcgtgaagaatttccctcttctcctgtgctttcatctaaaagttctccctggataattatcattgcagtggagtgcctggattggacatcctcatctgggtcaactaaaaaaagaaagcatgcaagacgacagcatagaagcttctacttccatatctcagcttctaagagagagctatttagctgaaaccagacatcggggaaacaatgagaggagtcgagcggagccctcctccaacccttgccatttcggcagtccttctggggccgctgaaggaggcggaggccaagatgaccttccagatctttcagcctttctgagccaagaagaattagacgaaagtgtcaatttggcaagactggccatcaattacgaccctttggagaaggcagatgaaactcaagctagaaaacgactttctcctgatcagatgaaacactcacctaatttaagttttgagcctaacttctgccaggataaccctcgaagtcccaccagctctaaagaaagcccccaggaggcaaaaaggccacagtattgttctgaaacccagtccaaaaaagtatttttaaataaggctgccgacttcattgaagagctatcctcccttttcaaatcccacagctccaaaaggattagacctcgtgcctgcaaaaaccacaagagtaaactggaatctcaaaacaaagttatgcaggaaaacagctccagtttctcagatctgtcagaaagacgagaaagatcttctgttcccatccctatccctgcggataccagggataatgaagtgaatcacgccctggaacagcaggaagccaagaggcgtgaagcggagcaggctgccagtgaggcggctggtggagacactacaccagggtcttccccttcatctctgtactatgaagaacctctggggcaacctccccggttcactcaaaagttacggagcagagaagttccagaaggaactcgagtacagttggattgcatagtggtaggaattccaccacctcaagtaaggtggtactgtgaaggcaaggagcttgaaaattccccagatattcacatcgtccaggcaggaaatctgcactcactgaccattgcggaagcctttgaagaggacacaggacgctattcctgctttgcttctaacatctatgggacagattcgacttctgctgagatttatatagaaggggtttcttcttctgactcagaaggcgaccctaacaaggaagagatgaatcgaatccagaagccaaatgaggtgtcatctcctcccactacctctgcagtcattcctccagcagtaccccaagcccagcatttggtggcccaacctcgtgtggcaaccatccagcagtgtcagagccccaccaattacttgcagggattggatggaaaacctatcattgcagctcctgtgtttacaaagatgctacaaaatttgtcagcttctgagggtcagctggttgtctttgaatgcagagtaaaaggagctccatctcctaaggttgagtggtatagagaagggactttaatagaagattctccagattttaggattttacagaaaaggcctgtctgcatggagcatatagaggagatttgcaccttggtcattgctgaggtgtttgcagaagattctgggtgcttcacatgtactgcaagcaacaaatacggcacagtgtcaagcattgcacagctgcacgtgagaggaaatgaggacctcagcaacaacgggtctcttcactcagccaactctaccaccaacctggcagctattgagccacagccctccccaccccactcagagcctccatctgtggaacaaccccccaaacccaaactcgagggggttctggtgaaccacaatgagccccggtccagctccaggattgggcttcgtgtgcacttcaacctgcctgaagatgacaaaggaagtgaagcatcctccgaggctggtgtggtgaccaccagacagaccaggcccgattctttccaggagaggttcaacggacaggcaacaaaaaccccagagccttcttcccccgtgaaagagccccctccagttctggccaaacccaaacttgattccactcagttacaacagcttcataaccaagtcttactggaacaacaccaattgcaaaacccacctccttcatctcctaaggagtttcctttcagcatgactgttttgaactccaatgctcccccagcggtgacaacatccagtaagcaggtgaaggctccttcatcacagacgttcagcttggcccggccgaagtatttcttcccctccacgaacaccaccgcagcaactgtggccccttccagctctccggtgttcactttgagcagcactcctcaaactattcagaggacagtgagcaaagaaagcctcttagtgtctcacccctctgtgcaaaccaaatctccaggagggctttccatccaaaatgagccactcccaccaggcccaacagaaccaacaccaccaccattcacattttccatccccagcggaaaccagtttcagccccgctgtgtgtccccaattcctgtctctcctaccagccggattcagaacccagtggctttcctcagctctgttctgccttctctccctgccatcccacccacaaatgccatggggctgcctagaagtgcaccatccatgccatcccagggattagcgaagaaaaatacaaagtctcctcaaccagtgaatgatgataacattcgtgaaactaagaacgcagtgattcgagacttggggaaaaaaataactttcagtgatgtcagaccaaaccagcaggagtacaaaatttcaagctttgagcagaggctgatgaatgaaatagagtttcgcttggaacgtactcctgttgatgaatcagatgatgaaattcaacatgatgagatccccacgggcaagtgtattgctcccatctttgacaagagactcaagcacttccgggtcacagaaggctctccagttacattcacctgcaaaattgttgggatacctgttccaaaggtttactggttcaaagatgggaagcagatttctaagagaaatgagcactgcaaaatgaggcgagaaggagatgggacatgctctctgcacattgaatccactaccagtgatgacgatggcaactacaccatcatggcagccaacccccaggggagaatcagctgttctggccacttgatggtacaaagtttgcccattcgcagtcggctaacctctgctggtcagtctcacaggggaagatcccgagtgcaagaaagagacaaagagcccctacaggaacgctttttccgaccacatttcctgcaggctcctggggatatggtagctcatgaggggcgcctctgtcggctggactgtaaggtgagtggtttaccgcccccggagctgacatggctactcaatggccaacctgtgctaccagatgcctcccacaagatgctggtcagggagaccggagtccactctctgctcattgacccactcactcagcgcgacgcagggacctataagtgcatcgctaccaacaaaaccgggcagaattcttttagtctggagctctctgtagtagccaaagaggtgaagaaagcacctgtgatcctggagaaactacagaactgcggtgttcccgaaggccaccccgtgagactggagtgccgcgtgataggcatgcccccacctgtgttctactggaagaaagacaatgagaccatcccttgcaccagagagaggatcagtatgcaccaggacacaacagggtatgcctgccttctcattcagccagccaagaaatcagacgctggatggtacacgttgtcagccaagaatgaagccggcatcgtgtcgtgcactgccaggctggatatatacgctcagtggcaccatcagatcccaccgcccatgtctgtccggcccagtggcagtcgctacggatctctcaccagtaaaggacttgacatattttctgccttttcctccatggaaagcacgatggtgtattcatgctcttctcggagtgtagtggagagtgatgaactttaagaatgtctaggtacctgctgtgtaagagagcggactgtggagggggaatgagaacaagccagacttggtggtttccaagcaaccgaagttgagtaagttcccacactgctggacctgtggcaaagagtgctttgaataagtcagctagggattcttgcagtctcagctgagggagaaaggtagggctgtgccttctaaagattccaacagagatgtgagaagataatacagatgaaccaaagatgtcacacagttgccatccactgctttgggaaaaaactagcatgctcccctgctccctgttgtgttagggatgtttaggtcatactaggagcaattaggagccatatgcctgggctgagaagagctaggcagtagtgaccttaggatatgactaactcaccaaacaatgccaaggagaaaggcggacaggtcaccatcacctttcatcgattacatgtatagcagtagttttggtgaattcaccaaatcagcttccacttagcattaggaggtcatgccatacaactcacgtatgcgggcaaacacttttgatttgcatatcctgggtgtactgagccacataataaggtgtcaaaatgtgcttgagattccaaaaacttgctgaaacacttgatattgcacagtgcacttattttgtggccaaagcatggccttaccagcttgtctgcactattttcttttgggtggtgactgtttttttctgactttgcatatccctagacactagaactaaaggattggtaataaaccaatcagaaagaaatcctctgtggggtcactttaaaaactactagcttcaactaccacttacaaaatgtgcaagagtcatcatttgcccataaaatacacctcatgggctcctacccctttccccaaaagtctgaaagtgtaggaggaaggaagagatacaaacaaggagaggaaatgatgggagagtgttgtttttgtcacttgccccagcagagcaggggttttggaaggagaggtctttaatagctttgaaatgctttgagatcattggtcaaattgcattttctatgtagagaatattctgctaggtggaaaagttgggagaaaggggaatatgcatctttattctaatcaccaattcaaaccctgcctcttaaggaatttttagacttaagttcactgtgatatccctagtacctagaagagtacctagcacaaagtagacattcaataaatatttgctggttgaatg

SEQ ID NO: 90120 - protein, 1045 aa, Artificial Sequence
  derived and/or modified sequence
MLTVQVKTSSAIELPDSLAFLWIIPMWYCEGKELENSPDIHIVQAGNLHSLTIAEAFEEDTGRYSCFASNIYGTDSTSAEIYIEGVSSSDSEGDPNKEEMNRIQKPNEVSSPPTTSAVIPPAVPQAQHLVAQPRVATIQQCQSPTNYLQGLDGKPIIAAPVFTKMLQNLSASEGQLVVFECRVKGAPSPKVEWYREGTLIEDSPDFRILQKKPRSMAEPEEICTLVIAEVFAEDSGCFTCTASNKYGTVSSIAQLHVRGNEDLSNNGSLHSANSTTNLAAIEPQPSPPHSEPPSVEQPPKPKLEGVLVNHNEPRSSSRIGLRVHFNLPEDDKGSEASSEAGVVTTRQTRPDSFQERFNGQATKTPEPSSPVKEPPPVLAKPKLDSTQLQQLHNQVLLEQHQLQNPPPSSPKEFPFSMTVLNSNAPPAVTTSSKQVKAPSSQTFSLARPKYFFPSTNTTAATVAPSSSPVFTLSSTPQTIQRTVSKESLLVSHPSVQTKSPGGLSIQNEPLPPGPTEPTPPPFTFSIPSGNQFQPRCVSPIPVSPTSRIQNPVAFLSSVLPSLPAIPPTNAMGLPRSAPSMPSQGLAKKNTKSPQPVNDDNIRETKNAVIRDLGKKITFSDVRPNQQEYKISSFEQRLMNEIEFRLERTPVDESDDEIQHDEIPTGKCIAPIFDKRLKHFRVTEGSPVTFTCKIVGIPVPKVYWFKDGKQISKRNEHCKMRREGDGTCSLHIESTTSDDDGNYTIMAANPQGRISCSGHLMVQSLPIRSRLTSAGQSHRGRSRVQERDKEPLQERFFRPHFLQAPGDMVAHEGRLCRLDCKVSGLPPPELTWLLNGQPVLPDASHKMLVRETGVHSLLIDPLTQRDAGTYKCIATNKTGQNSFSLELSVVAKEVKKAPVILEKLQNCGVPEGHPVRLECRVIGMPPPVFYWKKDNETIPCTRERISMHQDTTGYACLLIQPAKKSDAGWYTLSAKNEAGIVSCTARLDIYAQWHHQIPPPMSVRPSGSRYGSLTSKGLDIFSAFSSMESTMVYSCSSRSVVESDEL

SEQ ID NO: 90121 - protein, 1045 aa, Artificial Sequence
  derived and/or modified sequence
MLTVQVKTSSAIELPDSLAFLWIIPMWYCEGKELENSPDIHIVQAGNLHSLTIAEAFEEDTGRYSCFASNIYGTDSTSAEIYIEGVSSSDSEGDPNKEEMNRIQKPNEVSSPPTTSAVIPPAVPQAQHLVAQPRVATIQQCQSPTNYLQGLDGKPIIAAPVFTKMLQNLSASEGQLVVFECRVKGAPSPKVEWYREGTLIEDSPDFRILQKRPVCMEHIEEICTLVIAEVFAEDSGCFTCTASNKYGTVSSIAQLHVRGNEDLSNNGSLHSANSTTNLAAIEPQPSPPHSEPPSVEQPPKPKLEGVLVNHNEPRSSSRIGLRVHFNLPEDDKGSEASSEAGVVTTRQTRPDSFQERFNGQATKTPEPSSPVKEPPPVLAKPKLDSTQLQQLHNQVLLEQHQLQNPPPSSPKEFPFSMTVLNSNAPPAVTTSSKQVKAPSSQTFSLARPKYFFPSTNTTAATVAPSSSPVFTLSSTPQTIQRTVSKESLLVSHPSVQTKSPGGLSIQNEPLPPGPTEPTPPPFTFSIPSGNQFQPRCVSPIPVSPTSRIQNPVAFLSSVLPSLPAIPPTNAMGLPRSAPSMPSQGLAKKNTKSPQPVNDDNIRETKNAVIRDLGKKITFSDVRPNQQEYKISSFEQRLMNEIEFRLERTPVDESDDEIQHDEIPTGKCIAPIFDKRLKHFRVTEGSPVTFTCKIVGIPVPKVYWFKDGKQISKRNEHCKMRREGDGTCSLHIESTTSDDDGNYTIMAANPQGRISCSGHLMVQSLPIRSRLTSAGQSHRGRSRVQERDKEPLQERFFRPHFLQAPGDMVAHEGRLCRLDCKVSGLPPPELTWLLNGQPVLPDASHKMLVRETGVHSLLIDPLTQRDAGTYKCIATNKTGQNSFSLELSVVAKEVKKAPVILEKLQNCGVPEGHPVRLECRVIGMPPPVFYWKKDNETIPCTRERISMHQDTTGYACLLIQPAKKSDAGWYTLSAKNEAGIVSCTARLDIYAQWHHQIPPPMSVRPSGSRYGSLTSKGLDIFSAFSSMESTMVYSCSSRSVVESDEL

SEQ ID NO: 90122 - protein, 72 aa, Artificial Sequence
  derived and/or modified sequence
MLAQKAEEKENHCPTMLRPLSHRTVTGAKPLKKAVVMPLQLIQEQAASPNAEIHILKNKGRKRKGANITTGY

SEQ ID NO: 90123 - DNA, 219 bp, Artificial Sequence
  derived and/or modified sequence
atgctggcccaaaaagctgaggagaaagaaaaccattgcccgactatgcttcgacccctatcgcacaggacagtgacgggtgcgaaacctctgaaaaaggctgttgtgatgcctttgcagcttattcaggaacaagctgcttcccctaatgctgaaatccacatcctcaaaaataaaggtcgaaaaaggaaaggcgcaaacattactaccgggtactag

SEQ ID NO: 90124 - DNA, 1794 bp, Artificial Sequence
  derived and/or modified sequence
atggacagctgcagtcttgagatcgccaattggcggaatcaccaagaaacattaaagtaccagtttgatgctttttacggagagagatccacccaacaagatatttacgccggctccgtgcaacccatactgcggcacctgttagaaggccagaacgctagtgtcctcgcttatggcccaaccggtgctggcaagacacatacaatgcttggcagccctgagcagccaggtgtgattcctcgggctctcatggacctgctgcaactgaccagagaggagggcgctgagggacgaccatgggccttgagcgtaaccatgagttacctggaaatctaccaggaaaaagtcttggacctgctggatcctgcgtccggagacctggtcatacgggaggattgcaggggtaatatccttatacctggcttgtcccaaaaaccaattagctcttttgccgattttgaaaggcactttcttcccgccagtcgtaacaggaccgtgggtgctacacggctcaaccaacgctccagcagaagccatgccgttcttctagttaaggttgaccagagggagcgcctggctcccttccggcagcgtgagggcaagctatacctgatagatctggctggatctgaggataaccgcagaacaggtaataaagggctacgcctgaaagagagcggggcaataaacacctcactgttcgtgcttggtaaggtcgttgacgccctaaaccagggattgccccgcgtgccgtatagagactcaaaactcactagattgctgcaagactcactggggggatcagcacatagcatattgattgccaacatagcccctgagaggcgcttttacctggacaccgttagcgctctgaacttcgcagcccgcagcaaggaggtcatcaatagacccttcactaatgaatcattgcagcctcatgctctgggccctgtaaaactgagtcagaaggaactcctcgggccccctgaggccaagagagccaggggccctgaggaggaggagataggttcgcctgaaccgatggctgcacccgccagtgcttcccagaagctgagccctttgcagaaactctcttccatggatcctgccatgctcgagagactgctgtctctggatcggctgcttgcgtcacaggggtcacagggggcacccctgctgagtacccctaaaagggagaggatggtgctgatgaaaaccgtcgaagagaaggacctggaaatagaaagactgaaaaccaaacaaaaagaactggaggctaagatgctggcccaaaaggccgaggagaaagaaaaccactgtcccacaatgctcaggccgctgtctcatagaaccgtcaccggagctaagccactcaaaaaagccgtggtgatgccactccagctgatccaggagcaggccgcttctccgaacgccgagatacatattctgaaaaataaaggccggaagaggaaactcgaaagcctggacgccctcgaacctgaggagaaggcggaagattgctgggagctgcaaatttcccccgagctgctggcacacggcagacagaaaatcttggatctgttgaacgaaggtagcgctagggatctgagaagcctgcaacgcatcgggccaaagaaagcccaactcatagtgggttggcgcgaactgcacggccccttcagccaggtggaggacctggaacgagtggaaggcataacagggaaacaaatggaatcgttccttaaggccaatattttagggctggccgctggacagaggtgtggagccagctag

SEQ ID NO: 90125 - DNA, 1794 bp, Artificial Sequence
  derived and/or modified sequence
atggacagttgtagtcttgagatagccaactggcgtaaccaccaggaaactctgaagtatcagtttgacgctttctatggggaacgatcaacccagcaagacatctacgccggttccgtgcagccaattttgcgacatttgctagaaggacagaacgcctctgtgctcgcgtatggacccacgggtgctggcaagacccacaccatgctgggctcgcccgagcagcctggggttattcctcgagccctgatggatctgttacaactgactagagaggagggcgcagagggccggccttgggcgctgtccgtgactatgagctatctggaaatctaccaggaaaaggtgctggacctccttgatcccgcaagtggggatttagttatcagggaggattgcagaggtaatattctgatcccaggtctctctcaaaaaccaatctctagtttcgccgacttcgagagacactttctccctgccagtcggaatcggaccgtgggcgcgacacggcttaaccaacggtcatcccggtcccacgccgtgttgctcgtcaaagtggatcagagagagaggttggcgcctttccggcagcgggaagggaaattatacctcattgacctggctggctccgaagataatcgtaggacgggtaacaagggactcagacttaaggagtccggcgccatcaatacatcattgttcgtgctgggcaaggtggttgacgcgctcaaccaagggctcccacgcgtgccatacagagatagtaagctgacccgtttactccaagactcactgggtgggtcagctcattccatcctgattgccaatattgcacctgagcggcgtttttacctggatactgtgagtgccctcaattttgctgccaggtcaaaggaggtgatcaatagaccttttaccaatgagtctctgcagccccacgccctgggtcctgtgaaactctctcagaaagaactcttgggtccccccgaggcaaagagagctcgcggacccgaagaggaggaaattggctccccagagccaatggctgcccctgcaagtgcgtcacagaagctgtcaccactgcagaaattgtcttcgatggatccggctatgcttgagaggcttttgtccctggacagactgctggctagccagggttcgcaaggcgctccattgctgagcacacccaaacgggaaagaatggtgctcatgaagaccgtggaggagaaggatctcgaaattgaaagactgaagactaaacagaaagagcttgaggcaaagatgctggcccagaaagcggaggagaaggagaatcactgtccgacaatgctccgcccactctcccacaggaccgtgactggcgccaagccactgaagaaggctgttgtgatgcctcttcagctgattcaggagcaggcagcgtcaccaaacgcggagatacacatcctgaagaataaaggacggaagaggaaactcgagagccttgatgctctggaacctgaagagaaagccgaagattgctgggaactgcagatcagcccagaactgttagcccatggccgccaaaagatcctagacttattgaatgaggggtccgcacgcgacctgcggagcctgcagagaatcggtcctaagaaggcgcagttgatcgtcgggtggcgagaactacacggacctttttcacaggtggaagacctggagcgggtggagggcatcaccggaaaacaaatggaaagctttctcaaagccaatatactgggcctagcagccgggcaaaggtgcggcgcatcgtag

SEQ ID NO: 90126 - DNA, 219 bp, Artificial Sequence
  derived and/or modified sequence
atgctggcccagaaggccgaggagaaggagaaccactgccccaccatgctgcggcccctgagccacaggacagtgactggagccaagcccctgaagaaggctgtggtgatgcccctgcagctgatccaggagcaggccgccagccccaatgctgagatccacatcctgaagaacaagggcaggaagaggaagggggccaacatcaccaccggctactag

SEQ ID NO: 90127 - DNA, 1794 bp, Artificial Sequence
  derived and/or modified sequence
atggacagctgcagcctggagatcgccaactggaggaaccaccaggagaccctgaagtaccagtttgatgccttctacggggagaggagcacccagcaggacatctatgccggctctgtgcagcccatcctgcggcacctgctggagggccagaatgcctctgtgctggcctacggccccactggagctgggaagacccacaccatgctgggcagccctgagcagcccggggtcatcccccgggccctgatggacctgctgcagctgacccgggaggagggcgctgagggccggccctgggccctgtctgtgaccatgagctacctggagatctaccaggagaaggtgctggacctgctggaccctgccagcggggacctggtgatccgggaggactgccggggcaacatcctgatccctggcctgagccagaagcccatcagcagctttgctgactttgagcggcacttcctgcctgccagcaggaacagaacagtgggcgccacccggctgaaccagaggagcagccgcagccatgctgtgctgctggtgaaggtggaccagcgggagcggctggcccccttccggcagcgggagggcaagctgtacctgattgacctggccggcagcgaggacaacagaagaacaggcaacaagggcctgcggctgaaggagagcggggccatcaacaccagcctgtttgtgctgggcaaggtggtggatgccctgaaccagggcctgccccgggtgccctacagagacagcaagctgacccggctgctgcaggacagcctgggcggcagcgcccacagcatcctgattgccaacatcgcccctgagcggcgcttctacctggacacagtgtctgccctgaactttgctgcccggagcaaggaggtgatcaaccggcccttcaccaatgaaagcctgcagccccacgccctgggccctgtgaagctgagccagaaggagctgctgggccccccagaggccaagagggcccggggccctgaggaggaggagatcggcagccctgagcccatggccgccccagccagcgccagccagaagctgagccccctgcagaagctgagctccatggaccctgccatgctggagcggctgctgagcctggaccggctgctggccagccagggcagccagggcgcccccctgctgagcacccccaagcgggagaggatggtgctgatgaagacagtggaggagaaggacctggagattgaaaggctgaagaccaagcagaaggagctggaggccaagatgctggcccagaaggccgaggagaaggagaaccactgccccaccatgctgcggcccctgagccacaggacagtgactggagccaagcccctgaagaaggctgtggtgatgcccctgcagctgatccaggagcaggccgccagccccaatgctgagatccacatcctgaagaacaagggcaggaagaggaagctggagagcctggatgccctggagcctgaggagaaggccgaggactgctgggagctgcagatcagccctgagctgctggcccacggccggcagaagatcctggacctgctgaatgaaggcagcgcccgggacctgcggagcctgcagagaattggccccaagaaggcccagctgattgtgggctggagggagctgcacggccccttcagccaggtggaggacctggagcgggtggagggcatcaccgggaagcagatggagagcttcctgaaggccaacatcctgggcctggccgccggccagagatgtggggccagctag

SEQ ID NO: 90128 - DNA, 219 bp, Artificial Sequence
  derived and/or modified sequence
atgctggcccagaaggccgaggagaaggagaaccactgccccaccatgctccgacctctctctcatagaacagtcactggagccaaacctcttaaaaaagcagtggtcatgcccctgcagctgatacaagagcaagccgcatctccaaacgcagaaatccatatcttgaagaataagggacgaaaaaggaaaggggccaacatcactaccggttattag

SEQ ID NO: 90129 - DNA, 1794 bp, Artificial Sequence
  derived and/or modified sequence
atggacagctgcagcctggagatcgccaactggcggaaccaccaggagacacttaagtatcagttcgacgccttttacggcgagagatccacccaacaggacatttatgccggatcagttcagcccattctccgccatcttcttgaaggccaaaacgcgtcggtgctggcttatggaccaactggcgccgggaaaacacacacaatgctggggagccctgagcagcccggggtgatccctagggcactcatggacctgctccaactgactagggaagagggcgctgaaggaagaccatgggcccttagtgtaaccatgtcatacctggagatctatcaggagaaggttctggacctgttggaccccgcttctggagacctggtgatcagggaagactgtcgtggcaatatcctgattccgggcttatcacaaaagccaataagttcatttgcagactttgagcggcatttcttaccggcatctcgtaataggaccgtgggcgctacacgcctgaatcaaaggagctcacggagtcacgcggttctcctggtaaaagtcgaccagagggagcgactcgctccttttcgacagcgggaaggaaaattgtacctcatagatctagccggctctgaagataatcgcagaaccggcaataagggactcaggctgaaagaatccggcgcgattaacacgtccctctttgtgcttgggaaggtggtagacgctcttaaccaaggactgcctagagttccctacagggactccaaactgacaaggctgttacaggattccttaggggggagtgcacactccatcctgattgccaacattgctccggagcggaggttctacctggataccgtcagcgcgctaaattttgccgcccgctctaaagaagttatcaatcgccctttcaccaacgaatccctgcaaccccacgccctagggcccgtgaagctgtctcagaaggagttgttaggtcctcccgaggcaaagagggcccgcggacctgaagaggaggagatcggctcgcccgaaccaatggccgcacctgcaagtgccagtcagaagcttagtcccctgcaaaaacttagctctatggaccccgccatgctggagcggctgctttcgctcgatagactgctcgcctcccaaggtagccagggagcaccactcctgtcaactcccaaaagagaacgtatggtcctgatgaagaccgtcgaggagaaggatctagaaatcgagcggctgaaaaccaagcaaaaagagcttgaggctaaaatgctcgcccagaaggccgaagaaaaagagaatcattgccctaccatgctgagacccctgagtcaccgcacagttaccggggccaagcccctcaaaaaagctgtagtcatgcccctgcagctgattcaggaacaggccgcaagcccaaacgctgaaattcacatattgaagaacaaggggcggaaaaggaagctggaaagtctggatgcgctggaacctgaggaaaaggcagaagactgctgggagctgcaaattagccccgagctcctcgcccacgggcgccagaaaatccttgacttactgaacgaaggtagtgctcgggatctgagaagtctccagcggattgggccaaaaaaagctcagctcattgttggatggagggagcttcacggtccattttcccaagtcgaggacctcgaacgggtggaaggtataacaggaaaacagatggagagctttcttaaagctaatatactcggtcttgccgccggccaacgctgtggtgcttcctag

SEQ ID NO: 90130 - DNA, 1794 bp, Artificial Sequence
  derived and/or modified sequence
atggacagctgcagcctggagatcgccaactggcggaaccaccaggagaccctcaagtaccagtttgacgccttttacggagaacgttccacccaacaagacatttatgcaggctctgtacaacccatactacgtcatttactggagggccagaatgccagtgtattggcttacggcccaacaggagccgggaagacccatacaatgctagggtcacctgagcagcccggggtgatccctcgcgcccttatggatctccttcaactcacccgcgaggaaggagccgaggggcggccatgggcactatccgtcactatgtcatatctcgagatctatcaggaaaaggtactagacctgctggaccccgcctccggggatctggtgattcgcgaggattgtcggggcaacatcttgattcccggtctctctcagaaacccatcagcagcttcgcggactttgagcgccattttctcccggcatctagaaataggactgttggagcaacccgtctgaaccaaagatcgtccaggtcacatgccgttttactcgtgaaagttgatcagagggagcggctggcccctttcagacaaagggagggcaaattgtatctgatcgacctggcaggctccgaggacaaccgccggaccggcaacaaagggcttagactgaaggagagtggagctataaatacgagcctgttcgtacttggcaaagttgttgacgccctcaaccagggactgcctcgtgttccctaccgcgatagcaaattgacacggcttctgcaggacagtcttggtggttccgcccatagcatacttatcgctaacatcgctccagagagacgcttctacctggatacagtctcggccctcaactttgctgctagatctaaagaggtgataaatcggcctttcacgaatgagagcctgcagccccacgccctgggccctgtcaaattaagtcagaaagaactcctcggccctcccgaagccaagcgggctcgggggccagaagaggaggaaatcggcagccctgaaccaatggccgcgcctgctagcgcatcacagaagctttcccccctgcaaaaactgagctctatggaccccgcgatgctggagagactgctgagtctggacaggttacttgcatcacagggatcgcagggcgcaccactcctgagcacccccaaacgagaaagaatggttctgatgaaaactgtcgaggaaaaagatcttgagattgagcggctaaaaacgaagcaaaaagagctggaggcaaagatgctggcccagaaggccgaagaaaaagagaaccattgtcccaccatgttacggccactctcccacaggacggtaacaggagcaaagccattaaaaaaggcggttgtgatgcctctgcagttgatacaggagcaagccgccagccctaacgcggaaattcatattcttaagaataaggggagaaaacgaaaacttgaatctcttgacgccctcgaacccgaggaaaaagccgaggactgctgggaattacagattagccctgagttgttagctcatggacgccagaaaatcttagacctgctcaatgaggggtctgctagagaccttagatcacttcagaggattggccctaaaaaagcccaactcatagttggatggcgggagctacacggccctttttctcaagtcgaagacttagaacgcgtagagggcatcacgggcaagcaaatggaatcctttcttaaagctaacattctggggttggcggcagggcagcggtgcggagcttcttag

SEQ ID NO: 90131 - DNA, 219 bp, Artificial Sequence
  derived and/or modified sequence
atgctggcccaaaaggctgaggagaaggaaaaccattgccctactatgcttagaccactaagtcacaggaccgtgaccggtgcgaagcctctcaagaaggctgtcgtgatgccccttcagttgatacaggaacaggccgcaagccccaacgcagaaattcacatcctcaagaataaagggaggaaaagaaagggcgcaaacataacaactggctattag

SEQ ID NO: 90132 - DNA, 1794 bp, Artificial Sequence
  derived and/or modified sequence
atggacagctgcagcttggagatagccaactggagaaaccaccaggagactctgaagtatcagttcgatgccttctacggggagaggtctactcagcaggatatttatgcgggaagtgtgcagccaatcctgcgacaccttctggaggggcaaaacgcaagcgtgttggcctacggcccaaccggggctggcaagacccacactatgcttggcagccctgagcagcccggagtcattcctcgcgcactcatggacctactccagctgaccagagaggaaggagccgagggcagaccctgggcactgtccgtgaccatgtcctatttggagatttaccaagagaaggtgctcgatctacttgaccctgcctctggcgatttggtcatacgcgaggattgcaggggcaacatcctgatccccggactgtcccagaagccgattagttcattcgctgattttgaacgtcacttcctcccagcaagtagaaaccggacggtgggagctacccgtctgaatcagcgaagctccaggagtcatgccgttctcttggttaaggtcgatcaacgcgaaaggttagcaccatttcgccagagagagggaaagctttatctgatcgatctagctgggagcgaggacaacaggagaacaggcaataaaggtctgcgactaaaggagtctggcgcaattaatacatctctgtttgtgttggggaaagtcgtcgatgccctgaatcaggggctcccaagagtgccctaccgcgattccaagctgactcggctgctgcaggatagcttaggagggtccgcccattcaatcctgatcgccaatatcgcaccggaaaggcggttctatttggatactgttagtgccctgaacttcgccgctcgatcaaaagaagttatcaatcgcccatttacgaacgaatcgttacagccacacgcactcggccctgtaaaacttagtcagaaggaattgctcggcccaccagaggccaaaagggcaagggggcctgaggaggaggaaatcggtagtcccgaacccatggcagccccagcttcagcctctcagaaactaagtccattgcagaagctgtcttctatggacccggctatgctggaaagactgttgagcttggatcgcctgcttgctagccagggttctcaaggtgctccactgctttctacccccaagagggagagaatggtattaatgaagactgttgaagagaaggacttagaaattgagaggttaaagaccaagcaaaaggagctggaggcaaagatgctggcgcagaaggccgaggagaaagagaaccactgccctactatgttacgccctttgtctcaccgcacggttacgggtgccaagcctctgaaaaaggctgttgtcatgccactgcaactgattcaggagcaagccgcaagccctaacgccgaaatccacatattgaagaataaagggcgtaagagaaagctcgagtcactggacgccctagaaccagaggaaaaggctgaagactgctgggagctgcagatttcccccgaactgttggcgcatggcagacagaaaatccttgatttgttgaacgagggcagcgccagggacctcaggagcctgcaacgtatcggacccaaaaaggcccagctcatcgtgggatggcgtgagttgcatggaccgtttagtcaggtagaggacctggagcgggttgaggggataacaggcaagcaaatggagtccttcctgaaggctaacatcctggggttggcggcagggcagcgatgcggcgcatcctag

SEQ ID NO: 90133 - DNA, 1794 bp, Artificial Sequence
  derived and/or modified sequence
atggacagctgcagccttgaaatcgccaattggaggaaccatcaagagacactgaagtaccagttcgatgccttctacggcgaacgctccacacagcaagatatttatgccggatccgtgcagccaatactgcgacatctgctggagggccagaatgcttcagtcctcgcatacggcccaactggagcaggcaagactcataccatgctgggatctccggaacagcccggagtgattcctcgggcactcatggacctactgcagctcactcgcgaagagggcgctgaaggacggccatgggctctgtccgttacaatgagctacctagagatctaccaggaaaaagtactcgatcttctcgacccagctagcggcgacctggtgatccgcgaggactgccgaggtaacatacttattccgggtttaagccagaaacccatttctagcttcgcagacttcgaacgccactttctgccagccagccggaatcgcaccgtgggagctacccgtctgaaccagcgctcctcccgcagccacgcagtactcttagtcaaggtggaccagagggaacgcttggccccattccggcagagggaaggtaaactctatcttatagacctggctggcagtgaggacaacaggcgtactggaaacaaagggctgcgactcaaagagtcaggcgcaatcaatacttcacttttcgtgctcgggaaagttgtggacgctcttaaccaagggcttcccagggtgccttatcgggatagcaaactgactaggctgctgcaggactcactgggcggaagcgcacactctatactgatcgccaatatcgctcctgagaggaggttctaccttgatactgtttccgccctaaacttcgcagctagatcaaaagaggttataaatcggccttttactaatgagtcgttacaaccccatgcgttaggtccagttaagctgtctcaaaaggagctgctgggaccgccagaagccaaaagggctaggggccctgaagaggaagaaattgggtccccagagcccatggcggctcctgcgtctgcctcccagaagcttagcccgcttcaaaagttgtctagcatggaccccgctatgctggagcggttactttccctcgatagactgctggccagccaaggaagtcagggagctccactactgagcacgcccaagcgggaaagaatggtattgatgaaaaccgtcgaggagaaggacttggagatcgagagactgaagacaaaacagaaagaactggaggcaaaaatgctggcccagaaggcggaagagaaagagaaccactgccccacaatgttgaggccccttagtcaccggaccgttaccggggcaaagcccctgaaaaaggccgtcgtcatgccgcttcagctcattcaggaacaggctgcatctcctaatgctgagattcacattctgaaaaacaagggacggaagcggaaactggagtcgctggacgccctcgaaccagaggagaaggctgaggattgctgggagttacaaatttcacctgaactgctcgcacatggcaggcagaagattcttgacttacttaacgaagggtctgcaagagacctcaggtcactgcagcgaatcggacctaagaaggctcagctgatcgtggggtggagggagcttcatggcccatttagccaggttgaagatctagagcgcgttgagggaatcacaggtaagcagatggagagctttctgaaggccaacatcctgggcctggctgccggtcagcgctgcggagcatcctag

SEQ ID NO: 90134 - DNA, 219 bp, Artificial Sequence
  derived and/or modified sequence
atgctggcccagaaggccgaggagaaggagaaccactgccccaccatgctgagacccctgagccacagaaccgtgaccggcgccaagcccctgaagaaggccgtggtgatgcccctgcagctgatccaggagcaggccgccagccccaacgccgagatccacatcctgaagaacaagggcagaaagagaaagggcgccaacatcaccaccggctactag

SEQ ID NO: 90135 - DNA, 1794 bp, Artificial Sequence
  derived and/or modified sequence
atggacagctgcagcctggagatcgccaactggagaaaccaccaggagaccctgaagtaccagttcgacgccttctacggcgagagaagcacccagcaggacatctacgccggcagcgtgcagcccatcctgagacacctgctggagggccagaacgccagcgtgctggcctacggccccaccggcgccggcaagacccacaccatgctgggcagccccgagcagcccggcgtgatccccagagccctgatggacctgctgcagctgaccagagaggagggcgccgagggcagaccctgggccctgagcgtgaccatgagctacctggagatctaccaggagaaggtgctggacctgctggaccccgccagcggcgacctggtgatcagagaggactgcagaggcaacatcctgatccccggcctgagccagaagcccatcagcagcttcgccgacttcgagagacacttcctgcccgccagcagaaacagaaccgtgggcgccaccagactgaaccagagaagcagcagaagccacgccgtgctgctggtgaaggtggaccagagagagagactggcccccttcagacagagagagggcaagctgtacctgatcgacctggccggcagcgaggacaacagaagaaccggcaacaagggcctgagactgaaggagagcggcgccatcaacaccagcctgttcgtgctgggcaaggtggtggacgccctgaaccagggcctgcccagagtgccctacagagacagcaagctgaccagactgctgcaggacagcctgggcggcagcgcccacagcatcctgatcgccaacatcgcccccgagagaagattctacctggacaccgtgagcgccctgaacttcgccgccagaagcaaggaggtgatcaacagacccttcaccaacgagagcctgcagccccacgccctgggccccgtgaagctgagccagaaggagctgctgggcccccccgaggccaagagagccagaggccccgaggaggaggagatcggcagccccgagcccatggccgcccccgccagcgccagccagaagctgagccccctgcagaagctgagcagcatggaccccgccatgctggagagactgctgagcctggacagactgctggccagccagggcagccagggcgcccccctgctgagcacccccaagagagagagaatggtgctgatgaagaccgtggaggagaaggacctggagatcgagagactgaagaccaagcagaaggagctggaggccaagatgctggcccagaaggccgaggagaaggagaaccactgccccaccatgctgagacccctgagccacagaaccgtgaccggcgccaagcccctgaagaaggccgtggtgatgcccctgcagctgatccaggagcaggccgccagccccaacgccgagatccacatcctgaagaacaagggcagaaagagaaagctggagagcctggacgccctggagcccgaggagaaggccgaggactgctgggagctgcagatcagccccgagctgctggcccacggcagacagaagatcctggacctgctgaacgagggcagcgccagagacctgagaagcctgcagagaatcggccccaagaaggcccagctgatcgtgggctggagagagctgcacggccccttcagccaggtggaggacctggagagagtggagggcatcaccggcaagcagatggagagcttcctgaaggccaacatcctgggcctggccgccggccagagatgcggcgccagctag

SEQ ID NO: 90136 - protein, 236 aa, Artificial Sequence
  derived and/or modified sequence
MTGRDSLSDGRTSSRALVPGGSPRGSRPRGFAITDLLGLEAELPAPAGPGQGSGCEGPAVAPCPGPGLDGSSLARGALPLGLGLLCGFGTQPPAAARAPCLLLADVPFLPPRGPEPAAPLAPSRPPPALGRQKRSDSVSTSDEDSQSEDRNDLKASPTLGKRKKRRHRTVFTAHQLEELEKAFSEAHYPDVYAREMLAVKTELPEDRIQCKLLLLEAPVHWTLQETHRLPRPRGGA

SEQ ID NO: 90137 - DNA, 432 bp, Artificial Sequence
  derived and/or modified sequence
atgaccggcagagacagcctgagcgacggcagaaccagcagcagagccctggtgcccggcggcagccccagaggcagcagacccagaggcttcgccatcaccgacctgctgggcctggaggccgagctgcccgcccccgccggccccggccagggcagcggctgcgagggccccgccgtggccccctgccccggccccggcctggacggcagcagcctggccagaggcgccctgcccctgggcctgggcctgctgtgcggcttcggcacccagccccccgccgccgccagagccccctgcctgctgctggccgacgtgcccttcctgccccccagaggccccgagcccgccgcccccctggcccccagcagacccccccccgccctgggcagacagaagagaagcgacagcgtgagcaccagcgccatgtag

SEQ ID NO: 90138 - DNA, 657 bp, Artificial Sequence
  derived and/or modified sequence
atgaccggcagagacagcctgagcgacggcagaaccagcagcagagccctggtgcccggcggcagccccagaggcagcagacccagaggcttcgccatcaccgacctgctgggcctggaggccgagctgcccgcccccgccggccccggccagggcagcggctgcgagggccccgccgtggccccctgccccggccccggcctggacggcagcagcctggccagaggcgccctgcccctgggcctgggcctgctgtgcggcttcggcacccagccccccgccgccgccagagccccctgcctgctgctggccgacgtgcccttcctgccccccagaggccccgagcccgccgcccccctggcccccagcagacccccccccgccctgggcagacagaagagaagcgacagcgtgagcaccagcgacgaggacagccagagcgaggacagaaacgacctgaaggccagccccaccctgggcaagagaaagaagagaagacacagaaccgtgttcaccgcccaccagctggaggagctggagaaggccttcagcgaggcccactaccccgacgtgtacgccagagagatgctggccgtgaagaccgagctgcccgaggacagaatccagagagtgagacactgggccgccgagaagtag

SEQ ID NO: 90139 - DNA, 711 bp, Artificial Sequence
  derived and/or modified sequence
atgaccggcagagacagcctgagcgacggcagaaccagcagcagagccctggtgcccggcggcagccccagaggcagcagacccagaggcttcgccatcaccgacctgctgggcctggaggccgagctgcccgcccccgccggccccggccagggcagcggctgcgagggccccgccgtggccccctgccccggccccggcctggacggcagcagcctggccagaggcgccctgcccctgggcctgggcctgctgtgcggcttcggcacccagccccccgccgccgccagagccccctgcctgctgctggccgacgtgcccttcctgccccccagaggccccgagcccgccgcccccctggcccccagcagacccccccccgccctgggcagacagaagagaagcgacagcgtgagcaccagcgacgaggacagccagagcgaggacagaaacgacctgaaggccagccccaccctgggcaagagaaagaagagaagacacagaaccgtgttcaccgcccaccagctggaggagctggagaaggccttcagcgaggcccactaccccgacgtgtacgccagagagatgctggccgtgaagaccgagctgcccgaggacagaatccagtgcaagctgctgctgctggaggcccccgtgcactggaccctgcaggagacccacagactgcccagacccagaggcggcgcctag

SEQ ID NO: 90140 - DNA, 432 bp, Artificial Sequence
  derived and/or modified sequence
atgacaggacgggactctctgtcagacggccgcacctcaagccgcgctctggtgcctggcggatcacccaggggaagtcggcccaggggattcgcgatcactgaccttttggggctcgaggctgagctgcctgcccccgccggtccaggtcaggggtcaggctgcgagggtccagcggtagcgccctgcccaggccccggcttagacggatcctccctcgctcgcggagcactcccactgggccttgggctcctctgcggatttgggacccaaccaccagcggcggcaagggcgccatgcttactattagccgacgtgccattcctgccaccacggggaccagagcccgctgcccctctggcgccctcaagaccaccgccagccctgggcaggcagaagcggagtgatagcgtctcaacatctgcgatgtag

SEQ ID NO: 90141 - DNA, 657 bp, Artificial Sequence
  derived and/or modified sequence
atgacaggcagagattccctttccgacggacggacgagcagcagggcccttgtccctggaggttccccaagggggtcccggccgagggggtttgccatcactgacctcctcggccttgaggccgagcttcccgcgccagcagggccaggtcagggaagtggttgtgaaggcccggctgtggccccttgcccaggacctggattggatggaagctcccttgctcggggggcgctgcccctcggcctgggcctgttgtgcggattcggcacccagccccccgcagcagcccgagctccctgcctgcttctcgccgatgtcccgttcctgccaccaagaggacctgaacccgcggcacctctggccccttcacgtccaccaccagcgctgggcaggcagaagaggagcgatagcgtatccacctctgacgaggatagccaatccgaggaccgcaatgacctgaaggctagcccaaccctcggcaaacgcaagaagagacgacatcgcaccgtcttcacggcacaccagctggaagagctggagaaggctttctcagaggctcactaccccgacgtgtatgcccgcgaaatgctcgccgtaaaaacggaattgccagaagataggatacagcgggtccgtcactgggcggccgagaaatag

SEQ ID NO: 90142 - DNA, 711 bp, Artificial Sequence
  derived and/or modified sequence
atgacggggagggattcactttctgatggtcgaacttccagcagggccttggttccagggggatctcctaggggatcacgccctcgaggcttcgccataacagatttgttgggcttagaagcagagttgcccgcaccagccggccctggacaaggcagcggctgtgaagggccagccgtggccccctgtccaggtcctggtctagatgggtctagccttgcaaggggcgccctgcctctcggcttaggcctgctctgtggatttggcacgcagcccccggccgcggcccgcgccccatgcctcttactggctgacgtccctttcctaccccccagggggcccgagccggccgcccctcttgctccgagtcgtcctccacccgccttagggcggcagaaaagatctgactctgtgagcacctctgatgaggattcccagtctgaagatcgcaacgacctgaaagcctcccctaccctgggcaagagaaagaagcgcagacatcgcaccgtgtttactgcacatcaactagaggaacttgagaaagcattttctgaggcccactaccccgacgtgtacgctcgcgaaatgctggctgtgaaaactgagctacctgaagataggatccagtgtaaactgcttctgctggaagcccctgtgcactggacactccaggagacgcacaggctgccccggcctcgggggggcgcatag

SEQ ID NO: 90143 - DNA, 432 bp, Artificial Sequence
  derived and/or modified sequence
atgacaggccgggacagcctgagtgatggccgcaccagcagccgggccctggtgcctgggggcagcccccggggcagccggccccggggctttgccatcacagacctgctgggcctggaggccgagctgcctgccccagctggccctggccagggcagcggctgtgagggccctgctgtggccccctgccccggccctggcctggatggcagcagcctggcccggggggccctgcccctgggcctgggcctgctgtgtggcttcggcacccagcccccagctgctgcccgggccccctgcctgctgctggctgatgtgcccttcctgcccccccggggccctgagcctgctgcccccctggcccccagcaggcctcctccagccctgggccggcagaagagaagtgacagcgtgtccaccagcgccatgtag

SEQ ID NO: 90144 - DNA, 657 bp, Artificial Sequence
  derived and/or modified sequence
atgacaggccgggacagcctgagtgatggccgcaccagcagccgggccctggtgcctgggggcagcccccggggcagccggccccggggctttgccatcacagacctgctgggcctggaggccgagctgcctgccccagctggccctggccagggcagcggctgtgagggccctgctgtggccccctgccccggccctggcctggatggcagcagcctggcccggggggccctgcccctgggcctgggcctgctgtgtggcttcggcacccagcccccagctgctgcccgggccccctgcctgctgctggctgatgtgcccttcctgcccccccggggccctgagcctgctgcccccctggcccccagcaggcctcctccagccctgggccggcagaagagaagtgacagcgtgtccaccagtgatgaggacagccagagcgaggacagaaatgacctgaaggccagccccaccctgggcaagaggaagaagagaagacacaggacagtgttcaccgcccaccagctggaggagctggagaaggccttcagcgaggcccactacccagatgtgtatgcccgggagatgctggccgtgaagacagagctgcctgaagatcgcatccagagggtgcgccactgggccgctgagaagtag

SEQ ID NO: 90145 - DNA, 711 bp, Artificial Sequence
  derived and/or modified sequence
atgacaggccgggacagcctgagtgatggccgcaccagcagccgggccctggtgcctgggggcagcccccggggcagccggccccggggctttgccatcacagacctgctgggcctggaggccgagctgcctgccccagctggccctggccagggcagcggctgtgagggccctgctgtggccccctgccccggccctggcctggatggcagcagcctggcccggggggccctgcccctgggcctgggcctgctgtgtggcttcggcacccagcccccagctgctgcccgggccccctgcctgctgctggctgatgtgcccttcctgcccccccggggccctgagcctgctgcccccctggcccccagcaggcctcctccagccctgggccggcagaagagaagtgacagcgtgtccaccagtgatgaggacagccagagcgaggacagaaatgacctgaaggccagccccaccctgggcaagaggaagaagagaagacacaggacagtgttcaccgcccaccagctggaggagctggagaaggccttcagcgaggcccactacccagatgtgtatgcccgggagatgctggccgtgaagacagagctgcctgaagatcgcatccagtgcaagctgctgctgctggaggcccctgtgcactggaccctgcaggagacccaccggctgccccggccccggggcggggcctag

SEQ ID NO: 90146 - DNA, 432 bp, Artificial Sequence
  derived and/or modified sequence
atgaccggccgggacagcctgagcgacggccggaccagcagccgggctctggtgcctggagggtccccaagaggcagcaggccaagaggctttgccatcaccgaccttctcgggcttgaagcggaactacccgcacctgctggaccaggacagggttctggatgtgagggtcctgccgttgccccctgtccaggacccggactcgatgggtccagcctcgcacggggggcattaccactgggcctgggcctgctgtgtggtttcggcacgcaaccccctgccgcggcgcgcgccccctgcttgctcctcgctgatgtaccatttcttccaccccgcgggcctgagccagccgcccctttggccccatcccgcccacctcccgcactcgggagacagaagaggtccgactccgtctctacgtccgccatgtag

SEQ ID NO: 90147 - DNA, 657 bp, Artificial Sequence
  derived and/or modified sequence
atgaccggccgggacagcctgagcgacggccggaccagcagccgggccttggtaccaggtggctctcccagaggaagcaggcctcgaggctttgctattaccgatctcctcggcctggaggccgagctaccagctcccgctggtccaggccaaggatctggctgcgaaggcccagccgtagctccctgcccagggcccgggctcgatggatcaagtcttgctcggggggctctgccattgggcctgggcttactctgtgggtttgggacacaaccaccggccgctgctcgcgccccatgtctcctgctggctgatgtgccctttttacccccgcgtggcccggagcctgctgcgccgttagccccttccaggccacctccagccctcggcagacagaagcgatccgatagcgtgtccacaagtgacgaggattctcaatcagaggaccgcaacgatctgaaggcttcccccacgctcggtaaaagaaaaaagcggcgccatagaacagtctttacagcacaccagctggaggaattagaaaaggcgtttagtgaagcccattatcctgacgtgtatgccagggagatgctggcagtgaagaccgagctgccagaggacagaattcagagagtgcgccattgggctgccgaaaagtag

SEQ ID NO: 90148 - DNA, 711 bp, Artificial Sequence
  derived and/or modified sequence
atgaccggccgggacagcctgagcgacggccggaccagcagccgggccctcgtgcccggggggtctccacgcggcagcagaccccgaggattcgcgattactgatttgctcggactcgaggccgagcttccagcccccgctgggccaggtcagggttcaggctgtgaaggcccagcggtcgccccgtgtccaggtcccggactcgacgggtcgtcactcgcaaggggcgccctgccactgggcttgggcttactctgtggcttcggcacgcagccgccagctgccgcaagagctccctgccttcttctggccgacgtgccttttctccctccccgggggccagaacctgccgcgccattggctccaagtcgtccccctcccgcactgggacgacaaaagcgcagcgattcagtgtccaccagcgacgaggattctcagtctgaagacagaaacgatctaaaagcttcgccaaccctgggtaagagaaaaaagcgcagacatagaaccgtgtttacagcccatcaattggaagaactggagaaagctttttctgaagcccactaccctgacgtgtatgctcgtgagatgctagctgtcaagactgaattgccggaggatcgcatacaatgtaaacttctgctgcttgaggccccggtccattggaccctgcaggaaacccaccgactgccacgcccacgggggggagcttag

SEQ ID NO: 90149 - DNA, 432 bp, Artificial Sequence
  derived and/or modified sequence
atgaccggtcgggacagcctgagtgacgggaggacttcaagtcgagccttggtgccaggagggtccccaaggggaagccggccacggggttttgcaatcactgacttgctcggcctcgaggctgaattacccgctccagctgggcctggacaaggatcaggctgcgaggggccagcagtagcaccctgtccaggacctggcctagacggatcatccctcgccaggggagctctacccctgggcctgggactgttatgtggctttggcacccagcccccagcagcagcaagggctccatgcctgctcttggcggatgtcccctttctacctcccaggggaccagaacctgctgcccctctggctccttcccggcctcctcccgctttaggcagacagaaaagatctgactcagtgtcaacttccgctatgtag

SEQ ID NO: 90150 - DNA, 657 bp, Artificial Sequence
  derived and/or modified sequence
atgacaggaagggattccctcagcgatgggaggacatccagtagagctctggtccccggaggatctccgagaggatcacgacctcgaggctttgcaattaccgacttgctcgggctagaagccgagctccccgctcctgctggacctggtcaaggcagtggctgcgagggccctgccgttgccccatgtcccggaccaggactagatggatcttcactggcacggggagcactacccttaggactaggattactgtgtggattcggtacacagccacccgcagccgctagagcgccatgcctcctgctcgcagacgtcccttttctgccccctcgtgggcctgagcccgctgcccctctggctcccagcaggcccccacctgctctaggaagacaaaaacgcagcgatagtgttagcacatctgacgaagacagtcagagcgaggatcgcaacgatttgaaagcttctcccaccctggggaagagaaaaaagagacggcacaggactgtcttcacagcccaccagctggaggaacttgagaaagcattcagcgaagctcactatccggacgtgtacgctcgagagatgctggcagtcaagacagaactaccagaagatcggatacaaagagtaagacactgggccgctgagaagtag

SEQ ID NO: 90151 - DNA, 711 bp, Artificial Sequence
  derived and/or modified sequence
atgaccggcagggatagcttgtcggatggtaggacatcaagcagagcattagtgcccggtggaagccctcgagggtcacgacccagaggctttgctatcaccgacttgttggggcttgaagccgagttgcccgcaccggctgggccagggcaaggatccggctgcgagggcccagcggttgctccctgtcccggtcccggactggacggctcctcgttggcaaggggagcattgcccctcgggctcggacttctgtgtggcttcggcacccagcccccagctgcagccagggccccatgtctccttcttgccgacgtcccttttctgccgccacgcggaccagaacccgcagctccactggctccctccaggcctccccctgcacttggccgacagaaacgttctgacagcgtgagcacctctgacgaagactcacaatcagaggataggaacgatctgaaggcgagccctactctggggaagagaaagaaaagaaggcacagaaccgttttcaccgcacaccagctcgaagaattggagaaagccttttcagaagcacactacccagatgtttacgctagagagatgcttgctgtgaaaactgagctcccagaagatagaatccaatgcaagctgctgctgctggaagcccctgtccattggaccctgcaggaaacccaccgactgcctcgtccacgcggaggcgcttag

SEQ ID NO: 90152 - DNA, 696 bp, Artificial Sequence
  derived and/or modified sequence
ggggtggggtgggctggacagaagagaggaggagaaggaggtgactgaggggactgcagctgggtgggcggtaaccgaggggaggggaactggtggcgtccccatctcgcggggtccggaacggcgacgcgcccgcgcccagctgattggagcccttcaggcctcccgcgcccgaccggcagcccaatcctataaagcttcctctaagctgggccctccgcaaacgggatccagagaggctcgcgccttgcttgctaaggaaccatgaccggccgggactcgctttccgacgggcgcactagcagcagggcgctggtgcctggcggttcccctaggggctcgcgcccccggggcttcgccatcacggacctgctgggcttggaggccgagctgccggcgcccgctggcccaggacagggatctggctgcgagggtccggcagtcgcgccgtgcccgggcccggggcttgacggctccagcctggcgcgtggggccctaccgctgggactcggcctcctctgtggcttcggcacgcagccgccggcggccgctcgagcaccctgcctgctcctagcggacgtgccgttcctgccgcccaggggccccgagcccgctgccccgctggctcccagccgtccgccgcctgcgctcggccgccagaagcgcagcgacagcgtctccacgtccgcgatgtga

SEQ ID NO: 90153 - DNA, 921 bp, Artificial Sequence
  derived and/or modified sequence
ggggtggggtgggctggacagaagagaggaggagaaggaggtgactgaggggactgcagctgggtgggcggtaaccgaggggaggggaactggtggcgtccccatctcgcggggtccggaacggcgacgcgcccgcgcccagctgattggagcccttcaggcctcccgcgcccgaccggcagcccaatcctataaagcttcctctaagctgggccctccgcaaacgggatccagagaggctcgcgccttgcttgctaaggaaccatgaccggccgggactcgctttccgacgggcgcactagcagcagggcgctggtgcctggcggttcccctaggggctcgcgcccccggggcttcgccatcacggacctgctgggcttggaggccgagctgccggcgcccgctggcccaggacagggatctggctgcgagggtccggcagtcgcgccgtgcccgggcccggggcttgacggctccagcctggcgcgtggggccctaccgctgggactcggcctcctctgtggcttcggcacgcagccgccggcggccgctcgagcaccctgcctgctcctagcggacgtgccgttcctgccgcccaggggccccgagcccgctgccccgctggctcccagccgtccgccgcctgcgctcggccgccagaagcgcagcgacagcgtctccacgtccgatgaggacagccagtctgaagacaggaatgacctaaaggcatcccccaccttgggcaagaggaagaagcggcggcacaggacagttttcactgctcaccagctggaagagttggagaaggcattcagcgaggcccactaccctgatgtgtatgcccgagaaatgctggctgtgaaaactgagctccccgaagaccggatacagagggtgagacattgggctgcagagaaatga

SEQ ID NO: 90154 - DNA, 1195 bp, Artificial Sequence
  derived and/or modified sequence
tccagagaggctcgcgccttgcttgctaaggaaccatgaccggccgggactcgctttccgacgggcgcactagcagcagggcgctggtgcctggcggttcccctaggggctcgcgcccccggggcttcgccatcacggacctgctgggcttggaggccgagctgccggcgcccgctggcccaggacagggatctggctgcgagggtccggcagtcgcgccgtgcccgggcccggggcttgacggctccagcctggcgcgtggggccctaccgctgggactcggcctcctctgtggcttcggcacgcagccgccggcggccgctcgagcaccctgcctgctcctagcggacgtgccgttcctgccgcccaggggccccgagcccgctgccccgctggctcccagccgtccgccgcctgcgctcggccgccagaagcgcagcgacagcgtctccacgtccgatgaggacagccagtctgaagacaggaatgacctaaaggcatcccccaccttgggcaagaggaagaagcggcggcacaggacagttttcactgctcaccagctggaagagttggagaaggcattcagcgaggcccactaccctgatgtgtatgcccgagaaatgctggctgtgaaaactgagctccccgaagaccggatacagtgcaaacttctgctcctggaggctcccgttcactggactttgcaggagacacacaggctccccagaccccgtggtggtgcctgatgaccttcagctgaaccctgtaatgctgctaaagtctgcccctctggagaagtgctcaggtagcattgttctgcctcaggaagcatgccgattttcctgtgtcatccttgatgatcactgctaccagacttgccccctgcagggcaccccatgtgcaaggaattcaacaacctaggagttgaaagcattggtctcccaagttcagtgtgttcttttccgtatctattaccagctgatgagaataaacctgcagtcatgacagctaggtcctagtgacaggtgcagaaagctgctcttacagaaactcccctccttattaagaggctttgtctatcactcggaactgcttctactcaagattatctgttgaaagggaactgtccataccagggcattgttctgacttttctggacttcctcaacccaaaatgccttgaagaaaaaaaaaa

SEQ ID NO: 90155 - protein, 301 aa, Artificial Sequence
  derived and/or modified sequence
MTGRDSLSDGRTSSRALVPGGSPRGSRPRGFAITDLLGLEAELPAPAGPGQGSGCEGPAVAPCPGPGLDGSSLARGALPLGLGLLCGFGTQPPAAARAPCLLLADVPFLPPRGPEPAAPLAPSRPPPALGRQKRSDSVSTSDEDSQSEDRNDLKASPTLGKRKKRRHRTVFTAHQLEELEKAFSEAHYPDVYAREMLAVKTELPEDRIQVWFQNRRAKWRKREKRWGGSSVMAEYGLYGAMVRHCIPLPDSVLNSAEGGLLGSCAPWLLVQTSAPGGSRSLDFAGDTQAPQTPWWCLMTFS

SEQ ID NO: 90156 - DNA, 843 bp, Artificial Sequence
  derived and/or modified sequence
atgaccggcagagacagcctgagcgacggcagaaccagcagcagagccctggtgcccggcggcagccccagaggcagcagacccagaggcttcgccatcaccgacctgctgggcctggaggccgagctgcccgcccccgccggccccggccagggcagcggctgcgagggccccgccgtggccccctgccccggccccggcctggacggcagcagcctggccagaggcgccctgcccctgggcctgggcctgctgtgcggcttcggcacccagccccccgccgccgccagagccccctgcctgctgctggccgacgtgcccttcctgccccccagaggccccgagcccgccgcccccctggcccccagcagacccccccccgccctgggcagacagaagagaagcgacagcgtgagcaccagcgacgaggacagccagagcgaggacagaaacgacctgaaggccagccccaccctgggcaagagaaagaagagaagacacagaaccgtgttcaccgcccaccagctggaggagctggagaaggccttcagcgaggcccactaccccgacgtgtacgccagagagatgctggccgtgaagaccgagctgcccgaggacagaatccaggtgtggttccagaacagaagagccaagtggagaaagagagagaagagatggggcggcagcagcgtgatggccgagtacggcctgtacggcgccatggtgagacactgcatccccctgcccgacagcgtgctgaacagcgccgagggcggcctgctgggcagctgcgccccctggctgctggagggcgagaccctgggctgcagagagatgaagtag

SEQ ID NO: 90157 - DNA, 906 bp, Artificial Sequence
  derived and/or modified sequence
atgaccggcagagacagcctgagcgacggcagaaccagcagcagagccctggtgcccggcggcagccccagaggcagcagacccagaggcttcgccatcaccgacctgctgggcctggaggccgagctgcccgcccccgccggccccggccagggcagcggctgcgagggccccgccgtggccccctgccccggccccggcctggacggcagcagcctggccagaggcgccctgcccctgggcctgggcctgctgtgcggcttcggcacccagccccccgccgccgccagagccccctgcctgctgctggccgacgtgcccttcctgccccccagaggccccgagcccgccgcccccctggcccccagcagacccccccccgccctgggcagacagaagagaagcgacagcgtgagcaccagcgacgaggacagccagagcgaggacagaaacgacctgaaggccagccccaccctgggcaagagaaagaagagaagacacagaaccgtgttcaccgcccaccagctggaggagctggagaaggccttcagcgaggcccactaccccgacgtgtacgccagagagatgctggccgtgaagaccgagctgcccgaggacagaatccaggtgtggttccagaacagaagagccaagtggagaaagagagagaagagatggggcggcagcagcgtgatggccgagtacggcctgtacggcgccatggtgagacactgcatccccctgcccgacagcgtgctgaacagcgccgagggcggcctgctgggcagctgcgccccctggctgctggtgcagaccagcgcccccggcggcagcagaagcctggacttcgccggcgacacccaggccccccagaccccctggtggtgcctgatgaccttcagctag

SEQ ID NO: 90158 - DNA, 843 bp, Artificial Sequence
  derived and/or modified sequence
atgactggccgagacagtctgtccgatggacggacatcatctcgggccttggttcctggaggctcacccagaggcagcagaccaagaggtttcgcaatcaccgatctgctggggctggaagccgagcttcctgcacctgccgggccgggacagggctcagggtgtgaaggacccgcggtcgctccctgtcctgggccaggcctggatggatcctctttggctagaggggcactgccattgggacttggcctcctgtgtggattcggaacacagccaccagctgctgcccgcgccccttgcctgctcctggccgatgtgccctttttgccacctcgcggaccagagcctgctgcaccccttgcacctagccggccacctccagccctcggacgccaaaagagatcggattctgtgtccacatctgatgaagatagccagtctgaagatcgcaacgacctcaaggccagtcctaccctggggaaacggaagaagagacgacatcgcactgtctttactgctcaccagctagaggaacttgaaaaggcttttagcgaggcgcactacccagacgtttacgctagagaaatgctcgcagtcaagactgaactgcccgaggatcgcatccaggtatggttccagaatcggagggccaagtggcgtaaaagagagaaacgctggggagggtcatccgtgatggctgaatatggcctctatggggccatggttaggcactgcatcccccttcccgatagtgtgctcaactccgctgaagggggtctgcttggatcgtgcgctccttggctgttagagggtgagaccctggggtgccgggagatgaagtag

SEQ ID NO: 90159 - DNA, 906 bp, Artificial Sequence
  derived and/or modified sequence
atgactggccgcgactctctctcagatgggcgaactagcagccgcgcattagtgcccggcggatctcctcggggatctaggccccgcggttttgccattaccgatcttctgggattagaggcagaactgcccgcccctgccggtcctgggcaggggtccggatgtgaagggcccgcagtggccccatgccccggccctggactcgatggatccagtcttgcaaggggcgctcttccccttgggctaggcttgttgtgtggattcggcacacagccacccgctgccgctcgagccccatgcctcctcctcgcagatgtgccttttctgcctccgcggggccctgagcccgccgcacctctggcaccgtcgaggcccccacctgccctgggcaggcagaagagatctgactcagtaagcacatctgacgaggatagtcagtcagaggatcgcaacgatcttaaagcgtctcccacacttggcaaaaggaagaagaggaggcacagaacggtgttcacagcgcatcagcttgaagagctcgagaaggccttttccgaggcccattaccccgacgtgtacgccagagaaatgttggctgttaagaccgagctacccgaagatcggattcaggtgtggtttcagaaccggagggcgaaatggagaaagagggaaaagcgctggggaggctcatctgtgatggcagagtatggactttatggggctatggtgaggcactgtattcctttgcccgattccgtgcttaattccgccgagggtggactgctcgggtcctgtgctccctggctgttggtccagacatccgcccctggcggctctcgcagcctagacttcgcaggggatacgcaggctccgcagaccccctggtggtgtctcatgacattctcttag

SEQ ID NO: 90160 - DNA, 843 bp, Artificial Sequence
  derived and/or modified sequence
atgacaggccgggacagcctgagtgatggccgcaccagcagccgggccctggtgcctgggggcagcccccggggcagccggccccggggctttgccatcacagacctgctgggcctggaggccgagctgcctgccccagctggccctggccagggcagcggctgtgagggccctgctgtggccccctgccccggccctggcctggatggcagcagcctggcccggggggccctgcccctgggcctgggcctgctgtgtggcttcggcacccagcccccagctgctgcccgggccccctgcctgctgctggctgatgtgcccttcctgcccccccggggccctgagcctgctgcccccctggcccccagcaggcctcctccagccctgggccggcagaagagaagtgacagcgtgtccaccagtgatgaggacagccagagcgaggacagaaatgacctgaaggccagccccaccctgggcaagaggaagaagagaagacacaggacagtgttcaccgcccaccagctggaggagctggagaaggccttcagcgaggcccactacccagatgtgtatgcccgggagatgctggccgtgaagacagagctgcctgaagatcgcatccaggtgtggttccagaacagaagagccaagtggaggaagcgggagaagcgctggggcggcagctctgtgatggccgagtatggcctgtatggagccatggtgcgccactgcatccccctgcctgattctgtgctgaacagcgctgagggcggcctgctgggcagctgtgccccctggctgctggagggggagaccctgggctgccgggagatgaagtag

SEQ ID NO: 90161 - DNA, 906 bp, Artificial Sequence
  derived and/or modified sequence
atgacaggccgggacagcctgagtgatggccgcaccagcagccgggccctggtgcctgggggcagcccccggggcagccggccccggggctttgccatcacagacctgctgggcctggaggccgagctgcctgccccagctggccctggccagggcagcggctgtgagggccctgctgtggccccctgccccggccctggcctggatggcagcagcctggcccggggggccctgcccctgggcctgggcctgctgtgtggcttcggcacccagcccccagctgctgcccgggccccctgcctgctgctggctgatgtgcccttcctgcccccccggggccctgagcctgctgcccccctggcccccagcaggcctcctccagccctgggccggcagaagagaagtgacagcgtgtccaccagtgatgaggacagccagagcgaggacagaaatgacctgaaggccagccccaccctgggcaagaggaagaagagaagacacaggacagtgttcaccgcccaccagctggaggagctggagaaggccttcagcgaggcccactacccagatgtgtatgcccgggagatgctggccgtgaagacagagctgcctgaagatcgcatccaggtgtggttccagaacagaagagccaagtggaggaagcgggagaagcgctggggcggcagctctgtgatggccgagtatggcctgtatggagccatggtgcgccactgcatccccctgcctgattctgtgctgaacagcgctgagggcggcctgctgggcagctgtgccccctggctgctggtgcagaccagcgcccctgggggcagccgcagcctggactttgctggggacacccaggccccccagaccccctggtggtgcctgatgaccttctcctag

SEQ ID NO: 90162 - DNA, 843 bp, Artificial Sequence
  derived and/or modified sequence
atgaccggccgggacagcctgagcgacggccggaccagcagccgggccttggtgcctggcggctccccacgtggatctagaccgaggggctttgccataacagacctcctcggactggaagccgaactgcctgcacccgcgggacctggtcaggggtccggatgtgaaggccccgctgtggcgccgtgccctggcccggggctcgacggaagttctctggcccgcggcgcgctccccctcgggctgggtttgctctgtggctttggtactcagcccccagcggccgcccgagccccttgcttactcctcgcagacgtccctttcttgcccccccgcgggcctgagcctgccgcccctctggccccttcccgacctcccccagccctgggcagacaaaagcgcagtgatagcgtgagcaccagcgacgaagattcacagtccgaggatagaaacgacctcaaagcctcgcccacactcggtaagagaaaaaagagaagacatcgaactgtatttactgcacatcagctggaggaactggagaaggcattcagcgaggcccattatccagacgtgtacgccagagagatgctggccgtgaagaccgaacttcccgaagatcgaatacaggtttggtttcagaaccggcgcgctaagtggcggaaaagagaaaaaaggtggggtggctcttctgtgatggctgaatatggactgtatggcgctatggtgcgtcactgcatccccctgcccgatagcgtcctgaactctgctgagggcgggctgcttgggtcctgtgccccttggctgttggagggtgaaacactcggctgcagagaaatgaaatag

SEQ ID NO: 90163 - DNA, 906 bp, Artificial Sequence
  derived and/or modified sequence
atgaccggccgggacagcctgagcgacggccggaccagcagccgggcactcgtgcccggtggaagccctagaggcagtagaccccgcgggtttgctattacggacttattgggactggaggctgagctccccgccccagccggccctggacagggatccgggtgcgaggggcccgccgtcgcaccctgtccaggccccggcttggacgggagcagcctggcaaggggtgcattgcccttagggctgggccttctatgcggcttcggaactcagccaccagccgcggcacgcgcaccgtgtcttctccttgctgacgtcccgttcctgccgcctaggggaccagagcccgctgctcctctcgccccgagcaggcccccgcctgccttgggcaggcagaaacggtcagacagcgtgagtacctctgacgaggatagccaatctgaagataggaatgacctgaaggcctctcccaccctgggtaaacggaaaaaaaggcgccatcggacagtttttactgcacaccagcttgaggagctggaaaaggccttttccgaggcacactatccagacgtgtacgcccgggagatgctcgctgtgaagacggagttgcctgaggatcgcattcaagtctggtttcagaatcgcagggcgaagtggcgcaaaagggagaaacggtggggcggtagtagcgtgatggcagaatatgggctatatggcgcaatggttaggcactgcatccccttaccggattccgttttgaacagtgccgaaggcggccttctgggaagctgtgccccatggcttctggtccaaacctctgcacccggcggctcacggagcctggattttgccggcgacacacaggcacctcaaaccccgtggtggtgcctcatgactttcagttag

SEQ ID NO: 90164 - DNA, 843 bp, Artificial Sequence
  derived and/or modified sequence
atgactgggagagattctctgagcgacggcagaacctccagtcgcgctcttgttcctggtggtagccccagagggtcaaggccgaggggcttcgcaatcactgacctgcttggcctggaagccgagttgccagcaccagcgggtccaggacaaggctcgggctgcgaaggccctgctgttgcgccttgcccagggccagggcttgatggttcgagcttggccaggggggctctccccctgggtctcgggctgttgtgtggttttggaactcagcctcctgcagctgcacgggctccgtgtctgctcctcgctgacgtacctttcctcccccctagagggcctgagcccgcagctcccctcgctccctcaagaccccctcctgcgctgggcaggcagaaaagatccgacagtgtctcgacatctgacgaagattctcagtccgaggatcgaaatgacctgaaggccagtcccaccctgggaaaacgcaagaagcgccgacatcgaactgtattcaccgcccaccagctagaggagctggaaaaggcattcagcgaggcccactacccagatgtgtacgcaagggagatgcttgctgtaaagacggaacttcctgaagaccggattcaggtctggtttcagaatagaagggcaaaatggagaaagcgcgagaaaagatggggaggttccagcgttatggctgagtacggcttgtacggcgcaatggttcggcactgcatcccactgccagattctgtgctgaacagcgctgagggaggcctgctaggaagctgcgcaccatggctccttgaaggcgaaacactaggctgccgcgaaatgaagtag

SEQ ID NO: 90165 - DNA, 906 bp, Artificial Sequence
  derived and/or modified sequence
atgactggaagagactccctgtccgatggaaggacaagttctcgagcacttgtgcctggaggctcccccagaggctctcgcccacgcggattcgcaatcacggatctgttgggacttgaagccgagctcccggcaccagctggccctgggcagggttcaggatgtgaaggcccagctgtcgccccatgccctggaccgggtcttgacggatctagcctagctcgaggagctttgcccctgggcctgggattgttatgcggctttggcacccagcccccagccgctgccagagccccatgcctgttactcgctgacgtgccatttctccctccaaggggtcctgaacctgcggctcctttagctccaagtagaccaccgcctgcgctgggacgacagaagcggagcgattcagtgagcacgtcagatgaggatagccagagtgaggatcgtaatgacctgaaagccagccccacgttgggaaagaggaagaaacgaagacacaggacagtctttaccgcccaccagctcgaggagttagagaaagccttttctgaggcacactatccagacgtgtacgccagggagatgcttgcagtgaaaaccgagctgccagaagatcggatacaggtgtggtttcaaaaccgacgagccaagtggaggaaaagagagaagaggtggggtgggtcgtccgttatggccgagtacggtctgtacggtgctatggtgagacattgcatacccctacccgatagtgtgctgaactctgcagagggaggattgttgggctcctgcgcaccatggctgttagtgcagacgtccgcgccagggggaagcaggagtctggatttcgcaggagacacacaggcacctcagactccttggtggtgcctaatgaccttttcctag

SEQ ID NO: 90166 - DNA, 1107 bp, Artificial Sequence
  derived and/or modified sequence
ggggtggggtgggctggacagaagagaggaggagaaggaggtgactgaggggactgcagctgggtgggcggtaaccgaggggaggggaactggtggcgtccccatctcgcggggtccggaacggcgacgcgcccgcgcccagctgattggagcccttcaggcctcccgcgcccgaccggcagcccaatcctataaagcttcctctaagctgggccctccgcaaacgggatccagagaggctcgcgccttgcttgctaaggaaccatgaccggccgggactcgctttccgacgggcgcactagcagcagggcgctggtgcctggcggttcccctaggggctcgcgcccccggggcttcgccatcacggacctgctgggcttggaggccgagctgccggcgcccgctggcccaggacagggatctggctgcgagggtccggcagtcgcgccgtgcccgggcccggggcttgacggctccagcctggcgcgtggggccctaccgctgggactcggcctcctctgtggcttcggcacgcagccgccggcggccgctcgagcaccctgcctgctcctagcggacgtgccgttcctgccgcccaggggccccgagcccgctgccccgctggctcccagccgtccgccgcctgcgctcggccgccagaagcgcagcgacagcgtctccacgtccgatgaggacagccagtctgaagacaggaatgacctaaaggcatcccccaccttgggcaagaggaagaagcggcggcacaggacagttttcactgctcaccagctggaagagttggagaaggcattcagcgaggcccactaccctgatgtgtatgcccgagaaatgctggctgtgaaaactgagctccccgaagaccggatacaggtctggtttcaaaaccgcagggccaaatggcgcaagcgggagaagcgctggggcggcagcagcgtgatggccgagtacgggctgtacggggccatggtgcgccactgcatcccgctgccagactccgtgctcaactccgccgagggcggcctgctgggctcctgcgcgccctggctcctggagggtgagacattgggctgcagagaaatgaagtga

SEQ ID NO: 90167 - DNA, 1977 bp, Artificial Sequence
  derived and/or modified sequence
tccagagaggctcgcgccttgcttgctaaggaaccatgaccggccgggactcgctttccgacgggcgcactagcagcagggcgctggtgcctggcggttcccctaggggctcgcgcccccggggcttcgccatcacggacctgctgggcttggaggccgagctgccggcgcccgctggcccaggacagggatctggctgcgagggtccggcagtcgcgccgtgcccgggcccggggcttgacggctccagcctggcgcgtggggccctaccgctgggactcggcctcctctgtggcttcggcacgcagccgccggcggccgctcgagcaccctgcctgctcctagcggacgtgccgttcctgccgcccaggggccccgagcccgctgccccgctggctcccagccgtccgccgcctgcgctcggccgccagaagcgcagcgacagcgtctccacgtccgatgaggacagccagtctgaagacaggaatgacctaaaggcatcccccaccttgggcaagaggaagaagcggcggcacaggacagttttcactgctcaccagctggaagagttggagaaggcattcagcgaggcccactaccctgatgtgtatgcccgagaaatgctggctgtgaaaactgagctccccgaagaccggatacaggtctggtttcaaaaccgcagggccaaatggcgcaagcgggagaagcgctggggcggcagcagcgtgatggccgagtacgggctgtacggggccatggtgcgccactgcatcccgctgccagactccgtgctcaactccgccgagggcggcctgctgggctcctgcgcgccctggctcctggtgcaaacttctgctcctggaggctcccgttcactggactttgcaggagacacacaggctccccagaccccgtggtggtgcctgatgaccttcagctgaaccctgtaatgctgctaaagtctgcccctctggagaagtgctcaggtagcattgttctgcctcaggaagcatgccgattttcctgtgtcatccttgatgatcactgctaccagacttgccccctgcagggcaccccatgtgcaaggaattcaacaacctaggagttgaaagcattggtctcccaagttcagtgtgttcttttccgtatctattaccagctgatgagaataaacctgcagtcatgacagctaggtcctagtgacaggtgcagaaagctgctcttacagaaactcccctccttattaagaggctttgtctatcactcggaactgcttctactcaagattatctgttgaaagggaactgtccataccagggcattgttctgacttttctggacttcctcaacccaaaatgccttgaagaaaaaaaaaaaagaccctgagtgttagggcagggtctcactctgtctccaggctggagtgcagtggcacaatcatagctcaccgcaacctctaactcctgggctgaagtgatcctcccacctcagtctcctatgttgctaggattacagcgtgagccactgccccagctactccaacttaagagttcccccaaggctggctgcccttctcctctccttccatcatgaatgacacatgggcatccccttcggctagcatggctgacctgtgcctgcctgggtgctcagcttggcacccatgtgagtttgcagcctgaaattttaaatggaggagtttctgtgcttttctgccctgattcctcttactgaccctctaagtcaccagctgtggtcgtctcctctttgacccctgatctcaacccgggctttgaaatgtgtttgttcacataattgtccattacccatccttcctgtcattgcagaatctgttgtctcatactgacattttaagactttttttcactttcttctgttgaagatcacctactaagaagtacttcctccttttcattctttctttataagaattaattaaattttaattgacaaaaa

SEQ ID NO: 90168 - protein, 237 aa, Artificial Sequence
  derived and/or modified sequence
MNILAPVRRDRVLAELPQCLRKEAALHGHKDFHPRVTCACQEHRTGTVGFCKDTFDKNYKATIGVDFEMERFEVLGIPFSLQLWDTAGQERFKCIASTYYRGAQAIIIVFNLNDVASLEHTKQWLADALKENDPSSVLLFLVGSKKDLSTPAQYALMEKDALQVAQEMKAEYWAVSSLTGENVREFFFRVAALTFEANVLAELEKSGARRIGDVVRINSDDSNLYLTASKKKPTCCP

SEQ ID NO: 90169 - DNA, 714 bp, Artificial Sequence
  derived and/or modified sequence
atgaacattctggcacccgtgcggcgtgatcgcgtcttagccgaactgccacagtgtctccgcaaagaagccgctctacatggtcataaagacttccatccccgcgtgacctgcgcttgccaggagcataggaccggcactgtaggattctgcaaagatacctttgacaaaaactacaaagccacaatcggggttgacttcgaaatggagcgcttcgaggtcttggggatacccttctctctgcagctttgggacactgcagggcaggagaggtttaagtgtatcgcatcaacctactacagaggagcacaggcgataatcatagtcttcaacttgaatgacgttgcgagtttggaacacactaaacagtggctggccgatgccctcaaagaaaacgaccccagttctgtgctgttgtttttggtgggctcaaaaaaagacctgtctacacctgcccagtacgctctgatggagaaggatgcactgcaggtagctcaggagatgaaagcagaatattgggccgtcagctccctcaccggagagaatgtgcgtgagttcttcttccgtgtggcagccctaacctttgaagccaacgtgctggctgaactcgagaagagcggtgcccgaagaattggggatgtggtccgcattaattcggatgactccaacctctatctcacagcgtccaaaaaaaagccaacgtgctgtccgtag

SEQ ID NO: 90170 - DNA, 714 bp, Artificial Sequence
  derived and/or modified sequence
atgaacatcctggcccctgtgcggcgggacagagtgctggccgagctgccccagtgcctgaggaaggaggccgccctgcacggccacaaggacttccacccccgggtgacctgtgcctgccaggagcacaggactggaacagtgggcttctgcaaggacacctttgacaagaactacaaggccaccatcggcgtggactttgagatggagagatttgaggtgctgggcatccccttcagcctgcagctgtgggacacagctggccaggagcgcttcaagtgcatcgccagcacctactacagaggagcccaggccatcatcatcgtgttcaacctgaatgatgtggccagcctggagcacaccaagcagtggctggctgatgccctgaaggaaaatgaccccagctctgtgctgctcttcctggtgggcagcaagaaggacctgagcaccccagcccagtatgccctgatggagaaggatgccctgcaggtggcccaggagatgaaggccgagtactgggccgtgagcagcctgactggagaaaatgtgcgggagttcttcttccgggtggccgccctgacctttgaggccaacgtgctggccgagctggagaagagcggggccaggagaattggagatgtggtgcgcatcaacagtgatgacagcaacctgtacctgacagccagcaagaagaagcccacctgctgcccctag

SEQ ID NO: 90171 - DNA, 714 bp, Artificial Sequence
  derived and/or modified sequence
atgaacatcctggcccccgtgcggcgggaccgggtgctggccgagctcccccagtgcttgcgcaaggaagctgctctgcacggtcataaggactttcatccaagagttacctgcgcatgccaggaacacagaactggcacggtaggcttctgcaaggacaccttcgacaagaattacaaagctacaattggggttgattttgagatggagcggttcgaggtgctaggtatcccgttctccttgcagctctgggatactgcaggacaggagagattcaaatgcattgctagcacttattacaggggcgctcaggctataatcattgtgtttaatcttaatgacgtagcatctctggagcacaccaagcagtggctcgcagacgcactcaaagaaaacgaccctagctctgtgttattgtttctggtcgggtcaaaaaaagacttgtccactcccgcccagtacgccttgatggagaaggacgctctgcaagtggctcaagaaatgaaagccgagtattgggcagtgtcatcattaaccggcgagaatgtacgggagtttttcttccgagtggcggcactgacatttgaagcaaacgtgttggcggaactggagaagagtggcgctcggcgcatcggggatgtggtgcgcattaattcagatgacagtaatctatatctgactgcctcaaaaaagaagccaacatgttgtccttag

SEQ ID NO: 90172 - DNA, 714 bp, Artificial Sequence
  derived and/or modified sequence
atgaacatcctggctcccgtcagaagagaccgggttctggccgaattgcctcagtgtttgaggaaagaggccgcattgcacggccacaaggactttcatccgcgtgttacctgtgcgtgccaggagcacagaacaggtaccgtcggattctgcaaagatacgttcgataagaattataaggcaactattggagtggatttcgaaatggagcggttcgaagtcctcggaatcccattttccctgcaactctgggacacagccggacaggagaggttcaagtgcatcgcctcaacatactatcggggagctcaggccattatcattgtgtttaatttaaatgatgttgcctccctagagcacactaagcagtggcttgccgatgccctgaaggaaaacgatcccagtagcgtcttgctttttctcgtcggctcgaaaaaagacctgtcaactcccgcacaatatgccctgatggagaaggacgcattgcaagtggcacaagagatgaaagccgagtattgggctgtaagctcgcttacaggagaaaacgtgagagagtttttcttcagggtggccgcactgacattcgaggccaacgtgcttgcagagctggagaagtccggcgctcggaggatcggtgacgtggtcagaatcaactccgatgacagtaacctgtacctcaccgcatctaaaaagaaaccgacgtgttgcccctag

SEQ ID NO: 90173 - DNA, 714 bp, Artificial Sequence
  derived and/or modified sequence
atgaacatcctggcccccgtgagaagagacagagtgctggccgagctgccccagtgcctgagaaaggaggccgccctgcacggccacaaggacttccaccccagagtgacctgcgcctgccaggagcacagaaccggcaccgtgggcttctgcaaggacaccttcgacaagaactacaaggccaccatcggcgtggacttcgagatggagagattcgaggtgctgggcatccccttcagcctgcagctgtgggacaccgccggccaggagagattcaagtgcatcgccagcacctactacagaggcgcccaggccatcatcatcgtgttcaacctgaacgacgtggccagcctggagcacaccaagcagtggctggccgacgccctgaaggagaacgaccccagcagcgtgctgctgttcctggtgggcagcaagaaggacctgagcacccccgcccagtacgccctgatggagaaggacgccctgcaggtggcccaggagatgaaggccgagtactgggccgtgagcagcctgaccggcgagaacgtgagagagttcttcttcagagtggccgccctgaccttcgaggccaacgtgctggccgagctggagaagagcggcgccagaagaatcggcgacgtggtgagaatcaacagcgacgacagcaacctgtacctgaccgccagcaagaagaagcccacctgctgcccctag

SEQ ID NO: 90174 - DNA, 432 bp, Artificial Sequence
  derived and/or modified sequence
atgctgaggaagacctgtggcggccagcaggaggacagccggggcatgggcccccacctgccccgggtgcctgatggagtggtgctgggcgtggaggagcctgagggcaaggcccagggccgggtgcggggggagctgtgccctggggccctggcccgcatccacatgggccacagctgcacccggctgtctgctgagggcatcgccatgctgctgggcacagctggccccagccggctgcctgctgccccagatgccagccaggcccccctgcggagcccctgggccctgtctgtggccgccgccctgtgcagccctgtgtcctgccacccctgtggcagacatgtggtgaccttcggccactgcccagcccagggcccctggggcctgggcaccttcggccacagcttcttcggctgcctgtgcaagtag

SEQ ID NO: 90175 - protein, 511 aa, Artificial Sequence
  derived and/or modified sequence
MNGVSWSQDLQEGISAWFGPPASTPASTMSIRVTQKSYKVSTSGPRAFSSRSYTSGPGSRISSSSFSRVGSSNFRGGLGGGYGGASGMGGITAVTVNQSLLSPLVLEVDPNIQAVRTQEKEQIKTLNNKFASFIDKVRFLEQQNKMLETKWSLLQQQKTARSNMDNMFESYINNLRRQLETLGQEKLKLEAELGNMQGLVEDFKNKYEDEINKRTEMENEFVLIKKDVDEAYMNKVELESRLEGLTDEINFLRQLYEEEIRELQSQISDTSVVLSMDNSRSLDMDSIIAEVKAQYEDIANRSRAEAESMYQIKYEELQSLAGKHGDDLRRTKTEISEMNRNISRLQAEIEGLKGQRASLEAAIADAEQRGELAIKDANAKLSELEAALQRAKQDMARQLREYQELMNVKLALDIEIATYRKLLEGEESRLESGMQNMSIHTKTTSGYAGGLSSAYGGLTSPGLSYSLGSSFGSGAGSSSFSRTSSSRAVVVKKIETRDGKLVSESSDVLPK

SEQ ID NO: 90176 - protein, 499 aa, Artificial Sequence
  derived and/or modified sequence
MSTPSGISTWLSLPVSTPASITSIRVTQKSSGPWAFSSCTYVSGPGVCISSLSCSRVGSSSFRGGLGGGYGGASGMGGIIAIMVNQSLLSPLNLEVDPNIQAVCTQEKEQIKTLNNKFASFIDKVWFLEQQNKVLETKWSLLQQQKMARSNMDNMLESYINNLRRQLETLGQEKLKLEAELGNMQGLGEDFKNKYEDEINKHTEVENEFVLIKKDVDEAYMNKAELESLLEGLTDEINFLRQLYEEEIRELQSQISDMSMVLSMDYSCSRDMDSIIPEVKVQYEEIANCSRAEAESMYQIKYEELQTLAGKYGDDLSRTKTEISEMNRNISWLQAETEGLKGQRASLEAAITDAEQRGELAVKDANAKLSELEAALQRAKQDMMGQLREYQELMNVGLTLDIEIATYRKLLEGEESRLESGMQNVSIHTKTTSSYAGGLSSAYGGLTSPGIIYRLGSSFGSAAGSSSFSRTSSTRAVVVRKIETHDGKLESESSDVLSK

SEQ ID NO: 90177 - DNA, 1536 bp, Artificial Sequence
  derived and/or modified sequence
atgaacggcgtgagctggagccaggacctgcaggagggcatcagcgcctggttcggcccccccgccagcacccccgccagcaccatgagcatcagagtgacccagaagagctacaaggtgagcaccagcggccccagagccttcagcagcagaagctacaccagcggccccggcagcagaatcagcagcagcagcttcagcagagtgggcagcagcaacttcagaggcggcctgggcggcggctacggcggcgccagcggcatgggcggcatcaccgccgtgaccgtgaaccagagcctgctgagccccctggtgctggaggtggaccccaacatccaggccgtgagaacccaggagaaggagcagatcaagaccctgaacaacaagttcgccagcttcatcgacaaggtgagattcctggagcagcagaacaagatgctggagaccaagtggagcctgctgcagcagcagaagaccgccagaagcaacatggacaacatgttcgagagctacatcaacaacctgagaagacagctggagaccctgggccaggagaagctgaagctggaggccgagctgggcaacatgcagggcctggtggaggacttcaagaacaagtacgaggacgagatcaacaagagaaccgagatggagaacgagttcgtgctgatcaagaaggacgtggacgaggcctacatgaacaaggtggagctggagagcagactggagggcctgaccgacgagatcaacttcctgagacagctgtacgaggaggagatcagagagctgcagagccagatcagcgacaccagcgtggtgctgagcatggacaacagcagaagcctggacatggacagcatcatcgccgaggtgaaggcccagtacgaggacatcgccaacagaagcagagccgaggccgagagcatgtaccagatcaagtacgaggagctgcagagcctggccggcaagcacggcgacgacctgagaagaaccaagaccgagatcagcgagatgaacagaaacatcagcagactgcaggccgagatcgagggcctgaagggccagagagccagcctggaggccgccatcgccgacgccgagcagagaggcgagctggccatcaaggacgccaacgccaagctgagcgagctggaggccgccctgcagagagccaagcaggacatggccagacagctgagagagtaccaggagctgatgaacgtgaagctggccctggacatcgagatcgccacctacagaaagctgctggagggcgaggagagcagactggagagcggcatgcagaacatgagcatccacaccaagaccaccagcggctacgccggcggcctgagcagcgcctacggcggcctgaccagccccggcctgagctacagcctgggcagcagcttcggcagcggcgccggcagcagcagcttcagcagaaccagcagcagcagagccgtggtggtgaagaagatcgagaccagagacggcaagctggtgagcgagagcagcgacgtgctgcccaagtag

SEQ ID NO: 90178 - DNA, 1536 bp, Artificial Sequence
  derived and/or modified sequence
atgaacggtgtctcctggagccaagaccttcaggagggaatatctgcatggtttggacctcctgcctccacacccgcgtccactatgtctattcgtgttacacagaaaagttataaggtgagcacaagtgggccgcgagcattctcctctcgttcatatactagcggacccggtagccggatcagcagctccagctttagtcgggtggggtccagtaactttcggggcggcctgggcggcggatatgggggtgcctccggaatgggcggaattacggccgtaacagtgaatcaaagccttctcagtccgcttgtcctggaagtggatcccaacatacaggccgtgaggactcaggagaaggagcagatcaagacccttaacaataagttcgcttcttttatcgataaagttagattcctggagcagcagaacaagatgctcgagacgaagtggtctcttctgcagcagcaaaagaccgcccggagcaatatggacaacatgtttgagagttacatcaacaacctgcgccggcagctggagactcttggccaggaaaaactaaaattggaagccgagctggggaacatgcaaggattggtggaggattttaaaaataagtacgaggacgaaatcaataagaggacagaaatggaaaatgagttcgttctgataaagaaagacgtggacgaagcatacatgaataaggtggagctggagagccgccttgaagggctaacagacgaaattaacttccttaggcagctatacgaggaagagattagggagctgcagtcccagattagcgatacgtccgtggtactgagcatggataactctcggtccctggacatggatagcattatcgcagaggttaaggcgcagtacgaggacatcgctaacaggtctagggcggaagccgagagcatgtaccagattaaatatgaggaactccaatccttggctggtaagcatggcgatgacctgaggagaaccaagacagagatcagcgagatgaatcggaacatatcccggttgcaagccgagattgaaggcttgaaaggccagagagcctccctggaagctgccatcgctgatgctgagcagcgcggggagttggccatcaaggacgcaaacgccaagctctctgagttagaagcagccttgcagagagcgaagcaggacatggcacgccagctccgcgagtatcaggagctgatgaacgtgaaattggctctggacatcgaaattgctacctatagaaaactattggagggtgaggaaagcaggctcgagtctggtatgcagaacatgtccattcacactaaaacaacgtcagggtacgccgggggtctgagttcggcatatgggggccttaccagtccaggcctttcttattcactgggttcatccttcggaagcggcgcaggaagtagctctttttcccgcacctcgagtagtcgggcggtggttgtgaagaagattgaaacccgcgacgggaagttggtgagtgagagctccgacgtcttaccgaaatag

SEQ ID NO: 90179 - DNA, 1536 bp, Artificial Sequence
  derived and/or modified sequence
atgaatggagtgtcctggagccaggacctgcaggagggcatcagcgcctggtttggccccccagccagcaccccagccagcaccatgagcatccgggtgacccagaagagctacaaggtgtccaccagcggcccccgggccttcagcagccgcagctacaccagcggccctggcagccgcatcagcagcagcagcttcagccgggtgggcagcagcaacttccggggcggcctgggcggcggctacggcggggccagcggcatgggcggcatcacagctgtgacagtgaaccagagcctgctgagccccctggtgctggaggtggaccccaacatccaggccgtgaggacccaggagaaggagcagatcaagaccctgaacaacaagtttgccagcttcatcgacaaggtgcgcttcctggagcagcagaacaagatgctggagaccaagtggagcctgctgcagcagcagaagacagcccggagcaacatggacaacatgtttgagagctacatcaacaacctgcggcggcagctggagaccctgggccaggagaagctgaagctggaggccgagctgggcaacatgcagggcctggtggaggacttcaagaacaagtatgaagatgagatcaacaagaggacagagatggagaatgaatttgtgctgatcaagaaggatgtggatgaggcctacatgaacaaggtggagctggagagccggctggagggcctgacagatgagatcaacttcctgcggcagctgtatgaggaggagatccgggagctgcagagccagatcagtgacacctctgtggtgctgtccatggacaacagccgcagcctggacatggacagcatcatcgccgaggtgaaggcccagtatgaggacatcgccaacagaagcagagctgaggccgagagcatgtaccagatcaagtatgaggagctgcagagcctggccggcaagcatggagatgacctgcggaggaccaagacagagatcagcgagatgaacagaaacatcagccggctgcaggccgagattgagggcctgaagggccagagggccagcctggaggccgccatcgcagatgctgagcagagaggagagctggccatcaaggatgccaatgccaagctgtctgagctggaggccgccctgcagagggccaagcaggacatggcccggcagctgcgggagtaccaggagctgatgaatgtgaagctggccctggacatcgagatcgccacctacaggaagctgctggagggggaggagagccggctggagagcggcatgcagaacatgagcatccacaccaagaccaccagcggctacgccggcggcctgagcagcgcctatggaggcctgaccagccctggcctgagctacagcctgggcagcagctttggaagtggagctggcagcagcagcttcagcaggaccagcagcagcagagctgtggtggtgaagaagattgagaccagagatggcaagctggtgtctgagagcagtgatgtgctgcccaagtag

SEQ ID NO: 90180 - DNA, 1777 bp, Artificial Sequence
  derived and/or modified sequence
ctgagagctctcctcaccaagaagcagcttctccgctccttctaggatctccgcctggttcggcccgcctgcctccactcctgcctctaccatgtccatcagggtgacccagaagtcctacaaggtgtccacctctggcccccgggccttcagcagccgctcctacacgagtgggcccggttcccgcatcagctcctcgagcttctcccgagtgggcagcagcaactttcgcggtggcctgggcggcggctatggtggggccagcggcatgggaggcatcaccgcagttacggtcaaccagagcctgctgagcccccttgtcctggaggtggaccccaacatccaggccgtgcgcacccaggagaaggagcagatcaagaccctcaacaacaagtttgcctccttcatagacaaggtacggttcctggagcagcagaacaagatgctggagaccaagtggagcctcctgcagcagcagaagacggctcgaagcaacatggacaacatgttcgagagctacatcaacaaccttaggcggcagctggagactctgggccaggagaagctgaagctggaggcggagcttggcaacatgcaggggctggtggaggacttcaagaacaagtatgaggatgagatcaataagcgtacagagatggagaacgaatttgtcctcatcaagaaggatgtggatgaagcttacatgaacaaggtagagctggagtctcgcctggaagggctgaccgacgagatcaacttcctcaggcagctatatgaagaggagatccgggagctgcagtcccagatctcggacacatctgtggtgctgtccatggacaacagccgctccctggacatggacagcatcattgctgaggtcaaggcacagtacgaggatattgccaaccgcagccgggctgaggctgagagcatgtaccagatcaagtatgaggagctgcagagcctggctgggaagcacggggatgacctgcggcgcacaaagactgagatctctgagatgaaccggaacatcagccggctccaggctgagattgagggcctcaaaggccagagggcttccctggaggccgccattgcagatgccgagcagcgtggagagctggccattaaggatgccaacgccaagttgtccgagctggaggccgccctgcagcgggccaagcaggacatggcgcggcagctgcgtgagtaccaggagctgatgaacgtcaagctggccctggacatcgagatcgccacctacaggaagctgctggagggcgaggagagccggctggagtctgggatgcagaacatgagtattcatacgaagaccaccagcggctatgcaggtggtctgagctcggcctatgggggcctcacaagccccggcctcagctacagcctgggctccagctttggctctggcgcgggctccagctccttcagccgcaccagctcctccagggccgtggttgtgaagaagatcgagacacgtgatgggaagctggtgtctgagtcctctgacgtcctgcccaagtgaacagctgcggcagcccctcccagcctacccctcctgcgctgccccagagcctgggaaggaggccgctatgcagggtagcactgggaacaggagacccacctgaggctcagccctagccctcagcccacctggggagtttactacctggggaccccccttgcccatgcctccagctacaaaacaattcaattgctttttttttttggtccaaaataaaacctcagctagctctgc

SEQ ID NO: 90181 - DNA, 1165 bp, Artificial Sequence
  derived and/or modified sequence
gtgtctcctcctctttacaggcctttccttacctccctccatgctgtccacttcctctgtaaagctctcaaccctgtccccttccccctctctcctgggaaagagccctcccatgcctagctgctgctcttagggaccctgtggctaggtgcgcggatggaaatccagccctcaggtcctcgatgatcttgaagtaatggctccagtctctgacctggggtcccttcttctccaagtgctcccggattttgctctccagcctccggttctcggtctccaggctcctcactctgtccaggatctccgcctggttcggcccgcctgcctccactcctgcctctaccatgtccatcagggtgacccagaagtcctacaaggtgtccacctctggcccccgggccttcagcagccgctcctacacgagtgggcccggttcccgcatcagctcctcgagcttctcccgagtgggcagcagcaactttcgcggtggcctgggcggcggctatggtggggccagcggcatgggaggcatcaccgcagttacggtcaaccagagcctgctgagcccccttgtcctggaggtggaccccaacatccaggccgtgcgcacccaggagaaggagcagatcaagaccctcaacaacaagtttgcctccttcatagacaaggtacggttcctggagcagcagaacaagatgctggagaccaagtggagcctcctgcagcagcagaagacggctcgaagcaacatggacaacatgttcgagagctacatcaacaaccttaggcggcagctggagactctgggccaggagaagctgaagctggaggcggagcttggcaacatgcaggggctggtggaggacttcaagaacaagtatgaggatgagatcaataagcgtacagagatggagaacgaatttgtcctcatcaagaaggatgtggatgaagcttacatgaacaaggtagagctggagtctcgcctggaagggctgaccgacgagatcaacttcctcaggcagctatatgaagaggagatccgggagctgcagtcccagatctcggacacatctgtggtgctgtccatggacaacagccgctccctggacatggacagcatcattgctgaggtcaaggcacagtacgaggatattgccaaccgcag

SEQ ID NO: 90182 - DNA, 1755 bp, Artificial Sequence
  derived and/or modified sequence
gtaaagctctcaaccctgtccccttccccctctctcctgggaaagagccctcccatgcctagctgctgctcttagggaccctgtggctaggtgcgcggatggaaatccaggatctccgcctggttcggcccgcctgcctccactcctgcctctaccatgtccatcagggtgacccagaagtcctacaaggtgtccacctctggcccccgggccttcagcagccgctcctacacgagtgggcccggttcccgcatcagctcctcgagcttctcccgagtgggcagcagcaactttcgcggtggcctgggcggcggctatggtggggccagcggcatgggaggcatcaccgcagttacggtcaaccagagcctgctgagcccccttgtcctggaggtggaccccaacatccaggccgtgcgcacccaggagaaggagcagatcaagaccctcaacaacaagtttgcctccttcatagacaaggtacggttcctggagcagcagaacaagatgctggagaccaagtggagcctcctgcagcagcagaagacggctcgaagcaacatggacaacatgttcgagagctacatcaacaaccttaggcggcagctggagactctgggccaggagaagctgaagctggaggcggagcttggcaacatgcaggggctggtggaggacttcaagaacaagtatgaggatgagatcaataagcgtacagagatggagaacgaatttgtcctcatcaagaaggatgtggatgaagcttacatgaacaaggtagagctggagtctcgcctggaagggctgaccgacgagatcaacttcctcaggcagctatatgaagaggagatccgggagctgcagtcccagatctcggacacatctgtggtgctgtccatggacaacagccgctccctggacatggacagcatcattgctgaggtcaaggcacagtacgaggatattgccaaccgcagccgggctgaggctgagagcatgtaccagatcaagtatgaggagctgcagagcctggctgggaagcacggggatgacctgcggcgcacaaagactgagatctctgagatgaaccggaacatcagccggctccaggctgagattgagggcctcaaaggccagagggcttccctggaggccgccattgcagatgccgagcagcgtggagagctggccattaaggatgccaacgccaagttgtccgagctggaggccgccctgcagcgggccaagcaggacatggcgcggcagctgcgtgagtaccaggagctgatgaacgtcaagctggccctggacatcgagatcgccacctacaggaagctgctggagggcgaggagagccggctggagtctgggatgcagaacatgagtattcatacgaagaccaccagcggctatgcaggtggtctgagctcggcctatgggggcctcacaagccccggcctcagctacagcctgggctccagctttggctctggcgcgggctccagctccttcagccgcaccagctcctccagggccgtggttgtgaagaagatcgagacacgtgatgggaagctggtgtctgagtcctctgacgtcctgcccaagtgaacagctgcggcagcccctcccagcctacccctcctgcgctgccccagagcctgggaaggaggccgctatgcagggtagcactgggaacaggagacccacctgaggctcagccctagccctcagcccacctggggagtttactacctg

SEQ ID NO: 90183 - DNA, 729 bp, Artificial Sequence
  derived and/or modified sequence
gacctaaacctcctgccttccacccacagcatgccctgcctggccccacccaggcctggggtgccttgctcagctccccaatctccaacctcccacaggccattcctgagagctctcctcaccaagaagcagcttctccgctccttctaggatctccgcctggttcggcccgcctgcctccactcctgcctctaccatgtccatcagggtgacccagaagtcctacaaggtgtccacctctggcccccgggccttcagcagccgctcctacacgagtgggcccggttcccgcatcagctcctcgagcttctcccgagtgggcagcagcaactttcgcggtggcctgggcggcggctatggtggggccagcggcatgggaggcatcaccgcagttacggtcaaccagagcctgctgagcccccttgtcctggaggtggaccccaacatccaggccgtgcgcacccaggagaaggagcagatcaagaccctcaacaacaagtttgcctccttcatagacaaggtacggttcctggagcagcagaacaagatgctggagaccaagtggagcctcctgcagcagcagaagacggctcgaagcaacatggacaacatgttcgagagctacatcaacaaccttaggcggcagctggagactctgggccaggagaagctgaagctggaggcggagcttggcaacatgcaggggctggtggaggacttcaagaacaa

SEQ ID NO: 90184 - DNA, 1687 bp, Artificial Sequence
  derived and/or modified sequence
attcagcaaatgtttgcggaatgaatggggtgagctggagccaggacctgcaggaagggatctccgcctggttcggcccgcctgcctccactcctgcctctaccatgtccatcagggtgacccagaagtcctacaaggtgtccacctctggcccccgggccttcagcagccgctcctacacgagtgggcccggttcccgcatcagctcctcgagcttctcccgagtgggcagcagcaactttcgcggtggcctgggcggcggctatggtggggccagcggcatgggaggcatcaccgcagttacggtcaaccagagcctgctgagcccccttgtcctggaggtggaccccaacatccaggccgtgcgcacccaggagaaggagcagatcaagaccctcaacaacaagtttgcctccttcatagacaaggtacggttcctggagcagcagaacaagatgctggagaccaagtggagcctcctgcagcagcagaagacggctcgaagcaacatggacaacatgttcgagagctacatcaacaaccttaggcggcagctggagactctgggccaggagaagctgaagctggaggcggagcttggcaacatgcaggggctggtggaggacttcaagaacaagtatgaggatgagatcaataagcgtacagagatggagaacgaatttgtcctcatcaagaaggatgtggatgaagcttacatgaacaaggtagagctggagtctcgcctggaagggctgaccgacgagatcaacttcctcaggcagctatatgaagaggagatccgggagctgcagtcccagatctcggacacatctgtggtgctgtccatggacaacagccgctccctggacatggacagcatcattgctgaggtcaaggcacagtacgaggatattgccaaccgcagccgggctgaggctgagagcatgtaccagatcaagtatgaggagctgcagagcctggctgggaagcacggggatgacctgcggcgcacaaagactgagatctctgagatgaaccggaacatcagccggctccaggctgagattgagggcctcaaaggccagagggcttccctggaggccgccattgcagatgccgagcagcgtggagagctggccattaaggatgccaacgccaagttgtccgagctggaggccgccctgcagcgggccaagcaggacatggcgcggcagctgcgtgagtaccaggagctgatgaacgtcaagctggccctggacatcgagatcgccacctacaggaagctgctggagggcgaggagagccggctggagtctgggatgcagaacatgagtattcatacgaagaccaccagcggctatgcaggtggtctgagctcggcctatgggggcctcacaagccccggcctcagctacagcctgggctccagctttggctctggcgcgggctccagctccttcagccgcaccagctcctccagggccgtggttgtgaagaagatcgagacacgtgatgggaagctggtgtctgagtcctctgacgtcctgcccaagtgaacagctgcggcagcccctcccagcctacccctcctgcgctgccccagagcctgggaaggaggccgctatgcagggtagcactgggaacaggagacccacctgaggctcagccctagccctcagcccacctg

SEQ ID NO: 90185 - DNA, 2120 bp, Artificial Sequence
  derived and/or modified sequence
atgctgtccacttcctctgtaaagctctcaaccctgtccccttccccctctctcctgggaaagagccctcccatgcctagctgctgctcttagggaccctgtggctaggtgcgcggatggaaatccaggtatgcccaaccccctcccggtggagtaggggttgggtggttatggaatgacggaaagaggcaaaggagtgtataattggagggtcagacaaggctgggagttgaggtccctcctaccccttacctgagccctcaggtcctcgatgatcttgaagtaatggctccagtctctgacctggggtcccttcttctccaagtgctcccggattttgctctccagcctccggttctcggtctccaggctcctcactctgtccaggatctccgcctggttcggcccgcctgcctccactcctgcctctaccatgtccatcagggtgacccagaagtcctacaaggtgtccacctctggcccccgggccttcagcagccgctcctacacgagtgggcccggttcccgcatcagctcctcgagcttctcccgagtgggcagcagcaactttcgcggtggcctgggcggcggctatggtggggccagcggcatgggaggcatcaccgcagttacggtcaaccagagcctgctgagcccccttgtcctggaggtggaccccaacatccaggccgtgcgcacccaggagaaggagcagatcaagaccctcaacaacaagtttgcctccttcatagacaaggtacggttcctggagcagcagaacaagatgctggagaccaagtggagcctcctgcagcagcagaagacggctcgaagcaacatggacaacatgttcgagagctacatcaacaaccttaggcggcagctggagactctgggccaggagaagctgaagctggaggcggagcttggcaacatgcaggggctggtggaggacttcaagaacaagtatgaggatgagatcaataagcgtacagagatggagaacgaatttgtcctcatcaagaaggatgtggatgaagcttacatgaacaaggtagagctggagtctcgcctggaagggctgaccgacgagatcaacttcctcaggcagctatatgaagaggagatccgggagctgcagtcccagatctcggacacatctgtggtgctgtccatggacaacagccgctccctggacatggacagcatcattgctgaggtcaaggcacagtacgaggatattgccaaccgcagccgggctgaggctgagagcatgtaccagatcaagtatgaggagctgcagagcctggctgggaagcacggggatgacctgcggcgcacaaagactgagatctctgagatgaaccggaacatcagccggctccaggctgagattgagggcctcaaaggccagagggcttccctggaggccgccattgcagatgccgagcagcgtggagagctggccattaaggatgccaacgccaagttgtccgagctggaggccgccctgcagcgggccaagcaggacatggcgcggcagctgcgtgagtaccaggagctgatgaacgtcaagctggccctggacatcgagatcgccacctacaggaagctgctggagggcgaggagagccggctggagtctgggatgcagaacatgagtattcatacgaagaccaccagcggctatgcaggtggtctgagctcggcctatgggggcctcacaagccccggcctcagctacagcctgggctccagctttggctctggcgcgggctccagctccttcagccgcaccagctcctccagggccgtggttgtgaagaagatcgagacacgtgatgggaagctggtgtctgagtcctctgacgtcctgcccaagtgaacagctgcggcagcccctcccagcctacccctcctgcgctgccccagagcctgggaaggaggccgctatgcagggtagcactgggaacaggagacccacctgaggctcagccctagccctcagcccacctggggagtttactacctggggaccccccttgcccatgcctccagctacaaaacaattcaattgctttttttttttggtccaaaataaaacctcagctagctctgcc

SEQ ID NO: 90186 - DNA, 1536 bp, Artificial Sequence
  derived and/or modified sequence
atgaacggcgtgagctggagccaggacctgcaggagggcatcagcgcatggttcggaccacccgcctctactccagcttcaactatgtcaatccgcgtcactcagaagagttacaaagtgagcacctcaggtccccgcgctttctcctctagatcctacacctccggcccaggttcaaggatcagtagttcaagcttcagccgtgtcggctccagcaacttcagaggagggcttggggggggatacgggggggcgagcggcatgggtgggataaccgctgtgacggtcaatcaatctctccttagtcccctggtgctggaagtggaccctaacatccaggctgtgaggacacaagaaaaggagcagatcaaaacgttgaataacaaattcgcatccttcatcgacaaggttagatttttagagcagcagaataagatgctcgagacaaagtggagccttctgcagcagcaaaagacggctcggtcaaacatggataacatgttcgaatcctatataaataatctcagaagacagctggaaacacttggacaggaaaaattgaagctggaagctgagctgggcaatatgcagggtctagtggaagacttcaagaacaaatatgaagacgagatcaacaagcgaacagagatggagaacgaatttgttctgatcaaaaaagacgttgatgaagcctacatgaataaagtggagttagaatcgcgtttggaaggcctcacagatgaaatcaactttctgagacagctctatgaggaggagatccgagaactgcagagtcaaatctctgacactagcgttgttttaagcatggataattcacgctctctcgacatggatagcattattgcggaggttaaggctcagtacgaagatatcgcgaataggtcaagagcggaagccgagtccatgtaccagatcaagtacgaagagctgcagtctctcgctgggaagcatggagacgacctgaggagaaccaaaacagaaatttccgaaatgaacagaaatatctcccgacttcaggccgaaattgaaggcctgaaaggccagcgcgccagcttggaggctgctattgccgatgcagagcaacggggcgagctcgcaataaaagacgccaacgccaaactgtctgagctggaggccgcgctgcagagggccaagcaagacatggcacgacaactccgagaataccaggagctgatgaacgtcaagcttgccctggacatagaaattgcgacttacagaaagttactcgagggggaggagtcaagactggaaagtggaatgcaaaacatgtctattcacacaaaaactacctctggctatgctgggggcctttcatcagcttacggcggcctgacctctcccggtttgtcctacagcctgggatcctctttcggatccggcgcaggctcatcttcattctctcgcacttctagcagcagggccgttgtggtgaaaaaaattgagacaagggatggaaagctcgtgtcggagagctctgacgtcctgcctaaatag

SEQ ID NO: 90187 - DNA, 1536 bp, Artificial Sequence
  derived and/or modified sequence
atgaacggagtctcttggtcacaggacctgcaggagggtatcagtgcctggtttggccctcccgctagtactcccgcatctacaatgagtatccgcgtcactcagaagagctataaggttagtacctcagggcctcgcgcattttcatcccgctcatacacatctggtccaggctctaggatcagctctagttcttttagtcgcgttgggtcctcaaactttcgcggtggtttaggcggagggtatggaggagccagtggcatgggtggcatcacagcggtaacggtaaaccagtctctgttatcaccactcgtgctggaagtcgatccaaacatccaggcagtccggactcaggagaaagagcagattaagacgttaaacaataaatttgcatcctttatcgacaaggtgaggtttttggagcagcagaacaagatgctcgagacaaagtggtccttgctccaacagcaaaagacagccaggtccaacatggacaacatgtttgagtcgtatatcaataacctgcggaggcagttagagacgctaggacaagaaaagctgaaattagaggcagagctaggtaatatgcaagggctggtggaagacttcaagaataagtatgaggacgagattaacaagaggaccgagatggagaacgagtttgtgctgatcaaaaaagatgtggatgaggcctacatgaacaaggtggaattggagagtaggttggaaggattgacagacgaaatcaatttcctgcggcagctctacgaggaggaaattcgcgaattgcagagccagatatccgacacctctgtggttttatcaatggacaacagcaggtctctggacatggatagcataatagccgaggtgaaggcccaatacgaggacatcgcaaataggtctcgagcagaagccgaatccatgtaccagattaagtacgaggagctacagagcctggcagggaaacatggggatgacctgcggagaacgaaaacggaaatctccgaaatgaaccgaaatatttctcgcttgcaggccgaaattgagggcctgaaaggacaaagggccagcctagaagctgccattgctgatgcagagcagcggggtgaactggccattaaggacgccaacgctaaactcagcgagctagaggctgccttgcagcgggctaagcaggacatggcgagacagctaagggaataccaggagctaatgaacgtgaagctagcactggacattgagattgccacctatcggaagctgcttgagggagaagagtctaggctggaatcaggaatgcagaacatgtctatccacacaaagactacaagtggctatgcgggtgggttgagctctgcttacggtggcctcaccagcccaggcctcagttatagtctgggaagctcattcgggtcaggagcaggttctagtagttttagtcggacgagttcctcgagagcagtagtggtgaagaaaattgaaaccagagacgggaagctcgtctctgagtccagcgacgtgcttcctaagtag

SEQ ID NO: 90188 - DNA, 1500 bp, Artificial Sequence
  derived and/or modified sequence
atgagcacccccagcggcatcagcacctggctgagcctgcccgtgagcacccccgccagcatcaccagcatcagagtgacccagaagagcagcggcccctgggccttcagcagctgcacctacgtgagcggccccggcgtgtgcatcagcagcctgagctgcagcagagtgggcagcagcagcttcagaggcggcctgggcggcggctacggcggcgccagcggcatgggcggcatcatcgccatcatggtgaaccagagcctgctgagccccctgaacctggaggtggaccccaacatccaggccgtgtgcacccaggagaaggagcagatcaagaccctgaacaacaagttcgccagcttcatcgacaaggtgtggttcctggagcagcagaacaaggtgctggagaccaagtggagcctgctgcagcagcagaagatggccagaagcaacatggacaacatgctggagagctacatcaacaacctgagaagacagctggagaccctgggccaggagaagctgaagctggaggccgagctgggcaacatgcagggcctgggcgaggacttcaagaacaagtacgaggacgagatcaacaagcacaccgaggtggagaacgagttcgtgctgatcaagaaggacgtggacgaggcctacatgaacaaggccgagctggagagcctgctggagggcctgaccgacgagatcaacttcctgagacagctgtacgaggaggagatcagagagctgcagagccagatcagcgacatgagcatggtgctgagcatggactacagctgcagcagagacatggacagcatcatccccgaggtgaaggtgcagtacgaggagatcgccaactgcagcagagccgaggccgagagcatgtaccagatcaagtacgaggagctgcagaccctggccggcaagtacggcgacgacctgagcagaaccaagaccgagatcagcgagatgaacagaaacatcagctggctgcaggccgagaccgagggcctgaagggccagagagccagcctggaggccgccatcaccgacgccgagcagagaggcgagctggccgtgaaggacgccaacgccaagctgagcgagctggaggccgccctgcagagagccaagcaggacatgatgggccagctgagagagtaccaggagctgatgaacgtgggcctgaccctggacatcgagatcgccacctacagaaagctgctggagggcgaggagagcagactggagagcggcatgcagaacgtgagcatccacaccaagaccaccagcagctacgccggcggcctgagcagcgcctacggcggcctgaccagccccggcatcatctacagactgggcagcagcttcggcagcgccgccggcagcagcagcttcagcagaaccagcagcaccagagccgtggtggtgagaaagatcgagacccacgacggcaagctggagagcgagagcagcgacgtgctgagcaagtag

SEQ ID NO: 90189 - DNA, 1500 bp, Artificial Sequence
  derived and/or modified sequence
atgagcacaccaagtgggatctctacatggctctctctgcccgtctctacaccagccagcatcacatcgatacgtgtgacccagaaatcatcgggcccctgggctttctcaagctgcacttacgtatcggggccaggtgtgtgcatttcaagtctgtcttgcagcagggtgggtagctcaagctttcggggtggactcgggggaggatatggaggtgccagcggcatgggaggcataattgccataatggttaatcaatcattgctgtctcctctgaacctcgaagtggatccgaatattcaagccgtctgcactcaagagaaggaacaaatcaaaaccctgaacaacaagtttgcatcgttcattgacaaagtgtggtttttggagcagcagaacaaggtgctcgagaccaaatggagtctgctccagcagcagaagatggccagatccaacatggataatatgcttgagagttatataaacaatctgcgtcggcagctcgaaactctgggacaagaaaaactgaagttagaagctgaattaggcaacatgcagggccttggcgaagactttaagaataagtacgaagatgaaattaataaacacactgaagtcgagaatgaatttgtgctgatcaagaaggacgtagacgaagcctatatgaacaaggccgagctggaaagcctcctcgaagggctcacagatgaaattaattttttgcgccaactttacgaggaggagattcgcgagctccagtcccagatcagtgatatgtctatggttctgagtatggattattcctgctccagagacatggattcaataatccctgaggtgaaggtgcaatatgaggagattgctaattgctcaagggccgaggctgaaagtatgtaccagattaagtacgaagagctacaaaccctggctggcaaatacggtgacgatctgtcacgcaccaagactgagataagtgaaatgaatcggaatataagctggctccaagcagagaccgagggcctgaagggtcaacgcgcgtctctggaggcggccatcacagatgcggagcagcggggggagctcgccgtaaaagacgcaaatgctaaactgtccgaactggaggctgctctccagagagctaagcaggacatgatgggccagctgcgcgagtaccaggagttgatgaacgttggcctgactctggacattgaaatagccacttaccggaaactactggaaggagaggaaagccggctcgagtctggaatgcagaatgttagcatacatacaaagactacaagctcatatgccgggggactctcttccgcctacggagggctgacatctccgggcatcatctatcgattgggctcctcgttcggatctgccgccgggtctagctcttttagtaggacctcatcaacaagagctgtagtggtcaggaagatagagactcacgacgggaaacttgagagcgaatcatccgacgtgctgtccaaatag

SEQ ID NO: 90190 - DNA, 1500 bp, Artificial Sequence
  derived and/or modified sequence
atgagcaccccatctggcatcagcacctggctgagcctgcctgtgtccaccccagccagcatcaccagcatccgggtgacccagaagagcagcggcccctgggccttcagcagctgcacctacgtgtctggccctggggtgtgcatcagcagcctgagctgcagccgggtgggcagcagcagcttccggggcggcctgggcggcggctacggcggggccagcggcatgggcggcatcatcgccatcatggtgaaccagagcctgctgagccccctgaacctggaggtggaccccaacatccaggccgtgtgcacccaggagaaggagcagatcaagaccctgaacaacaagtttgccagcttcatcgacaaggtgtggttcctggagcagcagaacaaggtgctggagaccaagtggagcctgctgcagcagcagaagatggcccggagcaacatggacaacatgctggagagctacatcaacaacctgcggcggcagctggagaccctgggccaggagaagctgaagctggaggccgagctgggcaacatgcagggcctgggggaggacttcaagaacaagtatgaagatgagatcaacaagcacacagaggtggagaatgaatttgtgctgatcaagaaggatgtggatgaggcctacatgaacaaggccgagctggagagcctgctggagggcctgacagatgagatcaacttcctgcggcagctgtatgaggaggagatccgggagctgcagagccagatcagtgacatgtccatggtgctgtccatggactacagctgcagccgggacatggacagcatcatccctgaggtgaaggtgcagtatgaggagatcgccaactgcagcagagctgaggccgagagcatgtaccagatcaagtatgaggagctgcagaccctggccggcaagtatggagatgacctgagcaggaccaagacagagatcagcgagatgaacagaaacatctcctggctgcaggccgagacagagggcctgaagggccagagggccagcctggaggccgccatcacagatgctgagcagagaggagagctggccgtgaaggatgccaatgccaagctgtctgagctggaggccgccctgcagagggccaagcaggacatgatgggccagctgcgggagtaccaggagctgatgaatgtgggcctgaccctggacatcgagatcgccacctacaggaagctgctggagggggaggagagccggctggagagcggcatgcagaatgtgtccatccacaccaagaccaccagcagctatgctgggggcctgagcagcgcctatggaggcctgaccagccctggcatcatctaccgcctgggcagcagctttggatctgctgctggcagcagcagcttcagcaggaccagcagcaccagggctgtggtggtgaggaagattgagacccatgatggcaagctggagagcgagagcagtgatgtgctgagcaagtag

SEQ ID NO: 90191 - DNA, 1500 bp, Artificial Sequence
  derived and/or modified sequence
atgagcacccccagcggcatcagcacctggctgagcctgcccgtgagtaccccagcttctataacttctattcgggtcacccaaaaatcgtcagggccgtgggccttttcttcttgtacatatgtgtcgggccctggagtgtgcatctcttcactctcctgttcgcgggtgggctcctcatctttccgggggggcctcgggggcggttacgggggcgcgtccgggatgggcggcataatcgccataatggtgaaccagtccctcctgagcccactgaacctcgaggtggaccccaatatccaagctgtgtgtacacaggaaaaggagcagatcaaaactcttaataataagttcgcatctttcattgataaggtgtggtttcttgagcaacaaaacaaggtgctggagactaaatggagtcttcttcaacagcaaaagatggccagaagcaacatggacaacatgctggagagctacatcaacaatctgcgcaggcagctcgagaccctcggccaagagaagctgaaacttgaggcggaattaggtaacatgcaaggacttggggaagactttaagaacaagtatgaggacgagatcaacaagcatactgaggtggaaaacgagtttgtccttatcaagaaggacgttgatgaggcctacatgaacaaagcagagctagagtctctcctcgagggactcacagacgagatcaattttctgagacagctgtatgaagaggagatcagggagctacagagccaaatcagcgacatgagcatggttctgtctatggattattcatgtagtagggacatggattccattatccccgaagtgaaggtgcaatatgaagagatcgcaaattgctctcgggcagaggccgaatctatgtaccagatcaagtatgaggagttgcagacgctggcggggaagtatggtgacgatttgagcaggactaaaaccgagattagtgaaatgaaccgaaatattagctggttacaggccgagacagagggactgaagggccaacgcgcttccctggaagccgcaatcaccgacgccgagcagagaggagaactagctgttaaagacgcgaatgcgaaactttctgaattggaggcagccttgcagagagccaagcaagatatgatgggccagctgagggaataccaagagcttatgaacgtcggtctcacacttgatatcgaaattgccacgtatcgaaagctgttggagggggaagagagcagactggaatcagggatgcaaaatgtatccattcataccaaaaccacaagctcgtatgcaggcggcctgtcatcagcctacggcggattgacgagtccaggcattatatatcgtctcggttcttccttcggatctgccgccggttcatcatctttcagcaggactagtagcaccagggcggttgtagtacgcaagatcgagacccacgatggcaaattggagagcgaatcttcagatgtactcagcaaatag

SEQ ID NO: 90192 - DNA, 1500 bp, Artificial Sequence
  derived and/or modified sequence
atgtctactccttctggaatatccacctggctcagcctgcctgtttcgactcctgcctccatcacatccatcagagtgacccagaagtcctctggcccctgggccttcagcagctgcacctacgtgagtgggcctggcgtctgcatcagctccttgagctgctcccgagtggggagcagcagctttcggggtggcctgggtggaggctatggtggggccagtggcatgggaggcatcatcgccatcatggtcaaccagagcctgttgagcccccttaacctggaggtggaccccaacatccaggccgtgtgtacccaggagaaggagcagatcaagaccctcaacaacaagtttgcctccttcatcgacaaggtatggttcctggagcagcagaacaaggtgctggagaccaagtggagcctcctgcagcagcagaagatggctcggagtaacatggacaacatgttggagagctacatcaacaaccttaggcggcagctggagactctgggccaggagaagctgaagctggaagcagagcttggcaacatgcaggggctgggggaggacttcaagaacaagtatgaggatgagatcaataagcatacggaggtggagaatgaatttgtcctcatcaagaaggatgttgatgaagcttacatgaacaaggcagaactggagtccctcctggaagggctgactgacgagatcaacttcctcaggcagctgtatgaagaggagatccgggagctgcagtcccagatctccgacatgtctatggtgctgtccatggactacagctgctctcgggacatggacagcatcatccctgaggtcaaggtgcagtatgaggagattgccaactgcagccgggctgaggctgagagcatgtaccagatcaagtatgaggagctgcagacgctggctgggaagtacggggatgacctaagccgcacaaagactgagatctccgagatgaaccggaacatcagctggctccaggctgagaccgagggcctcaaaggccagagggcttccctggaggccgccatcacagatgccgagcagcgtggggagctggctgttaaggatgccaacgccaagctgtccgagctggaggccgccctgcagcgggccaagcaggacatgatggggcagctgcgtgagtaccaggagctgatgaacgtcgggcttaccctggacatcgagattgccacctacaggaagctgctggagggcgaggagagccggctggaatctgggatgcagaacgtgagtatccatacgaagaccaccagcagctatgcaggtgggctgagctcggcctatgggggcctcacaagccccggcatcatctaccgcctgggctccagctttggctctgccgcgggctccagctccttcagccgcaccagctccaccagggccgtggttgtgaggaagatcgagacccatgatggcaagctggagtccgagtcctctgacgtcctgtccaagtga

SEQ ID NO: 90193 - DNA, 1500 bp, Artificial Sequence
  derived and/or modified sequence
atgagcaccccgagcgggatttccacatggctgtctctgccagtgtcaacccccgctagtatcactagcatcagagtaacccaaaagagttctgggccttgggccttttcctcatgcacctacgtttccggacctggagtgtgtatttcttcgctgtcctgttcacgagtaggctcctcatcttttagagggggtttagggggtgggtacggcggagcgagtggcatgggcggaataatcgccatcatggtgaatcagagcctactgagtcccctgaacctggaagtggacccaaatatccaggctgtctgcactcaagaaaaagaacagattaaaacactgaataacaagttcgcctcgtttatcgacaaggtttggtttctggaacagcagaacaaggttctggagacaaagtggagcctacttcaacagcagaaaatggcacgctctaacatggataatatgctggagtcctatattaacaatttgaggcgtcagctggagaccttaggccaggaaaaattgaaactggaagcagagttaggaaacatgcaaggtctgggtgaagacttcaagaataagtacgaagatgagattaataaacatacggaggtggaaaacgaattcgtgctgatcaaaaaggacgtggacgaggcctatatgaacaaagccgaactggagtctcttctggaagggctgacagatgagattaatttcctaagacagctctatgaagaggaaattcgggaactgcagagtcagatctctgacatgagtatggtcctttccatggactattcctgttctagggacatggactccattattcccgaggtgaaagtccaatacgaggagattgcaaactgctccagggccgaggcggagtcgatgtaccagattaagtatgaagagttgcagactctggctgggaagtacggggatgatctctcaaggacaaaaactgaaatcagcgaaatgaatagaaacatcagttggctccaggccgaaactgagggtttgaaagggcagagggccagcctggaagcagccattaccgacgctgagcagcggggtgagttagccgtcaaagatgctaatgccaagttaagtgagctggaggctgcccttcagcgagccaaacaggacatgatgggccagcttcgggaataccaagaactgatgaacgtcggactgacactggacatcgagatagcaacctatcgcaagctattagagggagaagagagcaggctggagtcaggcatgcagaacgtgtcaatccataccaaaactactagctcctacgcaggagggctctcatctgcatacggcggattgaccagtccgggaattatttacagattaggcagcagctttgggtcagccgctggttctagtagcttctccaggacctcatctacgagggccgtagtagtgcgcaaaatcgaaacacatgatggaaaacttgagtccgaatccagcgatgtcctgagcaagtag

SEQ ID NO: 90194 - protein, 469 aa, Artificial Sequence
  derived and/or modified sequence
MNDFGIKNMDQVAPVANSYRGTLKRQPAFDTFDGSLFAVFPSLNEEQTLQEVPTGLDSISHDSANCELPLLTPCSKAVMSQALKATFSGFKKEQRRLGIPKNPWLWSEQQVCQWLLWATNEFSLVNVNLQRFGMNGQMLCNLGKERFLELAPDFVGDILWEHLEQMIKENQEKTEDQYEENSHLTSVPHWINSNTLGFGTEQAPYGMQTQNYPKGGLLDSMCPASTPSVLSSEQEFQMFPKSRLSSVSVTYCSVSQDFPGSNLNLLTNNSGTPKDHDSPENGADSFESSDSLLQSWNSQSSLLDVQRVPSFESFEDDCSQSLCLNKPTMSFKDYIQERSDPVEQGKPVIPAAVLAGFTGSGPIQLWQFLLELLSDKSCQSFISWTGDGWEFKLADPDEVARRWGKRKNKPKMNYEKLSRGLRYYYDKNIIHKTSGKRYVYRFVCDLQNLLGFTPEELHAILGVQPDTED

SEQ ID NO: 90195 - protein, 168 aa, Artificial Sequence
  derived and/or modified sequence
MNDFGIKNMDQVAPVANSYRGTLKRQPAFDTFDGSLFAVFPSLNEEQTLQEVPTGLDSISHDSANCELPLLTPCSKAVMSQALKATFSGFKKEQRRLGIPKNPWLWSEQQVCQWLLWATNEFSLVNVNLQRFGMNGQMLCNLGKERFLELAPDFVGDILWEHLEQMIK

SEQ ID NO: 90196 - protein, 270 aa, Artificial Sequence
  derived and/or modified sequence
MNDFGIKNMDQVAPVANSYRGTLKRQPAFDTFDGSLFAVFPSLNEEQTLQEVPTGLDSISHDSANCELPLLTPCSKAVMSQALKATFSGFKKEQRRLGIPKNPWLWSEQQVCQWLLWATNEFSLVNVNLQRFGMNGQMLCNLGKERFLELAPDFVGDILWEHLEQMIKENQEKTEDQYEENSHLTSVPHWINSNTLGFGTEQAPYGMQTQNYPKGGLLDSMCPASTPSVLSSEQEFQMFPKSRLSSVSVTYCSVSQDFPGSNLNLLTNNS

SEQ ID NO: 90197 - DNA, 3672 bp, Artificial Sequence
  derived and/or modified sequence
gcccggttacttcctccagagactgacgagtgcggtgtcgctccagctcagagctcccggagccgcccggccagcgtccggcctccctgatcgtctctggccggcgccctcgccctcgcccggcgcgcaccgagcagccgcgggcgccgagcagccaccgtcccgaccaagcgccggccctgcccgcagcggcaggatgaatgatttcggaatcaagaatatggaccaggtagcccctgtggctaacagttacagagggacactcaagcgccagccagcctttgacacctttgatgggtccctgtttgctgtttttccttctctaaatgaagagcaaacactgcaagaagtgccaacaggcttggattccatttctcatgactccgccaactgtgaattgcctttgttaaccccgtgcagcaaggctgtgatgagtcaagccttaaaagctaccttcagtggcttcaaaaaggaacagcggcgcctgggcattccaaagaacccctggctgtggagtgagcaacaggtatgccagtggcttctctgggccaccaatgagttcagtctggtgaacgtgaatctgcagaggttcggcatgaatggccagatgctgtgtaaccttggcaaggaacgctttctggagctggcacctgactttgtgggtgacattctctgggaacatctggagcaaatgatcaaagaaaaccaagaaaagacagaagatcaatatgaagaaaattcacacctcacctccgttcctcattggattaacagcaatacattaggttttggcacagagcaggcgccctatggaatgcagacacagaattaccccaaaggcggcctcctggacagcatgtgtccggcctccacacccagcgtactcagctctgagcaggagtttcagatgttccccaagtctcggctcagctccgtcagcgtcacctactgctctgtcagtcaggacttcccaggcagcaacttgaatttgctcaccaacaattctgggactcccaaagaccacgactcccctgagaacggtgcggacagcttcgagagctcagactccctcctccagtcctggaacagccagtcgtccttgctggatgtgcaacgggttccttccttcgagagcttcgaagatgactgcagccagtctctctgcctcaataagccaaccatgtctttcaaggattacatccaagagaggagtgacccagtggagcaaggcaaaccagttatacctgcagctgtgctggccggcttcacaggaagtggacctattcagctgtggcagtttctcctggagctgctatcagacaaatcctgccagtcattcatcagctggactggagacggatgggagtttaagctcgccgaccccgatgaggtggcccgccggtggggaaagaggaaaaataagcccaagatgaactacgagaagctgagccggggcttacgctactattacgacaagaacatcatccacaagacgtcggggaagcgctacgtgtaccgcttcgtgtgcgacctccagaacttgctggggttcacgcccgaggaactgcacgccatcctgggcgtccagcccgacacggaggactgaggtcgccgggaccaccctgagccggccccaggctcgtggactgagtgggaagcccatcctgaccagctgctccgaggacccaggaaaggcaggattgaaaatgtccaggaaagtggccaagaagcagtggccttattgcatcccaaaccacgcctcttgaccaggctgcctcccttgtggcagcaacggcacagctaattctactcacagtgcttttaagtgaaaatggtcgagaaagaggcaccaggaagccgtcctggcgcctggcagtccgtgggacgggatggttctggctgtttgagattctcaaaggagcgagcatgtcgtggacacacacagactatttttagattttcttttgccttttgcaaccaggaacagcaaatgcaaaaactctttgagagggtaggagggtgggaaggaaacaaccatgtcatttcagaagttagtttgtatatattattataatcttataattgttctcagaatcccttaacagttgtatttaacagaaattgtatattgtaatttaaaataattatataactgtatttgaaataagaattcagacatctgaggttttatttcatttttcaatagcacatatggaattttgcaaagatttaatctgccaagggccgactaagagaagttgtaaagtatgtattatttacatttaatagacttacagggataaggcctgtggggggtaatccctgctttttgtgtttttttgtttgtttgtttgtttgtttttggggggttttcttgccttggttgtctggcaaggactttgtacatttgggagtttttatgagaaacttaaatgttattatctgggcttatatctggcctctgctttctcctttaattgtaaagtaaaagctataaagcagtatttttcttgacaaatggcatatgttttccacttctttgcatgcgtttaagtcagtttatacacaaaatggattttattttttagtttaactgtgtttctccgacagctcacctctctctgaccacccagccatttccttcctgtgctccacgttcttctgtgtgattaaaataagaatattatttttggaaatatgcaactccttttcagagatcaggagggatttatgtagcagctatttttactgcaaaagtaattcactggaaaaaaaatgtaatttgtaagaaagctttatttttatctcagctctatgtaaagttaaagttactgtacagagctgaaggacggggggcggtaggggtcttgatgaaacctcttgaacgaagcacagtttgtcccatctttgttcactcgtgtgtctcaaccatcttaatagcatgctgctcctttttgctcagtgtccacagcaagatgacgtgattcttattttcttggacacagactattctgaggcacagagcggggacttaagatgggaaagagaaagcatcggagccattcattcggagaaaacgttttgatcaaaatggagacttttgtagtcgtttcaaaagagcacctgagtcatgtgtattcccggcctttataaatgacccggtcaagttggtttcaaagtccgacaggcttgtctgtttactagctgcgtggccttggacgggtggctgacatctgtaaagaatcctcctgtgatgaaactgaggaatcgggtggccgggcaagctgggaagagcaaagccagagctgcgctgcctcaatacccacaaaagaccattcccagtatacataagcacaggatgtttttctcaagagggatgtatttatcacttggacatctgtttataatataaacagacatgtgactgggaacatcttgctgccaaaagaatcctaggcagtggctcattgtatgtgaggttgaaccacgtgaaattgccaatattaggctggcttttatctacaaagaaggagtttcatggggttcagcctaacagttatggaaactacagtccttataaaccattggcatggtaataaacagatcttaagtataaaaattttgtaattgggcctttactctctcaataataaagtattttgtttatataaa

SEQ ID NO: 90198 - DNA, 3936 bp, Artificial Sequence
  derived and/or modified sequence
agaatgatcattagtcctaagcccattcagaggttcaagaatggggtcggctcaatttcagggccttattacccaagcccggctgcccttcggtgccaccagcaccactgctccgtcgctgcggaattccaaaggcaggtttggcgttagggccttggccccagagaggacgccgagcgctccacggaaagtctccgcccggctcccagggcgcacactcgcgcgcacgtggggccgaggccctgctcccggggcctcagggccagccggcgagggacccagccgagtgacagcaggaggcggagggaagctcagagctcccggagccgcccggccagcgtccggcctccctgatcgtctctggccggcgccctcgccctcgcccggcgcgcaccgagcagccgcgggcgccgagcagccaccgtcccgaccaagcgccggccctgcccgcagcggcaggatgaatgatttcggaatcaagaatatggaccaggtagcccctgtggctaacagttacagagggacactcaagcgccagccagcctttgacacctttgatgggtccctgtttgctgtttttccttctctaaatgaagagcaaacactgcaagaagtgccaacaggcttggattccatttctcatgactccgccaactgtgaattgcctttgttaaccccgtgcagcaaggctgtgatgagtcaagccttaaaagctaccttcagtggcttcaaaaaggaacagcggcgcctgggcattccaaagaacccctggctgtggagtgagcaacaggtatgccagtggcttctctgggccaccaatgagttcagtctggtgaacgtgaatctgcagaggttcggcatgaatggccagatgctgtgtaaccttggcaaggaacgctttctggagctggcacctgactttgtgggtgacattctctgggaacatctggagcaaatgatcaaagaaaaccaagaaaagacagaagatcaatatgaagaaaattcacacctcacctccgttcctcattggattaacagcaatacattaggttttggcacagagcaggcgccctatggaatgcagacacagaattaccccaaaggcggcctcctggacagcatgtgtccggcctccacacccagcgtactcagctctgagcaggagtttcagatgttccccaagtctcggctcagctccgtcagcgtcacctactgctctgtcagtcaggacttcccaggcagcaacttgaatttgctcaccaacaattctgggactcccaaagaccacgactcccctgagaacggtgcggacagcttcgagagctcagactccctcctccagtcctggaacagccagtcgtccttgctggatgtgcaacgggttccttccttcgagagcttcgaagatgactgcagccagtctctctgcctcaataagccaaccatgtctttcaaggattacatccaagagaggagtgacccagtggagcaaggcaaaccagttatacctgcagctgtgctggccggcttcacaggaagtggacctattcagctgtggcagtttctcctggagctgctatcagacaaatcctgccagtcattcatcagctggactggagacggatgggagtttaagctcgccgaccccgatgaggtggcccgccggtggggaaagaggaaaaataagcccaagatgaactacgagaagctgagccggggcttacgctactattacgacaagaacatcatccacaagacgtcggggaagcgctacgtgtaccgcttcgtgtgcgacctccagaacttgctggggttcacgcccgaggaactgcacgccatcctgggcgtccagcccgacacggaggactgaggtcgccgggaccaccctgagccggccccaggctcgtggactgagtgggaagcccatcctgaccagctgctccgaggacccaggaaaggcaggattgaaaatgtccaggaaagtggccaagaagcagtggccttattgcatcccaaaccacgcctcttgaccaggctgcctcccttgtggcagcaacggcacagctaattctactcacagtgcttttaagtgaaaatggtcgagaaagaggcaccaggaagccgtcctggcgcctggcagtccgtgggacgggatggttctggctgtttgagattctcaaaggagcgagcatgtcgtggacacacacagactatttttagattttcttttgccttttgcaaccaggaacagcaaatgcaaaaactctttgagagggtaggagggtgggaaggaaacaaccatgtcatttcagaagttagtttgtatatattattataatcttataattgttctcagaatcccttaacagttgtatttaacagaaattgtatattgtaatttaaaataattatataactgtatttgaaataagaattcagacatctgaggttttatttcatttttcaatagcacatatggaattttgcaaagatttaatctgccaagggccgactaagagaagttgtaaagtatgtattatttacatttaatagacttacagggataaggcctgtggggggtaatccctgctttttgtgtttttttgtttgtttgtttgtttgtttttggggggttttcttgccttggttgtctggcaaggactttgtacatttgggagtttttatgagaaacttaaatgttattatctgggcttatatctggcctctgctttctcctttaattgtaaagtaaaagctataaagcagtatttttcttgacaaatggcatatgttttccacttctttgcatgcgtttaagtcagtttatacacaaaatggattttattttttagtttaactgtgtttctccgacagctcacctctctctgaccacccagccatttccttcctgtgctccacgttcttctgtgtgattaaaataagaatattatttttggaaatatgcaactccttttcagagatcaggagggatttatgtagcagctatttttactgcaaaagtaattcactggaaaaaaaatgtaatttgtaagaaagctttatttttatctcagctctatgtaaagttaaagttactgtacagagctgaaggacggggggcggtaggggtcttgatgaaacctcttgaacgaagcacagtttgtcccatctttgttcactcgtgtgtctcaaccatcttaatagcatgctgctcctttttgctcagtgtccacagcaagatgacgtgattcttattttcttggacacagactattctgaggcacagagcggggacttaagatgggaaagagaaagcatcggagccattcattcggagaaaacgttttgatcaaaatggagacttttgtagtcgtttcaaaagagcacctgagtcatgtgtattcccggcctttataaatgacccggtcaagttggtttcaaagtccgacaggcttgtctgtttactagctgcgtggccttggacgggtggctgacatctgtaaagaatcctcctgtgatgaaactgaggaatcgggtggccgggcaagctgggaagagcaaagccagagctgcgctgcctcaatacccacaaaagaccattcccagtatacataagcacaggatgtttttctcaagagggatgtatttatcacttggacatctgtttataatataaacagacatgtgactgggaacatcttgctgccaaaagaatcctaggcagtggctcattgtatgtgaggttgaaccacgtgaaattgccaatattaggctggcttttatctacaaagaaggagtttcatggggttcagcctaacagttatggaaactacagtccttataaaccattggcatggtaataaacagatcttaagtataaaaattttgtaattgggcctttactctctcaataataaagtattttgtttatataaa

SEQ ID NO: 90199 - DNA, 3766 bp, Artificial Sequence
  derived and/or modified sequence
cgtttcctcccctcccctccactcggccgtccctccttcctcctccctcctccctcctcctcccgctcctgaagagcgcgccgcgtgggggacggcccggttacttcctccagagactgacgagtgcggtgtcgctccagctcagagctcccggagccgcccggccagcgtccggcctccctgatcgtctctggccggcgccctcgccctcgcccggcgcgcaccgagcagccgcgggcgccgagcagccaccgtcccgaccaagcgccggccctgcccgcagcggcaggatgaatgatttcggaatcaagaatatggaccaggtagcccctgtggctaacagttacagagggacactcaagcgccagccagcctttgacacctttgatgggtccctgtttgctgtttttccttctctaaatgaagagcaaacactgcaagaagtgccaacaggcttggattccatttctcatgactccgccaactgtgaattgcctttgttaaccccgtgcagcaaggctgtgatgagtcaagccttaaaagctaccttcagtggcttcaaaaaggaacagcggcgcctgggcattccaaagaacccctggctgtggagtgagcaacaggtatgccagtggcttctctgggccaccaatgagttcagtctggtgaacgtgaatctgcagaggttcggcatgaatggccagatgctgtgtaaccttggcaaggaacgctttctggagctggcacctgactttgtgggtgacattctctgggaacatctggagcaaatgatcaaagaaaaccaagaaaagacagaagatcaatatgaagaaaattcacacctcacctccgttcctcattggattaacagcaatacattaggttttggcacagagcaggcgccctatggaatgcagacacagaattaccccaaaggcggcctcctggacagcatgtgtccggcctccacacccagcgtactcagctctgagcaggagtttcagatgttccccaagtctcggctcagctccgtcagcgtcacctactgctctgtcagtcaggacttcccaggcagcaacttgaatttgctcaccaacaattctgggactcccaaagaccacgactcccctgagaacggtgcggacagcttcgagagctcagactccctcctccagtcctggaacagccagtcgtccttgctggatgtgcaacgggttccttccttcgagagcttcgaagatgactgcagccagtctctctgcctcaataagccaaccatgtctttcaaggattacatccaagagaggagtgacccagtggagcaaggcaaaccagttatacctgcagctgtgctggccggcttcacaggaagtggacctattcagctgtggcagtttctcctggagctgctatcagacaaatcctgccagtcattcatcagctggactggagacggatgggagtttaagctcgccgaccccgatgaggtggcccgccggtggggaaagaggaaaaataagcccaagatgaactacgagaagctgagccggggcttacgctactattacgacaagaacatcatccacaagacgtcggggaagcgctacgtgtaccgcttcgtgtgcgacctccagaacttgctggggttcacgcccgaggaactgcacgccatcctgggcgtccagcccgacacggaggactgaggtcgccgggaccaccctgagccggccccaggctcgtggactgagtgggaagcccatcctgaccagctgctccgaggacccaggaaaggcaggattgaaaatgtccaggaaagtggccaagaagcagtggccttattgcatcccaaaccacgcctcttgaccaggctgcctcccttgtggcagcaacggcacagctaattctactcacagtgcttttaagtgaaaatggtcgagaaagaggcaccaggaagccgtcctggcgcctggcagtccgtgggacgggatggttctggctgtttgagattctcaaaggagcgagcatgtcgtggacacacacagactatttttagattttcttttgccttttgcaaccaggaacagcaaatgcaaaaactctttgagagggtaggagggtgggaaggaaacaaccatgtcatttcagaagttagtttgtatatattattataatcttataattgttctcagaatcccttaacagttgtatttaacagaaattgtatattgtaatttaaaataattatataactgtatttgaaataagaattcagacatctgaggttttatttcatttttcaatagcacatatggaattttgcaaagatttaatctgccaagggccgactaagagaagttgtaaagtatgtattatttacatttaatagacttacagggataaggcctgtggggggtaatccctgctttttgtgtttttttgtttgtttgtttgtttgtttttggggggttttcttgccttggttgtctggcaaggactttgtacatttgggagtttttatgagaaacttaaatgttattatctgggcttatatctggcctctgctttctcctttaattgtaaagtaaaagctataaagcagtatttttcttgacaaatggcatatgttttccacttctttgcatgcgtttaagtcagtttatacacaaaatggattttattttttagtttaactgtgtttctccgacagctcacctctctctgaccacccagccatttccttcctgtgctccacgttcttctgtgtgattaaaataagaatattatttttggaaatatgcaactccttttcagagatcaggagggatttatgtagcagctatttttactgcaaaagtaattcactggaaaaaaaatgtaatttgtaagaaagctttatttttatctcagctctatgtaaagttaaagttactgtacagagctgaaggacggggggcggtaggggtcttgatgaaacctcttgaacgaagcacagtttgtcccatctttgttcactcgtgtgtctcaaccatcttaatagcatgctgctcctttttgctcagtgtccacagcaagatgacgtgattcttattttcttggacacagactattctgaggcacagagcggggacttaagatgggaaagagaaagcatcggagccattcattcggagaaaacgttttgatcaaaatggagacttttgtagtcgtttcaaaagagcacctgagtcatgtgtattcccggcctttataaatgacccggtcaagttggtttcaaagtccgacaggcttgtctgtttactagctgcgtggccttggacgggtggctgacatctgtaaagaatcctcctgtgatgaaactgaggaatcgggtggccgggcaagctgggaagagcaaagccagagctgcgctgcctcaatacccacaaaagaccattcccagtatacataagcacaggatgtttttctcaagagggatgtatttatcacttggacatctgtttataatataaacagacatgtgactgggaacatcttgctgccaaaagaatcctaggcagtggctcattgtatgtgaggttgaaccacgtgaaattgccaatattaggctggcttttatctacaaagaaggagtttcatggggttcagcctaacagttatggaaactacagtccttataaaccattggcatggtaataaacagatcttaagtataaaaattttgtaattgggcctttactctctcaataataaagtattttgtttatataaa

SEQ ID NO: 90200 - protein, 416 aa, Artificial Sequence
  derived and/or modified sequence
MLNMFLDTMMADPPPQCLVWLPLMHRLAHVENVFHPVECSYCRCESMMGFRYRCQQCHNYQLCQNCFWRGHAGGPHSNQHQMKEHSSWKSPAKKLSHAISKSLGCVPTREPPHPVFPEQPEKPLDLAHIVPPRPLTNMNDTMVSHMSSGVPTPTKRLQYSQDIPSHLADEHALIASYVARLQHCARVLDSPSRLDEEHRLIARYAARLAAEAGNVTRPPTDLSFNFDANKQQRQLIAELENKNREILQEIQRLRLEHEQASQPTPEKAQQNPTLLAELRLLRQRKDELEQRMSALQESRRELMVQLEELMKLLKAQATGSPHTSPTHGGGRPMPMPVRSTSAGSTPTHCPQDSLSGVGGDVQEAFAQGTRRNLRNDLLVAADSITNTMSSLVKELHSAEEGAEEEEEKMQNGKDRG

SEQ ID NO: 90201 - DNA, 1251 bp, Artificial Sequence
  derived and/or modified sequence
atgttaaacatgtttcttgatactatgatggcagacccaccccctcagtgcctggtctggttaccactcatgcacaggctggcccatgtcgaaaacgtatttcacccagtcgagtgctcctactgccgatgcgaatcaatgatgggttttagataccgatgccagcagtgtcacaattaccagctgtgccagaattgcttctggagggggcacgccggaggaccccattctaaccagcaccagatgaaggagcattcatcttggaaaagccccgccaagaagctgagccacgctatttcaaaatcattggggtgcgtccctacgagagagccaccccaccctgtcttccctgagcaaccagagaagcctctggatctcgctcacattgtgccacccaggcctctgactaacatgaatgatactatggtgagccatatgagttctggagttccgacccctaccaaacgtctacagtacagtcaggacataccaagccacttagctgatgagcatgcactgatagcctcctatgtggctcggctgcagcattgcgcacgggttttagacagtcctagtaggctggacgaggaacacagactcattgcacgctatgcagcacgactcgcagctgaggcagggaatgtgacgcggcctcccacagacctgagttttaactttgacgccaataaacagcagcgtcaattgatagccgagctggagaacaaaaatcgggagatcctgcaggaaatccaacggctcagactggagcacgaacaggcctcacagccaacacctgagaaagcccaacagaatccgaccctgctggcagagcttaggctgctaaggcagcggaaggacgaattggaacagagaatgagcgcccttcaggaatcaaggagagagctgatggttcagctcgaagagctgatgaagctgttgaaggcacaggccactggttcaccccatacctcccctacacatggcgggggcagacccatgccaatgcccgtccgatcgacaagcgccggtagtactcccacgcactgcccacaagactctctctccggggtcggtggagatgttcaagaagcatttgcccaaggtacccgccgtaacctccggaacgacctgctagtcgctgcggactccattaccaacactatgagctctcttgttaaggaactgcactccgccgaagaaggtgccgaggaagaggaggaaaaaatgcaaaacgggaaagaccgcggatag

SEQ ID NO: 90202 - DNA, 1251 bp, Artificial Sequence
  derived and/or modified sequence
atgctgaacatgttcctggacaccatgatggctgaccccccaccccagtgcctggtgtggctgcccctgatgcaccggctggcccacgtggagaatgtgttccaccctgtggagtgcagctactgccgctgtgagagcatgatgggcttccgctaccgctgccagcagtgccacaactaccagctgtgccagaactgcttctggaggggccacgccggcggcccccacagcaaccagcaccagatgaaggagcacagctcctggaagagccctgccaagaagctgagccacgccatcagcaagagcctgggctgtgtgcccacccgggagcccccccaccctgtgtttcctgagcagcctgagaagcccctggacctggcccacatcgtgcccccccggcccctgaccaacatgaatgacaccatggtgagccacatgagcagcggcgtgcccacccccaccaagaggctgcagtacagccaggacatccccagccacctggctgatgaacatgccctgattgccagctatgtggcccggctgcagcactgtgcccgggtgctggacagccccagccggctggatgaggagcaccggctgattgcccgctatgctgcccggctggccgctgaggccggaaatgtgacccggcccccaacagacctgtccttcaactttgatgccaacaagcagcagaggcagctgattgctgagctggagaacaagaaccgggagatcctgcaggagatccagaggctgcggctggagcacgagcaggccagccagcccaccccagagaaggcccagcagaaccccaccctgctggccgagctgcggctgctgcggcagaggaaggatgagctggagcagaggatgtctgccctgcaggagagcagaagagagctgatggtgcagctggaggagctgatgaagctgctgaaggcccaggccaccggcagcccccacaccagccccacccatggaggcggccggcccatgcccatgcctgtgcgcagcaccagcgctggcagcacccccacccactgcccccaggacagcctgtctggagtgggcggagatgtgcaggaggcctttgcccagggcaccaggaggaacctgagaaatgacctgctggtggccgctgacagcatcaccaacaccatgagcagcctggtgaaggagctgcacagcgctgaggagggcgctgaggaggaggaggagaagatgcagaatggcaaggaccggggctag

SEQ ID NO: 90203 - DNA, 1251 bp, Artificial Sequence
  derived and/or modified sequence
atgctgaacatgttcctggacaccatgatggccgacccccccccccaatgcctggtctggctgcctctcatgcataggctggcccatgtggagaatgttttccatccggtggaatgtagctactgccgttgcgagtcaatgatgggtttccgttacaggtgccagcaatgccacaactatcagctatgtcagaactgcttttggagaggacacgctggaggtccacactctaatcaacaccagatgaaggaacattcgagttggaagagtccggcaaagaagctatcacatgccatcagcaaaagcctggggtgcgtccctactagagagcccccccatcccgtcttccctgaacagccggagaaacccctcgacctcgctcatatcgttccaccaaggcccttgacaaatatgaatgacacaatggtgagccacatgtcttcaggggtgccgacccctactaagaggttacagtactctcaggatatccccagccacctggcagatgaacatgctctgatcgctagctatgtggcaaggctccagcactgtgcccgcgtgttggacagtccatctagactcgacgaggagcatcggctgattgcacggtatgccgctaggctggccgcagaggcaggcaatgtaacaagaccaccaactgacctgagctttaacttcgatgccaataagcaacagcggcaactgattgctgaactggagaataagaatagggaaatcctgcaagagatccagcggctgaggctggaacacgagcaggcatctcagcccacccctgaaaaagcgcagcaaaacccaaccttattagcagagctgaggctgctgcgtcagcggaaagatgaactggaacagaggatgagcgccctgcaagaatcacgcagggagttaatggtgcagctcgaggaactgatgaaattgctgaaggcacaggccaccggaagtccacatacaagccccacgcacgggggaggacggccaatgcctatgcccgttcgatcaacatccgctggatccaccccaacccactgccctcaagattccctgtctggggtgggaggggatgttcaggaagcgtttgcacagggtactcggcgaaacctgcgtaatgacttgttagtggctgcggatagcattacaaataccatgagctcattggtgaaagagttgcattcagccgaagaaggtgctgaggaagaggaagagaagatgcagaacggaaaggacagggggtag

SEQ ID NO: 90204 - DNA, 1251 bp, Artificial Sequence
  derived and/or modified sequence
atgttaaacatgttcttggatactatgatggcagacccaccccctcagtgcctggtctggctaccactgatgcatcggcttgcacatgtggaaaatgtcttccaccccgtggagtgttcttactgccgatgtgaaagcatgatgggtttcaggtaccggtgtcagcagtgccacaactatcagctatgtcagaattgcttttggagggggcacgcagggggacctcactcaaatcagcaccagatgaaggaacactcatcttggaagtcgcccgcaaagaagctgagccacgcaatcagcaaaagtctcggctgtgtcccaactagggagccgcctcatcctgtgtttcccgagcagccagagaagcccctagatctggctcacattgtaccgccaaggccgctcaccaacatgaatgacacgatggtgtcccatatgtcatccggcgttccaaccccgaccaagagactgcagtacagtcaagatattccaagccacctcgcagatgaacacgctctgattgcgagctacgtggccaggctgcaacattgtgcccgagtactcgacagcccctctcgacttgatgaagaacacagactgatcgcaagatatgccgcaaggctggcagccgaggctggcaacgtgactaggccacctaccgacctctcgttcaatttcgatgctaataaacagcagcggcagctcatcgccgaacttgagaacaaaaatagagagatcctccaggagatccagcgcctgaggctcgagcacgaacaggctagccagccgactcctgagaaagcccaacagaaccccactctgctggccgagcttaggctgttacggcagcgcaaggatgagctcgaacagcgcatgagtgcgctgcaagagtctcggagagagctgatggtacaattagaagaactgatgaaactgctcaaggcgcaggccactgggtccccgcacacgtcaccaacccatggtggagggcgaccgatgcccatgcctgttaggagcacctccgccggttctactcctacacactgtccacaggactccctctcaggtgtgggcggagacgtgcaggaagctttcgcccagggcacaagacgcaatctgagaaacgatcttctggtggctgctgattcaataacaaacactatgtcatccctcgtgaaggaactgcattctgcagaagagggcgctgaggaagaggaggagaaaatgcaaaacggcaaagaccggggatag

SEQ ID NO: 90205 - DNA, 1251 bp, Artificial Sequence
  derived and/or modified sequence
atgctgaacatgttcctggacaccatgatggccgacccccccccccagtgcctggtgtggctgcccctgatgcacagactggcccacgtggagaacgtgttccaccccgtggagtgcagctactgcagatgcgagagcatgatgggcttcagatacagatgccagcagtgccacaactaccagctgtgccagaactgcttctggagaggccacgccggcggcccccacagcaaccagcaccagatgaaggagcacagcagctggaagagccccgccaagaagctgagccacgccatcagcaagagcctgggctgcgtgcccaccagagagcccccccaccccgtgttccccgagcagcccgagaagcccctggacctggcccacatcgtgccccccagacccctgaccaacatgaacgacaccatggtgagccacatgagcagcggcgtgcccacccccaccaagagactgcagtacagccaggacatccccagccacctggccgacgagcacgccctgatcgccagctacgtggccagactgcagcactgcgccagagtgctggacagccccagcagactggacgaggagcacagactgatcgccagatacgccgccagactggccgccgaggccggcaacgtgaccagaccccccaccgacctgagcttcaacttcgacgccaacaagcagcagagacagctgatcgccgagctggagaacaagaacagagagatcctgcaggagatccagagactgagactggagcacgagcaggccagccagcccacccccgagaaggcccagcagaaccccaccctgctggccgagctgagactgctgagacagagaaaggacgagctggagcagagaatgagcgccctgcaggagagcagaagagagctgatggtgcagctggaggagctgatgaagctgctgaaggcccaggccaccggcagcccccacaccagccccacccacggcggcggcagacccatgcccatgcccgtgagaagcaccagcgccggcagcacccccacccactgcccccaggacagcctgagcggcgtgggcggcgacgtgcaggaggccttcgcccagggcaccagaagaaacctgagaaacgacctgctggtggccgccgacagcatcaccaacaccatgagcagcctggtgaaggagctgcacagcgccgaggagggcgccgaggaggaggaggagaagatgcagaacggcaaggacagaggctag

SEQ ID NO: 90206 - DNA, 1857 bp, Artificial Sequence
  derived and/or modified sequence
gaagcggcgcgagccgggcgctgcgaacgttcgccgcgggggtggctccggggcctgagtaggcgctgccgctgcctcagccgagggggctgggccggagcgtgcggaggagtgaggccgcaggagaccttcccgacgacccctgctccggcggggaagtgagcaaggatgattgaggaaagtgggaacaagcggaagaccatggcagagaagaggcagctgttcatagaaatgcgtgctcagaattttgatgtcatacgactatcaacttacagaacagcctgcaaattacgatttgtacaaaaacgatgcaaccttcatcttgttgatatctggaacatgattgaagccttccgagacaatggccttaatacactggaccataccaccgagatcagtgtgtcccgcctcgaaactgtcatctcctccatctactatcagttgaacaagcgccttccttctactcaccaaattagtgtggaacaatctatcagcctcctcctcaactttatgattgctgcatatgacagagaaagataatgctaaatatgtttttagacacaatgatggctgaccctcctccccagtgccttgtctggctacctctcatgcacaggcttgcccatgttgagaatgtcttccatcccgtggagtgctcctactgccgatgtgagagtatgatgggtttccggtaccgatgccagcagtgccacaactatcagctctgccagaattgcttttggcgtggccatgccggcggccctcacagcaaccagcaccagatgaaggagcattcctcttggaaatctcctgcaaagaagctgagccatgcaattagtaaatctttggggtgtgtacccacgagagaacccccgcatcctgtttttcctgagcaaccagagaaaccacttgaccttgcacatatagttcctcctcgccctctgactaatatgaatgacaccatggttagccacatgtcctctggagtgcccactcccaccaagaggttacagtatagccaggatatacccagtcacttggccgatgagcatgcgctgatagcctcctatgtggcccgtctgcagcactgtgcacgtgttctggacagtcctagccgactggatgaggaacaccgtcttatagctcgctatgctgcccggctggctgcagaagcaggaaacgtgactcgtcctcccactgacttgagctttaactttgatgccaacaaacaacaaagacagcttattgcagaactggaaaacaaaaacagagagatcctgcaggagattcagcgtctccgcctggaacacgagcaggcctcccagcccacccctgagaaggcacagcagaaccccacgctgctggcagagctgcggctgctgaggcaaaggaaggatgaactggagcagaggatgtcggccctgcaggagagcaggcgggagctgatggtccagctggaagagctgatgaagttgctgaaggctcaggccacagggtcaccacatacatcgcccacccatggaggcggccggccaatgcccatgccagtgcgctccacgtctgccggctccacccccacccactgtccgcaggactcgctgagcggagtcgggggagacgtgcaggaggccttcgcacaaggtacgaggagaaacctccgcaatgacctgctggtggcagctgactccatcaccaacaccatgtcatccctggtgaaggagctccattcagcagaggaaggtgcagaggaagaagaagagaagatgcagaatgggaaagacagaggttagcagaggagccggacacagaggaagctcaggcacagaggacgaggagcaagctggcgccgacatggcg

SEQ ID NO: 90207 - protein, 545 aa, Artificial Sequence
  derived and/or modified sequence
MIEAFRDNGLNTLDHTTEISVSRLETVISSIYYQLNKRLPSTHQISVEQSISLLLNFMIAAYDSEGRGKLTVFSVKAMLATMCGGKMLDKLRYVFSQMSDSNGLMIFSKFDQFLKEVLKLPTAVFEGPSFGYTEHSVRTCFPQQRKIMLNMFLDTMMADPPPQCLVWLPLMHRLAHVENVFHPVECSYCRCESMMGFRYRCQQCHNYQLCQNCFWRGHAGGPHSNQHQMKEHSSWKSPAKKLSHAISKSLGCVPTREPPHPVFPEQPEKPLDLAHIVPPRPLTNMNDTMVSHMSSGVPTPTKRLQYSQDIPSHLADEHALIASYVARLQHCARVLDSPSRLDEEHRLIARYAARLAAEAGNVTRPPTDLSFNFDANKQQRQLIAELENKNREILQEIQRLRLEHEQASQPTPEKAQQNPTLLAELRLLRQRKDELEQRMSALQESRRELMVQLEELMKLLKAQATGSPHTSPTHGGGRPMPMPVRSTSAGSTPTHCPQDSLSGVGGDVQEAFAQGTRRNLRNDLLVAADSITNTMSSLVKELHSG

SEQ ID NO: 90208 - DNA, 2330 bp, Artificial Sequence
  derived and/or modified sequence
acaaacacagtaattcctgatactaagaagaggctggggtgccttaagtaatacgcatgcaggcgttgatggggtagagatctgaagtagtcctgccaagaactgggtttacttctttgtgaatgttactactcttacacagaaacctcatatgaattatcatcctctgacttaaggataacagtcagtctgggagacgtttggtgctcagaattttgatgtcatacgactatcaacttacagaacagcctgcaaattacgatttgtacaaaaacgatgcaaccttcatcttgttgatatctggaacatgattgaagccttccgagacaatggccttaatacactggaccataccaccgagatcagtgtgtcccgcctcgaaactgtcatctcctccatctactatcagttgaacaagcgccttccttctactcaccaaattagtgtggaacaatctatcagcctcctcctcaactttatgattgctgcatatgacagtgagggccgaggcaagttgacggtattttcagttaaagctatgttagcaaccatgtgtggtggaaaaatgctggacaaattgagatatgttttctcccagatgtcagattccaatggcttaatgatatttagcaagtttgaccagtttctgaaggaagttctgaagctcccaacagctgtctttgaagggccatcttttggttacacagagcactcagtccgcacctgttttccacagcagagaaagataatgctaaatatgtttttagacacaatgatggctgaccctcctccccagtgccttgtctggctacctctcatgcacaggcttgcccatgttgagaatgtcttccatcccgtggagtgctcctactgccgatgtgagagtatgatgggtttccggtaccgatgccagcagtgccacaactatcagctctgccagaattgcttttggcgtggccatgccggcggccctcacagcaaccagcaccagatgaaggagcattcctcttggaaatctcctgcaaagaagctgagccatgcaattagtaaatctttggggtgtgtacccacgagagaacccccgcatcctgtttttcctgagcaaccagagaaaccacttgaccttgcacatatagttcctcctcgccctctgactaatatgaatgacaccatggttagccacatgtcctctggagtgcccactcccaccaagaggttacagtatagccaggatatacccagtcacttggccgatgagcatgcgctgatagcctcctatgtggcccgtctgcagcactgtgcacgtgttctggacagtcctagccgactggatgaggaacaccgtcttatagctcgctatgctgcccggctggctgcagaagcaggaaacgtgactcgtcctcccactgacttgagctttaactttgatgccaacaaacaacaaagacagcttattgcagaactggaaaacaaaaacagagagatcctgcaggagattcagcgtctccgcctggaacacgagcaggcctcccagcccacccctgagaaggcacagcagaaccccacgctgctggcagagctgcggctgctgaggcaaaggaaggatgaactggagcagaggatgtcggccctgcaggagagcaggcgggagctgatggtccagctggaagagctgatgaagttgctgaaggctcaggccacagggtcaccacatacatcgcccacccatggaggcggccggccaatgcccatgccagtgcgctccacgtctgccggctccacccccacccactgtccgcaggactcgctgagcggagtcgggggagacgtgcaggaggccttcgcacaaggtacgaggagaaacctccgcaatgacctgctggtggcagctgactccatcaccaacaccatgtcatccctggtgaaggagctccattcaggttagcagaggagccggacacagaggaagctcaggcacagaggacgaggagcaagctggcgccgacatggcgaaggcaaggtcttcccccagaggcacattcctctccatctttccaccgcacacctggaccaggcttgcaggctgccagacgtcactccacccgccagggagaggggagccagagccggtgggaagcggggaggggctgcgtggcacagctagtgggcctccccctgcacagccctgcatgtactagcaccttcatcactcccctcagggcatggtctcatctccgcatcaggaattcacctggaggttgaaaagagaaaagaaaaagcaccaagctcttgtgtgtttgtgacctgatgaaacacttcctggcgtctgg

SEQ ID NO: 90209 - protein, 143 aa, Artificial Sequence
  derived and/or modified sequence
MHVNGKVALVTGAAQGIGRAFAEALLLKGAKVALVDWNLEAGVQCKAALDEQFEPQKTLFIQCDVADQQQLRDTFRKVVDHFGRLDILVNNAGVNNEKNWEKTLQINLVSVISGTYLGLDYMSKQNGGEGGIIINMSSLAAHH

SEQ ID NO: 90210 - DNA, 432 bp, Artificial Sequence
  derived and/or modified sequence
atgcacgtgaacggcaaggtggccctggtgaccggcgccgcccagggcatcggcagagccttcgccgaggccctgctgctgaagggcgccaaggtggccctggtggactggaacctggaggccggcgtgcagtgcaaggccgccctggacgagcagttcgagccccagaagaccctgttcatccagtgcgacgtggccgaccagcagcagctgagagacaccttcagaaaggtggtggaccacttcggcagactggacatcctggtgaacaacgccggcgtgaacaacgagaagaactgggagaagaccctgcagatcaacctggtgagcgtgatcagcggcacctacctgggcctggactacatgagcaagcagaacggcggcgagggcggcatcatcatcaacatgagcagcctggccgcccaccactag

SEQ ID NO: 90211 - DNA, 432 bp, Artificial Sequence
  derived and/or modified sequence
atgcacgtaaacggaaaagtggcgcttgtgacaggagcggctcaggggattggaagggcctttgccgaggccctcctacttaaaggagctaaggtggcgctcgtcgactggaaccttgaggctggagttcaatgcaaggctgctttagacgagcagttcgaacctcagaagaccctcttcatccagtgtgacgtggcggatcagcaacaactccgcgatacgtttagaaaggtggtggaccatttcggtcgactggatatcctggttaacaatgccggagtgaacaacgaaaaaaactgggagaagacactgcagattaacctggtaagcgtcatctcgggtacctacctgggcttggactacatgtccaagcagaacgggggagagggcggaattatcatcaacatgagcagcttggcagcccatcactag

SEQ ID NO: 90212 - DNA, 583 bp, Artificial Sequence
  derived and/or modified sequence
atgcacgtgaacggcaaagtggcgctggtgaccggcgcggctcagggcataggcagagcctttgcagaggcgctgctgcttaagggcgccaaggtagcgctggtggattggaatcttgaagcaggtgtacagtgtaaagctgccctggatgagcagtttgaacctcagaagactctgttcatccagtgcgatgtggctgaccagcaacaactgagagacacttttagaaaagttgtagaccactttggaagactggacattttggtcaataatgctggagtgaataatgagaaaaactgggaaaaaactctgcaaattaatttggtttctgttatcagtggaacctatcttggtttggattacatgagtaagcaaaatggaggtgaaggcggcatcattatcaatatgtcatctttagcagcccaccattgattgccaatggattgataacactcattgaagatgatgctttaaatggtgctattatgaagatcacaacttctaagggaattcattttcaagactatgatacaactccatttcaagcaaaaacccaatgaacagcttatgtgttagccatagc

SEQ ID NO: 90213 - DNA, 432 bp, Artificial Sequence
  derived and/or modified sequence
atgcacgtgaatggcaaggtggccctggtgactggagctgcccagggcatcggccgggcctttgctgaggccctgctgctgaagggggccaaggtggccctggtggactggaacctggaggccggcgtgcagtgcaaggccgccctggatgagcagtttgagccccagaagaccctcttcatccagtgtgatgtggccgaccagcagcagctgcgggacaccttcaggaaggtggtggaccacttcggccgcctggacatcctggtgaacaatgctggggtgaacaatgagaagaactgggagaagaccctgcagatcaacctggtgtctgtcatcagcggcacctacctgggcctggactacatgagcaagcagaatggaggagagggcggcatcatcatcaacatgagcagcctggccgcccaccactag

SEQ ID NO: 90214 - DNA, 432 bp, Artificial Sequence
  derived and/or modified sequence
atgcacgtgaacggcaaggtggccctggtgaccggcgccgcccaggggatcggaagggcttttgcagaggctctgctgcttaaaggcgccaaggtcgctctggtggattggaacctggaggccggcgtgcaatgcaaagctgccctcgatgaacagtttgaaccccagaagacattgttcattcagtgtgatgtggccgaccaacagcagctccgagacacctttcgcaaggtggtggaccacttcgggcgtcttgacattctcgtgaataacgccggggttaataatgagaagaactgggagaaaacactccagatcaatctggtgagcgtcatctccggaacctacctgggcctggactatatgtccaaacagaacggtggggaaggaggcataatcatcaacatgagctcacttgcggcgcatcactag

SEQ ID NO: 90215 - DNA, 432 bp, Artificial Sequence
  derived and/or modified sequence
atgcacgtgaatggtaaggtcgctttggttaccggtgctgcccagggcataggtcgcgctttcgccgaagccttgcttctgaaaggcgctaaggtcgctcttgtcgactggaatctggaggctggagtgcagtgcaaggccgctctagacgagcagttcgagcctcagaagacactgtttatccagtgcgatgtggccgaccaacagcagctgcgggacacctttaggaaagtagtagaccattttggcaggcttgacatcctcgttaacaacgctggcgtgaacaacgagaaaaactgggagaaaacattgcagatcaatctggtttcagtaatttccgggacttatctgggccttgattacatgagtaaacaaaatggaggagaagggggtatcatcattaatatgtcatctctggcagcccaccattag

SEQ ID NO: 90216 - DNA, 438 bp, Artificial Sequence
  derived and/or modified sequence
atgagcaagcagaacggcggcgagggcggcatcatcatcaacatgagcagcctggccggcctgatgcccgtggcccagcagcccgtgtactgcgccagcaagcacggcatcgtgggcttcaccagaagcgccgccctggccgccaacctgatgaacagcggcgtgagactgaacgccatctgccccggcttcgtgaacaccgccatcctggagagcatcgagaaggaggagaacatgggccagtacatcgagtacaaggaccacatcaaggacatgatcaagtactacggcatcctggacccccccctgatcgccaacggcctgatcaccctgatcgaggacgacgccctgaacggcgccatcatgaagatcaccaccagcaagggcatccacttccaggactacgacaccacccccttccaggccaagacccagtag

SEQ ID NO: 90217 - DNA, 438 bp, Artificial Sequence
  derived and/or modified sequence
atgtcaaagcaaaatggtggcgaagggggcatcataataaatatgtcaagccttgctggtctcatgccagtagcgcagcagccagtgtactgcgcatcgaagcatggtatcgtgggctttacgcggagtgctgctttggccgccaacttaatgaacagtggggtgaggctgaacgccatctgcccgggattcgtgaataccgctattttggagtccatcgaaaaggaagagaacatgggacagtacatcgaatataaagatcatattaaggacatgattaaatactatggtattttggatccgccgctgattgctaacgggctcattaccttgatagaggatgatgcactaaatggggcaattatgaaaatcactacctcaaaagggattcacttccaggactacgacacaaccccgttccaggcaaagacccagtag

SEQ ID NO: 90218 - DNA, 438 bp, Artificial Sequence
  derived and/or modified sequence
atgagtaaacagaacgggggggaggggggaattatcattaatatgtcgagcctggccggtttaatgcccgtggctcaacagcccgtgtattgtgcctctaagcacggcatcgtcggatttacccgatctgccgctctcgcagccaatctgatgaacagcggagtgcgcctgaacgctatttgccctggttttgtgaatacagcgattttggagtctatcgaaaaggaggagaatatgggacagtacatcgagtataaagaccatattaaagatatgatcaaatattacggtatcctcgacccccccttaattgcaaacggcctgatcacgctaattgaggacgacgctctgaacggcgcgatcatgaaaatcacgactagcaagggcatccattttcaggattatgacactaccccctttcaggctaaaactcagtag

SEQ ID NO: 90219 - DNA, 438 bp, Artificial Sequence
  derived and/or modified sequence
atgagcaagcagaatggaggagagggcggcatcatcatcaacatgagcagcctggccggcctgatgcctgtggcccagcagcctgtgtactgtgccagcaagcatggaattgtgggcttcaccaggtctgctgccctggccgccaacctgatgaacagcggcgtgcggctgaatgccatctgccccggctttgtgaacacagccatcctggagagcattgagaaggaggagaacatgggccagtacatcgagtacaaggaccacatcaaggacatgatcaagtactacggcatcctggaccccccactcatcgccaacggcctcatcaccctgattgaagatgatgccctgaatggagccatcatgaagatcaccaccagcaagggcatccacttccaggactatgacaccacccccttccaggccaagacccagtag

SEQ ID NO: 90220 - DNA, 438 bp, Artificial Sequence
  derived and/or modified sequence
atgagcaagcagaacggcggcgagggcggcatcatcatcaacatgtcaagcctcgcggggcttatgcctgtggctcaacaacccgtctattgcgcgtccaagcatggaatcgtcggattcacccgatctgcagcgctcgccgccaacctcatgaactctggcgtgaggttgaacgccatctgcccgggatttgtaaacaccgcgatcctggaatcgattgagaaagaagaaaacatgggccagtacatcgaatacaaggatcatattaaggacatgatcaagtattacggaatactagatccacctttaatagcgaatggcctgattaccctgattgaagatgatgccctcaatggggccatcatgaaaatcactacttctaagggcattcactttcaagattacgataccacaccgtttcaggctaagacgcagtag

SEQ ID NO: 90221 - DNA, 438 bp, Artificial Sequence
  derived and/or modified sequence
atgagcaagcagaacggcggcgagggcggcatcatcatcaacatgtcttctttggcaggtttaatgccggtggctcagcagccagtctattgtgccagcaagcatggcattgtgggctttacacggagtgcagcactcgctgccaacctcatgaattccggagttcggctgaatgccatatgtccaggattcgtgaacaccgctatcctggaatccattgagaaggaggagaatatgggacagtacatcgagtacaaggatcacatcaaggacatgattaagtattatgggatcctggatccaccgttgatcgcgaacggcctgattacacttatcgaggacgatgctcttaatggagctatcatgaagattacaacaagcaaggggattcacttccaagactatgacacgacaccgtttcaggccaagacccagtag

SEQ ID NO: 90222 - DNA, 438 bp, Artificial Sequence
  derived and/or modified sequence
atgagtaagcagaatggcggtgagggcggaatcataattaatatgtcctccttggccggactgatgcccgtcgctcaacaaccagtgtactgtgcctctaagcatggcatcgtcgggtttaccagaagcgcggcacttgccgcaaacctaatgaatagcggagtgcgcctgaacgcgatctgtcctggctttgtaaatacagcgatcctcgagtctatcgagaaggaagaaaacatgggtcagtatatcgagtacaaagaccacataaaggatatgattaagtactacggtatactcgatccaccgctcatcgccaatggactcatcactcttatcgaggatgatgctctgaacggcgcaattatgaagattactacaagtaaaggcatccatttccaggactacgacacaaccccatttcaggccaaaacccaatag

SEQ ID NO: 90223 - DNA, 438 bp, Artificial Sequence
  derived and/or modified sequence
atgagtaagcagaacggcggagaaggcggaattattatcaacatgtcatctctggcaggcctgatgcctgtggcccaacagcccgtatactgcgctagcaagcatgggatagtgggatttacccgttcggccgctctggcagccaacctgatgaacagcggtgtgcggctgaatgctatctgcccgggatttgtcaatacggccatactcgagtcaattgaaaaggaggaaaacatgggtcagtatatcgagtataaggatcacattaaggacatgattaaatactacggaatactggatccgccacttattgctaacggcttgatcacactgattgaagatgatgcacttaacggcgctattatgaagatcaccaccagtaagggaattcactttcaggattatgatacaactccgttccaggctaagactcagtag

SEQ ID NO: 90224 - DNA, 1638 bp, Artificial Sequence
  derived and/or modified sequence
atgatcgaggccttccgggacaacggacttaatactctagaccacacaaccgagatttctgtgagtagactggaaaccgtgatctcatccatctactaccagctaaacaagagactgcccagtactcatcagatttccgtggaacagtctataagtctgttgctcaattttatgatcgccgcttatgactccgagggcagggggaagttgacagtcttttctgtcaaagccatgttggccactatgtgtgggggcaagatgctggacaagctacgatatgtgttttctcagatgagcgatagtaacggcctaatgattttttcaaagtttgaccagttcctcaaggaagtcctgaaacttcccacagccgtgttcgagggccctagcttcggctacaccgaacattcagtacggacttgcttcccacaacaaagaaagatcatgttgaatatgttcttggacactatgatggctgacccaccccctcaatgcctggtctggctcccactgatgcacagactggctcacgtagaaaacgtcttccaccccgtggagtgcagctattgcagatgcgagtcaatgatgggcttccgatatagatgccagcagtgccataactatcagctgtgtcagaactgtttctggcggggccacgccggcggacctcactccaatcagcatcagatgaaggagcattcttcctggaaaagccccgccaagaaattgagccacgcaatcagcaaaagcctgggctgcgtgccaacgagagagcctccacatcctgtatttccagagcagccagaaaagcctctggacctggcccacattgtgccaccgcgccccctgacaaatatgaatgacacaatggtgagccatatgagcagtggagtgcctactccaaccaaacgcttgcagtactcgcaggacatcccctcccacctcgcggacgagcatgccctcatagcatcctacgtagccagattgcagcattgtgcccgcgtgctggactctccatcccgcctggacgaagagcataggctgattgcacgatatgcagcccggcttgccgccgaagctgggaacgttaccagaccgccaacagatttgagctttaactttgatgcaaacaaacagcaacgtcagttaatcgccgagctggagaacaaaaaccgtgaaatacttcaggaaatacagaggctcaggctggaacacgaacaggctagccagcccaccccagaaaaagctcagcagaatcctaccctgcttgcagaactgcggttattacggcagcggaaggatgaactcgaacaacggatgtcagccctgcaggagagtcggagggaactgatggttcaactcgaagaactcatgaagctcttaaaagcccaggctactgggtctccccacacatcacccactcatgggggcgggcggcctatgcccatgcctgtgcggtcgacaagcgccggatcgaccccaacccactgcccacaggactccctcagcggagtgggtggggatgtccaagaggccttcgcacagggcacacgaagaaacttacgaaatgacctgctggttgcagccgattccattaccaatacaatgtcttctttggtcaaggagctgcatagtggatag

SEQ ID NO: 90225 - DNA, 1638 bp, Artificial Sequence
  derived and/or modified sequence
atgattgaggccttccgggacaatggcctgaacaccctggaccacaccacagagatctctgtgtcccggctggagaccgtcatcagcagcatctactaccagctgaacaagaggctgcccagcacccaccagatctctgtggagcagagcatcagcctgctgctgaacttcatgattgctgcctatgacagcgagggccggggcaagctgactgtgttttctgtgaaggccatgctggccaccatgtgtggcggcaagatgctggacaagctgcgctacgtgttcagccagatgtctgacagcaatggcctgatgatcttcagcaagtttgaccagttcctgaaggaggtgctgaagctgcccacagctgtgtttgagggccccagctttggctacacagagcacagcgtgaggacctgcttcccccagcagaggaagatcatgctgaacatgttcctggacaccatgatggctgaccccccaccccagtgcctggtgtggctgcccctgatgcaccggctggcccacgtggagaatgtgttccaccctgtggagtgcagctactgccgctgtgagagcatgatgggcttccgctaccgctgccagcagtgccacaactaccagctgtgccagaactgcttctggaggggccatgctgggggcccccacagcaaccagcaccagatgaaggagcacagctcctggaagagccctgccaagaagctgagccacgccatcagcaagagcctgggctgtgtgcccacccgggagcccccccaccctgtgtttcctgagcagcctgagaagcccctggacctggcccacatcgtgcccccccggcccctgaccaacatgaatgacaccatggtgagccacatgagcagtggagtgcccacccccaccaagaggctgcagtacagccaggacatccccagccacctggctgatgagcacgccctgattgccagctatgtggcccggctgcagcactgtgcccgggtgctggacagccccagccggctggatgaggagcacaggctcatcgcccgctatgctgcccggctggccgctgaggccggaaatgtgaccaggcctcccacagacctgtccttcaactttgatgccaacaagcagcagaggcagctgattgctgagctggagaacaagaaccgggagatcctgcaggagatccagaggctgcggctggagcacgagcaggccagccagcccaccccagagaaggcccagcagaaccccaccctgctggccgagctgcggctgctgcggcagaggaaggatgagctggagcagaggatgtctgccctgcaggagagccggcgggagctgatggtgcagctggaggagctgatgaagctgctgaaggcccaggccaccggcagcccccacaccagccccacccacggcggcggccggcccatgcccatgcctgtgcgcagcaccagcgctggcagcacccccacccactgcccccaggacagcctgagcggcgtgggcggagatgtgcaggaggcctttgcccagggcaccaggaggaacctgagaaatgacctgctggtggccgctgacagcatcaccaacaccatgagcagcctggtgaaggagctgcacagcggctag

SEQ ID NO: 90226 - DNA, 1638 bp, Artificial Sequence
  derived and/or modified sequence
atgatcgaggccttccgggacaacggcctgaacaccctggaccacacgaccgagatcagcgttagccggttggagactgtgattagttcgatttactaccaactgaataagaggctccctagtactcatcagatctcagtggagcagagtatctctctgctgctgaattttatgatcgcagcctacgacagcgaaggccggggaaaactgacagtcttcagcgtaaaggccatgctcgctacaatgtgtggcggcaagatgctcgataaactgcgttatgtgttttcacaaatgtccgactctaacggtctgatgattttctcaaagttcgaccaattcttaaaagaggtcctcaagctcccaactgctgtgtttgaaggtcccagtttcgggtacaccgagcattcagtccgtacctgttttccccagcagagaaaaattatgctcaatatgtttttggacacaatgatggccgatcctcctcctcagtgcctggtctggctgcccctcatgcaccggctggcccacgtagaaaacgttttccacccagtggagtgttcatactgccgatgtgaaagcatgatgggctttagatataggtgccagcagtgccacaactatcaactctgtcagaactgtttctggcgtggtcacgcggggggcccccacagcaatcagcaccaaatgaaggaacactccagctggaagtcccccgccaagaagctttctcatgctatttctaaaagtctcgggtgcgtccctaccagagagcccccacacccggtgtttccggagcagccagagaaaccgcttgacttggcgcacattgtcccacctcgccctctcaccaacatgaacgatacgatggtttcacacatgtccagcggcgttcctacgccgactaaacgactacagtactctcaggatatcccttcacatttggctgatgaacacgcgttgattgctagctacgtggctcggctccaacactgcgctcgtgtcctagacagtccatctaggctggacgaggaacaccggttgatcgcccgttacgctgcccgcctggctgctgaggctggaaatgtgactcgtcctcccaccgatctgagtttcaacttcgacgccaacaagcaacagagacaactgatagcagaactcgagaataagaatagggaaatcctccaggaaatacaacgtctccgcctggagcacgaacaggcatctcagcccaccccagaaaaagctcagcagaatcctactctgctggcagagttgcgtttgctgcgacaaaggaaagacgaactggaacaacgcatgtctgctctgcaggagtcccggcgggagttaatggtccagctggaagaactaatgaaattacttaaggcccaggctacaggatcaccacatacctctcccacccacgggggcggcagacctatgcccatgccagtgcgaagtacttctgcgggctcaaccccaactcactgccctcaggacagcctgtcaggcgttggcggggacgtccaagaagcttttgcacagggcactaggcggaatttacgcaacgatttgctcgtcgcagctgattccatcacaaatactatgtcaagccttgttaaggagctgcattctgggtag

SEQ ID NO: 90227 - DNA, 1638 bp, Artificial Sequence
  derived and/or modified sequence
atgattgaagcttttagagataatgggctaaatacgctcgaccacactaccgagatttctgttagtcggcttgaaacagtgatcagctccatctactatcagctgaacaaaaggctcccgagcacacatcagatctccgtggaacagagcatctccttgctgctcaatttcatgatagcggcatacgacagcgaggggcgaggaaagctcacagtcttttcagttaaggcaatgctcgcaaccatgtgcggcggaaagatgcttgacaaactgcggtatgttttctcccagatgtcagacagcaacggattgatgatcttctctaagttcgatcagtttctgaaggaggtactgaaattacccacagcagtgttcgaaggacccagcttcggttatacagagcacagtgtcagaacctgcttcccccagcagaggaaaatcatgctcaatatgtttttagacactatgatggccgaccctcccccacagtgcttggtctggcttcccctcatgcaccggctggcccacgtagaaaacgtcttccaccccgtggagtgttcctactgtagatgcgagtctatgatgggattccggtatagatgtcagcagtgccacaattatcaactgtgccagaactgcttttggcggggtcatgccggtggacctcactcaaaccagcaccaaatgaaggaacattcttcttggaaaagtccagccaaaaagctttcgcacgctatctccaagagcctggggtgtgtacctacgcgagaacctcctcatcccgtgtttccagagcagcctgaaaaacccttagacctggcacatatcgtgccacctcgaccccttaccaacatgaatgatacaatggtgtcccatatgagcagcggcgttcccactccaactaagaggttgcagtactcccaagacatcccctcccacttagctgatgagcatgcattaatagcgagttacgtggccaggctgcagcactgtgcgagggtgctggattctccatctcgattggacgaggagcaccgcctgatagcacggtacgctgcccgactggccgctgaggcaggaaacgtgacgcgtcccccaaccgacctatctttcaactttgatgcaaacaaacagcagcggcagcttatcgcagagttggaaaacaagaaccgggagattctgcaggagatccaaaggctgcgccttgagcatgagcaggccagccagccgaccccagaaaaggcgcagcagaatccgacactacttgctgaactgcggttactgagacagaggaaggatgagttggagcaacggatgtctgctctgcaggagagccggagggagctgatggtacagttagaagaactgatgaagctgctgaaagctcaggccactggttccccccacactagcccaactcacggaggagggcgaccaatgcccatgccagtgcgtagcaccagcgctggctccacacccacacattgcccacaggactccctcagtggagtgggcggagatgtccaagaggcattcgcccagggcactcggaggaaccttaggaacgacctgctcgtggctgccgattccattaccaatacaatgagcagcttggttaaagagctgcactccggctag

SEQ ID NO: 90228 - DNA, 1638 bp, Artificial Sequence
  derived and/or modified sequence
atgatcgaggccttcagagacaacggcctgaacaccctggaccacaccaccgagatcagcgtgagcagactggagaccgtgatcagcagcatctactaccagctgaacaagagactgcccagcacccaccagatcagcgtggagcagagcatcagcctgctgctgaacttcatgatcgccgcctacgacagcgagggcagaggcaagctgaccgtgttcagcgtgaaggccatgctggccaccatgtgcggcggcaagatgctggacaagctgagatacgtgttcagccagatgagcgacagcaacggcctgatgatcttcagcaagttcgaccagttcctgaaggaggtgctgaagctgcccaccgccgtgttcgagggccccagcttcggctacaccgagcacagcgtgagaacctgcttcccccagcagagaaagatcatgctgaacatgttcctggacaccatgatggccgacccccccccccagtgcctggtgtggctgcccctgatgcacagactggcccacgtggagaacgtgttccaccccgtggagtgcagctactgcagatgcgagagcatgatgggcttcagatacagatgccagcagtgccacaactaccagctgtgccagaactgcttctggagaggccacgccggcggcccccacagcaaccagcaccagatgaaggagcacagcagctggaagagccccgccaagaagctgagccacgccatcagcaagagcctgggctgcgtgcccaccagagagcccccccaccccgtgttccccgagcagcccgagaagcccctggacctggcccacatcgtgccccccagacccctgaccaacatgaacgacaccatggtgagccacatgagcagcggcgtgcccacccccaccaagagactgcagtacagccaggacatccccagccacctggccgacgagcacgccctgatcgccagctacgtggccagactgcagcactgcgccagagtgctggacagccccagcagactggacgaggagcacagactgatcgccagatacgccgccagactggccgccgaggccggcaacgtgaccagaccccccaccgacctgagcttcaacttcgacgccaacaagcagcagagacagctgatcgccgagctggagaacaagaacagagagatcctgcaggagatccagagactgagactggagcacgagcaggccagccagcccacccccgagaaggcccagcagaaccccaccctgctggccgagctgagactgctgagacagagaaaggacgagctggagcagagaatgagcgccctgcaggagagcagaagagagctgatggtgcagctggaggagctgatgaagctgctgaaggcccaggccaccggcagcccccacaccagccccacccacggcggcggcagacccatgcccatgcccgtgagaagcaccagcgccggcagcacccccacccactgcccccaggacagcctgagcggcgtgggcggcgacgtgcaggaggccttcgcccagggcaccagaagaaacctgagaaacgacctgctggtggccgccgacagcatcaccaacaccatgagcagcctggtgaaggagctgcacagcggctag

SEQ ID NO: 90229 - DNA, 2160 bp, Artificial Sequence
  derived and/or modified sequence
agcggcgcgagccgggcgctgcgaacgttcgccgcgggggtggctccggggcctgagtaggcgctgccgctgcctcagccgagggggctgggccggagcgtgcggaggagtgaggccgcaggagaccttcccgacgacccctgctccggcggggaagtgagcaaggatgattgaggaaagtgggaacaagcggaagaccatggcagagaagaggcagctgttcatagaaatgcgtgctcagaattttgatgtcatacgactatcaacttacagaacagcctgcaaattacgatttgtacaaaaacgatgcaaccttcatcttgttgatatctggaacatgattgaagccttccgagacaatggccttaatacactggaccataccaccgagatcagtgtgtcccgcctcgaaactgtcatctcctccatctactatcagttgaacaagcgccttccttctactcaccaaattagtgtggaacaatctatcagcctcctcctcaactttatgattgctgcatatgacagtgagggccgaggcaagttgacggtattttcagttaaagctatgttagcaaccatgtgtggtggaaaaatgctggacaaattgagatagaaagataatgctaaatatgtttttagacacaatgatggctgaccctcctccccagtgccttgtctggctacctctcatgcacaggcttgcccatgttgagaatgtcttccatcccgtggagtgctcctactgccgatgtgagagtatgatgggtttccggtaccgatgccagcagtgccacaactatcagctctgccagaattgcttttggcgtggccatgccggcggccctcacagcaaccagcaccagatgaaggagcattcctcttggaaatctcctgcaaagaagctgagccatgcaattagtaaatctttggggtgtgtacccacgagagaacccccgcatcctgtttttcctgagcaaccagagaaaccacttgaccttgcacatatagttcctcctcgccctctgactaatatgaatgacaccatggttagccacatgtcctctggagtgcccactcccaccaagaggttacagtatagccaggatatacccagtcacttggccgatgagcatgcgctgatagcctcctatgtggcccgtctgcagcactgtgcacgtgttctggacagtcctagccgactggatgaggaacaccgtcttatagctcgctatgctgcccggctggctgcagaagcaggaaacgtgactcgtcctcccactgacttgagctttaactttgatgccaacaaacaacaaagacagcttattgcagaactggaaaacaaaaacagagagatcctgcaggagattcagcgtctccgcctggaacacgagcaggcctcccagcccacccctgagaaggcacagcagaaccccacgctgctggcagagctgcggctgctgaggcaaaggaaggatgaactggagcagaggatgtcggccctgcaggagagcaggcgggagctgatggtccagctggaagagctgatgaagttgctgaaggctcaggccacagggtcaccacatacatcgcccacccatggaggcggccggccaatgcccatgccagtgcgctccacgtctgccggctccacccccacccactgtccgcaggactcgctgagcggagtcgggggagacgtgcaggaggccttcgcacaaggtacgaggagaaacctccgcaatgacctgctggtggcagctgactccatcaccaacaccatgtcatccctggtgaaggagctccattcaggttagcagaggagccggacacagaggaagctcaggcacagaggacgaggagcaagctggcgccgacatggcgaaggcaaggtcttcccccagaggcacattcctctccatctttccaccgcacacctggaccaggcttgcaggctgccagacgtcactccacccgccagggagaggggagccagagccggtgggaagcggggaggggctgcgtggcacagctagtgggcctccccctgcacagccctgcatgtactagcaccttcatcactcccctcagggcatggtctcatctccgcatcaggaattcacctggaggttgaaaagagaaaagaaaaagcaccaa

SEQ ID NO: 90230 - protein, 598 aa, Artificial Sequence
  derived and/or modified sequence
MMRLRGSGMLRDLLLRSPAGVSATLRRAQPLVTLCRRPRGGGRPAAGPAAAARLHPWWGGGGWPAEPLARGLSSSPSEILQELGKGSTHPQPGVSPPAAPAAPGPKDGPGETDAFGNSEGKELVASGENKIKQGLLPSLEDLLFYTIAEGQEKIPVHKFITALKSTGLRTSDPRLKECMDMLRLTLQTTSDGVMLDKDLFKKCVQSNIVLLTQAFRRKFVIPDFMSFTSHIDELYESAKKQSGGKVADYIPQLAKFSPDLWGVSVCTVDGQRHSTGDTKVPFCLQSCVKPLKYAIAVNDLGTEYVHRYVGKEPSGLRFNKLFLNEDDKPHNPMVNAGAIVVTSLIKQGVNNAEKFDYVMQFLNKMAGNEYVGFSNATFQSERESGDRNFAIGYYLKEKKCFPEGTDMVGILDFYFQLCSIEVTCESASVMAATLANGGFCPITGERVLSPEAVRNTLSLMHSCGMYDFSGQFAFHVGLPAKSGVAGGILLVVPNVMGMMCWSPPLDKMGNSVKGIHFCHDLVSLCNFHNYDNLRHFAKKLDPRREGGDQRHSFGPLDYESLQQELALKETVWKKVSPESNEDISTTVVYRMESLGEKS

SEQ ID NO: 90231 - DNA, 1797 bp, Artificial Sequence
  derived and/or modified sequence
atgatgaggctacgaggaagcggtatgcttagggacctgctgctccgcagcccggctggtgttagcgccacactgcgtagggctcaacccctggttacgctttgtagaaggccgcggggcggcggacggccagcagccggccctgccgccgcagcgcggttgcatccctggtggggaggcggcggctggcctgccgagccacttgccagaggcctctcaagttccccttctgagatcctgcaggagcttggcaagggatctacccatcctcaaccgggagtttctccgcccgccgcccctgccgccccaggacccaaagatggaccgggtgagactgacgcttttggcaacagtgaaggcaaagagctggtggcaagtggcgaaaataaaatcaaacaggggctactgccgtctttagaggatctgctgttttacaccatcgctgagggacaggaaaagatccccgttcacaaattcatcacggccctgaaaagtacaggtctccgcacttctgatccaaggttaaaggagtgtatggatatgctgcggctaacactacagactactagtgatggggtgatgctggacaaagatttgttcaaaaagtgcgtacagtctaacattgtgttactgacccaggcctttcgccgaaagtttgtgatccccgacttcatgtcatttaccagccacatagacgagctgtacgaatctgccaagaaacagagtggcggcaaggtcgcagattatattccacagctggccaagtttagcccagacctgtggggagtaagtgtatgcactgtcgacggccaacggcattcaactggcgacacaaaggtacccttttgtctgcagtcttgcgtcaaacctcttaagtacgccattgccgtgaacgacctggggacagaatatgttcaccggtacgtgggaaaagaaccatcaggtctgaggtttaataagctctttttgaacgaagacgataaaccacacaaccctatggttaatgccggggcaattgtggtcacttctttgataaaacaaggggtgaacaacgccgaaaagttcgattatgtgatgcagttcctcaacaagatggctggtaacgaatacgttggctttagtaatgcaaccttccagagcgagagagagtcgggcgatcggaacttcgccatcggttactacttgaaggaaaaaaagtgttttcctgagggaaccgacatggtcggaatcctagatttttattttcagctctgttctatcgaggtaacttgcgaaagcgcaagtgttatggccgcgacactcgctaacggaggattctgtcctatcaccggcgaaagagtcctgtctcccgaagccgttcgcaacaccctatccttgatgcactcatgcggtatgtatgatttttcgggacagttcgctttccacgtcggactgccagctaagagcggagttgccggggggatcctgctggtcgtgcccaatgtgatgggcatgatgtgttggtcacctcctctcgacaagatgggcaactcggtgaaggggatccatttttgtcatgatttggtgtctctgtgcaattttcacaactacgacaatttgagacacttcgccaagaagctggatccccggcgggaagggggcgatcaaaggcactcattcggtcccttggattacgaatccttgcagcaggagcttgctttgaaagagacagtatggaagaaagtgtcccctgagagcaacgaggacatctccaccacagtagtttaccgtatggaatccctgggggagaaatcttag

SEQ ID NO: 90232 - DNA, 4475 bp, Artificial Sequence
  derived and/or modified sequence
aggcggagcgaagagaaccggtcgcggcaatcctagcgcgcagcagcagcagcagcagcagcagcagcagcagcagcagcagcagcacccgcatccgctgcgggagtccgagccggaaccacacccaagtagctgccctttcctcttctgtcatctcaccgccccaccacagaccgcgttccccgaggaaaccggccgcccacgcccggagcatcctcccctgttgagcgggcgctgacggacccggcggcatgatgcggctgcgaggctcggggatgctgcgggacctgctcctgcggtcgcccgccggcgtgagcgcgactctgcggcgggcacagcccttggtcaccctgtgccggcgtccccgaggcgggggacggccggccgcgggcccggctgccgccgcgcgactccacccgtggtggggcgggggcggctggccggcggagcccctcgcgcggggcctgtccagctctccttcggagatcttgcaggagctgggcaaggggagcacgcatccgcagcccggggtgtcgccacccgctgccccggcggcgcccggccccaaggacggccccggggagacggacgcgtttggcaacagcgagggcaaagagctggtggcctcaggtgaaaataaaataaaacagggtctgttacctagcttggaagatttgctgttctatacaattgctgaaggacaagagaaaatacctgttcataaatttattacagcactcaaatctacaggattgcgaacgtctgatcccaggttgaaagagtgtatggatatgttaagattaactcttcaaacaacatcagatggtgtcatgctagacaaagatctttttaaaaaatgtgttcagagcaacattgttttgttgacacaagcatttagaagaaagtttgtgattcctgactttatgtcttttacctcacacattgatgagttatatgaaagtgctaaaaagcagtctggaggaaaggttgcagattatattcctcaactggccaaattcagtcccgatttgtggggtgtgtctgtttgtacagtagatggacagaggcattctactggagataccaaagttcccttctgtcttcagtcctgtgtaaaacctttgaaatatgccattgctgttaatgatcttggaactgaatatgtgcatcgatatgttggaaaagagccgagtggactaagattcaacaaactatttttgaatgaagatgataaaccacataatcctatggtaaatgctggagcaattgttgtgacttcactaataaagcaaggagtaaataatgctgaaaaatttgactatgtcatgcagtttttgaataagatggctggtaatgaatatgttggattcagtaatgcaacgtttcagtctgaaagagaaagtggagatcgaaattttgcaataggatattacttaaaagaaaagaagtgttttccagaaggcacagacatggttggtatattagacttctacttccagctgtgctccattgaagtgacttgtgaatcagccagtgtgatggctgcgacactggctaatggtggtttctgcccaattactggtgaaagagtactgagccctgaagcagttcgaaatacattgagtttgatgcattcctgtggcatgtatgacttctcagggcagtttgctttccatgttggtcttcctgcaaaatctggagttgctgggggcattcttttagttgtccccaatgttatgggtatgatgtgctggtctcctcctctggataagatgggcaacagtgttaagggaattcacttttgtcacgatcttgtttctctgtgtaatttccataactatgataatttgagacactttgcaaaaaaacttgatcctcgaagagaaggtggtgatcaaaggcattcctttggaccattggactatgaaagtctccaacaagaacttgctttaaaagagacagtatggaaaaaagtgtcacctgagtcaaatgaggacatctctacaactgtagtatatagaatggaaagtctgggagagaaaagctaaagaaatgggttctagtttcagaatgtttcttcatttaatctttcaaacatctttagcttttttttgcaagttataaatatttatttgaggtattttttgttctcaatcttgggtgctggagccataaagcttttttttccttttaatctttgtataaaggcagtagattaagaagtgcatttgttggtctttaaaaagtatttacaagtacataaatttgctttatttttaaaaatacaaaaaggaaaaatttaaattttttttgatgtaattaaaatgttaactatgtggtcagataatcccattttacaatagtaacagaaaattgtaattcttagttctaaaattcacaaattaaactcataagttttgttgcattttgttttttcttttccatttttaaaactaatgtgatgtctttagtggcaatagaaggtacttctatgctaaatacaaaactaaaaaggcaaaataatgaaccccaaattattttatttaaaatagcagtggattataaaattagcttgtgtttacatttatgccatttttggtgatagattggctttacattttaaaaaatttatttaaaaatttatcaaatgctttaaaatatgactcctactttttttattttgcaactcctctgttctgtcagagttgttatatacaggagtgtcttatgttactaaaacattccagccaaagaatttcagatgtgagataatgatgtttcatcaataaaaagctataatggttagttactcagaaggagaaacagtgagtgtcttcaagtgaattgttcacctaaacaattttattttcatattatccacataactttttctatgttatatttaaatatgaatggcaaattttggtttttagcttttacattttattatcttaattttataaatgctaatatttcttttgtgataagttatagcatctcataaagtttgttctatttgaagttttttagagtacttgagaaatgaatttagtctgcaggtagtaagtatgctactaaaatacgttagatctaaatccttttatttggtataaaaatgcaatattgagaatcaaaacttgtttttaagagaactatagattctacacaacctgatttcaagtaattattcatagtatttatagttgtcttggcaaagtgattgtaaaattctgtaggacctattcacacttcttccttcttccatatacttctctggttttccccatagttcccctataatttcaagtttgttgaaacctgttaattttagtgggggattagaagaaaaacttggtggtttcttagcatgatggtgtatgtatgtggtaatggaaagtctgtaaaagtaaatatagtgtagcaaaaaagatttcactgagtattttagatactagtgcaaataaagatagaaaatcttgatcataatgtcttaagtttgggaactgtgatattaagaaaagaaattcccttctagaggtgctggccaaaaagccttttgggctaacttaagtattaaatttatatatttaaataattatattttaagttgtagaggattttcccaaggattttatgcttacttgaatgttctttgaatgttcagatgcatatcctaactggatgcttctcaaggccttactgcatatttgtgttgcatatttatgttagttgcaccagggccatttgtagtttgggcaaccgaatgccttaattggaaaaaaggcattgtggtttcccctatgatctaaattgttacattttaccatttcattccgaagttggttttactttattaaatgaagatttagttttcatatcgtatacatagctgtatagatttcaaaattaggttgttaatttgtgtcacttactatttttgtgttggtaatgctttaaatgcatacttaaaaatgaagtactgttatctaagctactgtgtttagaaaatgttaagaatgagcagaaatttttatagaaaagtataaacggaagaagagataagatactgcgaataggccctcaaacttaaaaaagaaaaaactttgccagttttaaggacatattttgattctttcagtattcttaacacctttttaaacaaagttcttgatagtacccactattattgggtttgttttatgccattattgattcttgatattcaagcatttacaatgtagcatatttgattttcttttttctttctttttttggcatcattaacatttcatttgaaatgcatattgttcttgaagtactttgtttttagcataaatgttgtgcattttatcttagtgtttggatgaaaacatttgtgttgtttagctttcatttgctttgtatatttaataatgtacctttattttccagtatgcctacattttgtattgcacaataaatttattttaagctga

SEQ ID NO: 90233 - DNA, 1797 bp, Artificial Sequence
  derived and/or modified sequence
atgatgaggctgcggggcagcggcatgctgcgggacctgctgctgcggagccctgctggggtgtctgccaccctgcggcgggcccagcccctggtgaccctgtgccggcggccccggggcggcggccggcctgctgctggccctgctgctgctgcccggctgcacccctggtggggcggcggcggctggccagctgagcccctggcccggggcctgagcagcagccccagcgagatcctgcaggagctgggcaagggcagcacccacccccagcccggggtgagccccccagctgccccagctgcccctggccccaaggatggccctggagaaacagatgcctttggaaacagcgagggcaaggagctggtggccagcggggagaacaagatcaagcagggcctgctgcccagcctggaggacctgctcttctacaccatcgccgagggccaggagaagatccctgtgcacaagttcatcacagccctgaagagcacaggcctgcggaccagtgacccccggctgaaggagtgcatggacatgctgcggctgaccctgcagaccaccagtgatggagtgatgctggacaaggacctcttcaagaagtgtgtgcagagcaacatcgtgctgctgacccaggccttccggaggaagtttgtgatcccagacttcatgtccttcaccagccacattgatgagctgtatgaaagtgccaagaagcagagcggcggcaaggtggccgactacatcccccagctggccaagttctccccagacctgtggggcgtgtctgtgtgcaccgtggatggccagaggcacagcactggagacaccaaggtgcccttctgcctgcagagctgtgtgaagcccctgaagtatgccatcgctgtgaatgacctgggcacagaatatgtgcaccgctacgtgggcaaggagcccagcggcctgcgcttcaacaagctgttcctgaatgaagatgacaagccccacaaccccatggtgaatgctggggccatcgtggtgaccagcctcatcaagcagggcgtgaacaatgctgagaagtttgattatgtgatgcagttcctgaacaagatggctggaaatgaatatgtgggcttcagcaatgccaccttccagagcgagcgggagagcggggacaggaactttgccatcggctactacctgaaggagaagaagtgcttccctgagggcacagacatggtgggcatcctggacttctacttccagctgtgcagcattgaggtgacctgtgagagcgcctctgtgatggccgccaccctggccaacggcggcttctgccccatcactggagagcgggtgctgagccctgaggccgtgaggaacaccctgagcctgatgcacagctgtggcatgtatgacttcagcggccagtttgccttccacgtgggcctgcctgccaagagcggcgtggccggcggcatcctgctggtggtgcccaacgtgatgggcatgatgtgctggagcccccccctggacaagatgggcaacagcgtgaagggcatccacttctgccacgacctggtgtccctgtgcaacttccacaactatgacaacctgcggcactttgccaagaagctggacccccggcgggagggcggggaccagaggcacagctttggccccctggactatgagagcctgcagcaggagctggccctgaaggagaccgtgtggaagaaggtgtccccagagagcaatgaagacatcagcaccaccgtggtgtacaggatggagagcctgggggagaagagctag

SEQ ID NO: 90234 - DNA, 1797 bp, Artificial Sequence
  derived and/or modified sequence
atgatgcggctgcggggcagcggcatgctgcgggacctgctgctgcgctccccagcaggagtatctgccaccctcaggagagctcagccgctagtcactctctgcagaaggcccaggggagggggaaggccggctgcgggtcctgctgctgctgccagactgcacccctggtggggaggtgggggatggccggccgaacccttagccaggggactgagtagctcaccctcagagattctccaagagctgggcaagggatcaacgcacccacaacctggagtctctcctcccgccgcccctgccgctcccggtcccaaggacgggccgggcgaaaccgatgccttcggcaactccgaaggtaaagaattggtagcctcaggtgagaataagattaagcagggattactgcccagcttggaggacttgctattctacacaatcgcagaagggcaggagaaaatcccggtccataagtttatcactgctctcaagagtactggactgcggaccagtgaccctcgacttaaggagtgcatggacatgctgaggttgactctgcaaaccacttccgacggagtaatgctggacaaagacctgttcaagaaatgcgtacagagcaatatcgttcttttaacccaggctttcagacgaaagttcgtgattccagattttatgagtttcacctcccacatagatgagctgtatgagtccgccaagaaacagtcaggtggaaaagtcgcggactacattcctcaattagctaagttctcaccagatctctggggtgtcagcgtctgtacagttgacgggcagcggcatagtactggagacaccaaagtaccattctgcctgcagagctgtgtgaaaccactgaaatacgcaattgctgtgaacgacttgggcactgaatacgtacacaggtacgtggggaaagaaccctctggcctgaggtttaataaattgtttctcaatgaagacgataagcctcataacccgatggtgaacgctggagcaattgtggtgacctctcttattaagcagggcgttaacaacgcggaaaaatttgattatgttatgcagttcctgaacaagatggcaggcaacgaatacgtgggattcagtaatgccaccttccagagtgagcgagagagtggcgataggaacttcgcaatcggctattacttgaaggaaaaaaagtgcttcccggaggggacagacatggttggcattctggacttctacttccagctgtgttctatagaagtgacctgtgagtccgcatcagtgatggctgctacattggccaacggggggttctgccccatcaccggggagagagtgctgtcacccgaggccgtgagaaacacactgtctcttatgcatagttgcggtatgtacgacttcagcggacagtttgcttttcacgtcggcttgccagctaaaagcggagtagcaggaggaattcttcttgtagtcccaaatgtgatgggtatgatgtgctggtcgcctcctttagacaagatgggaaatagcgtgaaggggattcacttttgccatgatcttgtgagcctgtgtaattttcacaactacgacaatctgcgccactttgctaagaagctggaccctcggcgcgagggaggcgaccaacggcattcatttggcccacttgactatgaatcactccaacaggagcttgccttaaaagagaccgtatggaaaaaagtaagcccagagtctaacgaagacatctctaccaccgtcgtgtacagaatggaatccctgggagagaaatcttag

SEQ ID NO: 90235 - DNA, 1797 bp, Artificial Sequence
  derived and/or modified sequence
atgatgagattgcggggttccgggatgctgagggaccttctgttacggtctcccgcaggcgtttctgccacgctgcgtcgggctcagcccctcgtgacactgtgccgtcgcccaaggggcggagggagaccagcggctggcccagccgcagccgcaaggctgcatccatggtgggggggaggtgggtggccagctgaaccgttggccagagggctctcttcctctccgagcgagatccttcaggaactgggtaagggctcaacccaccctcagcccggagtcagcccaccagctgctcccgctgcaccaggacctaaggatggccctggggagacagatgcattcggcaactccgaggggaaggagttggtcgcaagtggagagaataagatcaaacagggactactcccgtctctcgaggaccttttattttacacaatcgctgagggacaagagaagatccccgtccacaaattcatcacagctctgaaaagtacgggactacggacgagcgatcccagactgaaagagtgtatggatatgctgcgcctgactctgcaaactacctcggacggggtaatgctggataaggacctgttcaagaagtgtgtgcaaagtaacattgtgctccttacgcaggcctttagacggaagttcgtgattccagatttcatgtctttcaccagccacattgatgaactctatgagtctgcaaaaaaacagagcggtgggaaggtggccgattacataccccagcttgctaagtttagccccgatctgtggggcgtctctgtttgtaccgtggacggccaacggcactccaccggggacactaaagtgcccttttgtttacagagttgtgtaaagcctttgaaatatgcgatagcagttaacgatcttggcactgaatacgtccacaggtacgtcgggaaggagccaagtggcttgcggttcaataaactgtttcttaatgaggatgataaaccccataaccccatggtgaatgctggtgccatagtcgtaaccagtttgattaagcagggcgtcaacaacgccgaaaaatttgattatgtgatgcagtttttgaataagatggctggcaatgagtatgtcggattcagcaacgcaacctttcaaagcgagcgcgagtcgggagataggaatttcgctatcgggtactatctcaaggagaagaagtgttttccagaggggaccgacatggtagggattctagatttttacttccagttatgctccatagaggtgacatgtgagagtgcttctgtgatggctgcaactctcgctaatggaggattttgcccaatcaccggagagcgagttctgtcacccgaagctgtgagaaacacactcagcctcatgcattcttgtgggatgtatgacttcagtggccagttcgctttccatgtggggctgcccgcaaagagtggggtcgccggtgggattctgctggtggtacccaatgtgatgggcatgatgtgttggagcccaccgcttgacaaaatgggcaattctgtgaaagggatccacttctgtcatgaccttgtttccttgtgcaacttccataattacgacaatctacgccattttgccaagaagctcgatcctcggagggaaggtggtgaccaaagacattccttcgggcctctagactatgagagtttgcagcaggagctggcactcaaagagaccgtttggaagaaggtgtcccctgaaagcaatgaggatattagtacgacagtggtgtatcggatggaatctctgggagagaagtcttag

SEQ ID NO: 90236 - DNA, 1797 bp, Artificial Sequence
  derived and/or modified sequence
atgatgagactgagaggcagcggcatgctgagagacctgctgctgagaagccccgccggcgtgagcgccaccctgagaagagcccagcccctggtgaccctgtgcagaagacccagaggcggcggcagacccgccgccggccccgccgccgccgccagactgcacccctggtggggcggcggcggctggcccgccgagcccctggccagaggcctgagcagcagccccagcgagatcctgcaggagctgggcaagggcagcacccacccccagcccggcgtgagcccccccgccgcccccgccgcccccggccccaaggacggccccggcgagaccgacgccttcggcaacagcgagggcaaggagctggtggccagcggcgagaacaagatcaagcagggcctgctgcccagcctggaggacctgctgttctacaccatcgccgagggccaggagaagatccccgtgcacaagttcatcaccgccctgaagagcaccggcctgagaaccagcgaccccagactgaaggagtgcatggacatgctgagactgaccctgcagaccaccagcgacggcgtgatgctggacaaggacctgttcaagaagtgcgtgcagagcaacatcgtgctgctgacccaggccttcagaagaaagttcgtgatccccgacttcatgagcttcaccagccacatcgacgagctgtacgagagcgccaagaagcagagcggcggcaaggtggccgactacatcccccagctggccaagttcagccccgacctgtggggcgtgagcgtgtgcaccgtggacggccagagacacagcaccggcgacaccaaggtgcccttctgcctgcagagctgcgtgaagcccctgaagtacgccatcgccgtgaacgacctgggcaccgagtacgtgcacagatacgtgggcaaggagcccagcggcctgagattcaacaagctgttcctgaacgaggacgacaagccccacaaccccatggtgaacgccggcgccatcgtggtgaccagcctgatcaagcagggcgtgaacaacgccgagaagttcgactacgtgatgcagttcctgaacaagatggccggcaacgagtacgtgggcttcagcaacgccaccttccagagcgagagagagagcggcgacagaaacttcgccatcggctactacctgaaggagaagaagtgcttccccgagggcaccgacatggtgggcatcctggacttctacttccagctgtgcagcatcgaggtgacctgcgagagcgccagcgtgatggccgccaccctggccaacggcggcttctgccccatcaccggcgagagagtgctgagccccgaggccgtgagaaacaccctgagcctgatgcacagctgcggcatgtacgacttcagcggccagttcgccttccacgtgggcctgcccgccaagagcggcgtggccggcggcatcctgctggtggtgcccaacgtgatgggcatgatgtgctggagcccccccctggacaagatgggcaacagcgtgaagggcatccacttctgccacgacctggtgagcctgtgcaacttccacaactacgacaacctgagacacttcgccaagaagctggaccccagaagagagggcggcgaccagagacacagcttcggccccctggactacgagagcctgcagcaggagctggccctgaaggagaccgtgtggaagaaggtgagccccgagagcaacgaggacatcagcaccaccgtggtgtacagaatggagagcctgggcgagaagagctag

SEQ ID NO: 90237 - protein, 74 aa, Artificial Sequence
  derived and/or modified sequence
MQPSEMVMNPKQVFLSVLIFGVAGLLLFMYLQVWIEEQHTGRVEKRREQKVTSGWGPVKYLRPVPRIKPQVSHA

SEQ ID NO: 90238 - DNA, 225 bp, Artificial Sequence
  derived and/or modified sequence
atgcagcccagcgagatggtgatgaaccccaagcaggtgttcctgtctgttctcattttcggtgtagccgggctactactgttcatgtatctgcaggtatggatcgaggagcaacacacgggcagagtggagaaaagaagagagcaaaaagtgacatcaggctggggacctgtgaagtaccttagaccagtgccacgaatcaagccacaggtcagccatgcttag

SEQ ID NO: 90239 - DNA, 225 bp, Artificial Sequence
  derived and/or modified sequence
atgcagccctccgagatggtcatgaaccccaagcaggtgtttctgtctgtcctaatatttggggtagccggattgctactgtttatgtaccttcaggtgtggatcgaggaacagcataccggtcgcgtggaaaaaagaagggagcaaaaggtcacctccggttggggccctgtaaagtacctcagacccgtacctagaatcaaacctcaggtcagccacgcatag

SEQ ID NO: 90240 - DNA, 225 bp, Artificial Sequence
  derived and/or modified sequence
atgcaacccagcgaaatggtcatgaatcctaaacaagtgtttctttcagtgttgatctttggagtagcaggattattgctgttcatgtacctgcaggtttggatcgaagagcagcatacaggaagggtcgagaaacgcagagagcagaaagtcacatccggttggggtcccgtgaagtatctccgccctgtcccgagaatcaagccccaggtctcccacgcctag

SEQ ID NO: 90241 - DNA, 225 bp, Artificial Sequence
  derived and/or modified sequence
atgcagcccagcgagatggtgatgaaccccaagcaggtgttcctgagcgtgctgatcttcggcgtggccggcctgctgctgttcatgtacctgcaggtgtggatcgaggagcagcacaccggcagagtggagaagagaagagagcagaaggtgaccagcggctggggccccgtgaagtacctgagacccgtgcccagaatcaagccccaggtgagccacgcctag

SEQ ID NO: 90242 - DNA, 225 bp, Artificial Sequence
  derived and/or modified sequence
atgcagccttcagagatggttatgaacccgaaacaggtttttcttagcgtcctgatcttcggtgtggcaggcctgctgctgtttatgtatttgcaggtgtggatcgaggagcaacataccggaagagtggagaaacgacgtgagcagaaggtgaccagtggttggggccccgtgaaatacctgcggcccgtcccaaggattaagccacaggtctcacacgcttag

SEQ ID NO: 90243 - DNA, 225 bp, Artificial Sequence
  derived and/or modified sequence
atgcagcccagcgagatggtgatgaaccccaagcaggtgttcctgtctgtgctgatcttcggcgtggccggcctgctgctcttcatgtacctgcaggtgtggattgaggagcagcacacaggccgggtggagaagaggcgggagcagaaggtgaccagcggctggggccctgtgaagtacctgcggcctgtgccccgcatcaagccccaggtgtcccatgcctag

SEQ ID NO: 90244 - RNA, 225 nt, Artificial Sequence
  derived and/or modified sequence
augcaacccagcgaaauggucaugaauccuaaacaaguguuucuuucaguguugaucuuuggaguagcaggauuauugcuguucauguaccugcagguuuggaucgaagagcagcauacaggaagggucgagaaacgcagagagcagaaagucacauccgguuggggucccgugaaguaucuccgcccugucccgagaaucaagccccaggucucccacgccuag

SEQ ID NO: 90245 - protein, 453 aa, Artificial Sequence
  derived and/or modified sequence
MGENDPPAVEAPFSFRSLFGLDDLKISPVAPDADAVAAQILSLLPLKFFPIIVIGIIALILALAIGLGIHFDCSGKYRCRSSFKCIELIARCDGVSDCKDGEDEYRCVRVGGQNAVLQVFTAASWKTMCSDDWKGHYANVACAQLGFPSYVSSDNLRVSSLEGQFREEFVSIDHLLPDDKVTALHHSVYVREGCASGHVVTLQCTACGHRRGYSSRIVGGNMSLLSQWPWQASLQFQGYHLCGGSVITPLWIITAAHCVYDLYLPKSWTIQVGLVSLLDNPAPSHLVEKIVYHSKYKPKRLGNDIALMKLAGPLTFNEMIQPVCLPNSEENFPDGKVCWTSGWGATEDGGDASPVLNHAAVPLISNKICNHRDVYGGIISPSMLCAGYLTGGVDSCQGDSGGPLVCQERRLWKLVGATSFGIGCAEVNKPGVYTRVTSFLDWIHEQMERDLKT

SEQ ID NO: 90246 - DNA, 1362 bp, Artificial Sequence
  derived and/or modified sequence
atgggcgagaacgacccccccgccgtggaggcccccttcagcttcagaagcctgttcggcctggacgacctgaagatcagccccgtggcccccgacgccgacgccgtggccgcccagatcctgagcctgctgcccctgaagttcttccccatcatcgtgatcggcatcatcgccctgatcctggccctggccatcggcctgggcatccacttcgactgcagcggcaagtacagatgcagaagcagcttcaagtgcatcgagctgatcgccagatgcgacggcgtgagcgactgcaaggacggcgaggacgagtacagatgcgtgagagtgggcggccagaacgccgtgctgcaggtgttcaccgccgccagctggaagaccatgtgcagcgacgactggaagggccactacgccaacgtggcctgcgcccagctgggcttccccagctacgtgagcagcgacaacctgagagtgagcagcctggagggccagttcagagaggagttcgtgagcatcgaccacctgctgcccgacgacaaggtgaccgccctgcaccacagcgtgtacgtgagagagggctgcgccagcggccacgtggtgaccctgcagtgcaccgcctgcggccacagaagaggctacagcagcagaatcgtgggcggcaacatgagcctgctgagccagtggccctggcaggccagcctgcagttccagggctaccacctgtgcggcggcagcgtgatcacccccctgtggatcatcaccgccgcccactgcgtgtacgacctgtacctgcccaagagctggaccatccaggtgggcctggtgagcctgctggacaaccccgcccccagccacctggtggagaagatcgtgtaccacagcaagtacaagcccaagagactgggcaacgacatcgccctgatgaagctggccggccccctgaccttcaacgagatgatccagcccgtgtgcctgcccaacagcgaggagaacttccccgacggcaaggtgtgctggaccagcggctggggcgccaccgaggacggcggcgacgccagccccgtgctgaaccacgccgccgtgcccctgatcagcaacaagatctgcaaccacagagacgtgtacggcggcatcatcagccccagcatgctgtgcgccggctacctgaccggcggcgtggacagctgccagggcgacagcggcggccccctggtgtgccaggagagaagactgtggaagctggtgggcgccaccagcttcggcatcggctgcgccgaggtgaacaagcccggcgtgtacaccagagtgaccagcttcctggactggatccacgagcagatggagagagacctgaagacctag

SEQ ID NO: 90247 - DNA, 1362 bp, Artificial Sequence
  derived and/or modified sequence
atgggagaaaacgatccgcctgccgtggaggctccttttagctttagatccttattcggacttgatgatctcaaaatatctcccgtggcccctgacgccgacgctgttgccgcccagatcctctcgctcctacctctgaaattcttcccaatcatcgtaatcggcatcatcgccctgatactcgctctcgccatcggcctgggcattcacttcgactgctcggggaagtatagatgcagatcatcctttaaatgcattgagctcatcgctcgctgtgatggcgtgtccgactgtaaagatggcgaagatgagtacagatgtgtgcgggtgggggggcagaatgctgttctccaagtctttaccgctgcttcctggaagacaatgtgctctgatgactggaaagggcactacgccaacgtggcgtgtgcacaactcggattcccatcatatgtgtctagcgacaacttgcgggtgtccagtttagaggggcaattcagggaggaatttgtatctattgaccacctgctgcctgatgataaagtgaccgctctgcatcactcagtgtatgtgcgcgaaggttgtgccagtggtcacgtggtgacactccaatgcaccgcctgtggccatagacgcgggtacagcagcagaattgtgggaggcaacatgtcccttctatcgcagtggccctggcaggcatcactgcagtttcagggctaccatctgtgcggcggaagcgtgatcacacccctatggattatcactgctgcccactgtgtatatgatctgtacctccccaaaagttggacaattcaggtggggttggtaagcttactggacaaccctgccccctcccacctggtggagaagatcgtgtaccattccaagtataagcccaagcgcttggggaacgacatcgccctcatgaagctggcagggccccttacatttaacgaaatgatacaaccagtatgcctgccaaatagcgaggagaattttcctgacgggaaggtgtgttggacatctggctggggggctaccgaggacgggggcgatgcgtctccagttctgaatcacgctgccgttcccctcatcagcaataagatatgcaatcaccgggacgtctatggcgggataatttctccatcaatgctgtgcgcaggataccttaccgggggagttgactcttgccaaggtgactcaggaggacccttggtgtgccaggagcgcagactgtggaaactggtgggggctacatcgttcggcattggttgtgccgaagtgaacaagcctggtgtgtacacacgggtcacaagttttcttgactggatccatgagcagatggagcgggacttaaaaacttag

SEQ ID NO: 90248 - DNA, 1362 bp, Artificial Sequence
  derived and/or modified sequence
atgggagaaaatgaccccccagctgtggaggcccccttctccttccgcagcctgtttggcctggatgacctgaagatcagccctgtggccccagatgctgatgctgtggccgcccagatcctgagcctgctgcccctgaagttcttccccatcatcgtcatcggcatcatcgccctgatcctggccctggccatcggcctgggcatccactttgactgcagcggcaagtaccgctgccgcagcagcttcaagtgcatcgagctgattgcccgctgtgatggagtgtctgactgcaaggatggagaagatgagtaccgctgtgtgcgggtgggcggccagaatgctgtgctgcaggtgttcaccgctgcctcctggaagaccatgtgcagtgatgactggaagggccactacgccaacgtggcctgtgcccagctgggcttccccagctatgtgtccagtgacaacctgcgggtgagcagcctggagggccagttccgggaggagtttgtgtccattgaccacctgctgcctgatgacaaggtgacagccctgcaccacagcgtgtatgtgcgggagggctgtgccagcggccacgtggtgaccctgcagtgcacagcctgtggccaccggcggggctacagcagcagaattgtgggcggcaacatgagcctgctgagccagtggccctggcaggccagcctgcagttccagggctaccacctgtgtggcggcagcgtcatcacccccctgtggatcatcacagctgcccactgtgtgtatgacctgtacctgcccaagtcctggaccatccaggtgggcctggtgtccctgctggacaacccagcccccagccacctggtggagaagatcgtgtaccacagcaagtacaagcccaagaggctgggcaatgacatcgccctgatgaagctggccggccccctgaccttcaatgagatgatccagcctgtgtgcctgcccaacagcgaggagaacttcccagatggcaaggtgtgctggaccagcggctggggcgccacagaagatggaggagatgccagccctgtgctgaaccacgccgctgtgcccctcatcagcaacaagatctgcaaccacagagatgtgtatggaggcatcatcagccccagcatgctgtgtgccggctacctgaccggcggcgtggacagctgccagggcgacagcggcggccccctggtgtgccaggagcggcggctgtggaagctggtgggcgccaccagctttggcatcggctgtgccgaggtgaacaagccaggagtgtacaccagggtgaccagcttcctggactggatccacgagcagatggagcgggacctgaagacctag

SEQ ID NO: 90249 - DNA, 1362 bp, Artificial Sequence
  derived and/or modified sequence
atgggcgagaacgacccccccgccgtggaggcccccttcagcttccggtcgctattcggtctagatgatctgaagatcagtcccgtggcaccagatgctgatgcagtggctgcccaaattctgagcttgctccctctgaaattctttcccatcatagtcattggcatcatcgctctaatcctcgccttggccattgggctaggcatccacttcgattgctcagggaagtatcgatgcaggtcaagttttaaatgtatcgagctgattgcccgctgcgacggggtctctgattgtaaggatggcgaagatgaatataggtgtgtcagggtcggcggccagaacgccgttcttcaggtgtttaccgccgcttcttggaaaacaatgtgttctgatgactggaaaggccactatgccaacgttgcctgtgcacagcttggcttcccctcctacgtctcatcggacaacttgagagtttcttccttggagggacagttccgagaggagtttgtgtctattgaccaccttcttccggatgataaagtgacagccctgcaccatagcgtctacgtccgagaaggatgtgctagcgggcatgttgtgaccctccagtgcactgcctgcgggcatcggaggggatattcctctaggatcgttggtggaaacatgagtctgctttcccagtggccatggcaggcttccttgcagttccagggttatcacctgtgtggtggcagcgtgatcacgcccctgtggatcattaccgccgcgcattgtgtttatgacctgtatctccccaaatcctggactatacaggtcggtctggtctccctgctggataacccagcaccatctcacctggttgaaaaaattgtctaccattccaagtacaaacccaaacgccttggaaacgacattgccctgatgaaactcgcgggacccctaactttcaatgaaatgatccagccggtctgtctcccaaattcggaggagaatttccccgatggaaaggtctgctggaccagtggatggggggctaccgaagatgggggcgatgcctccccagtcttgaatcatgctgcagtgcctctgatcagcaataagatctgcaaccaccgggatgtttatgggggcataatctcaccttcaatgctgtgcgcgggctacctgaccggcggggtggattcttgccagggcgactccgggggcccattggtgtgccaggaacggcgcctctggaaactggttggcgccacttcttttggcatcggttgcgctgaggtaaataagcccggggtgtacactcgagtcacctcctttctggactggattcatgaacagatggaacgagatctcaaaacctag

SEQ ID NO: 90250 - DNA, 1362 bp, Artificial Sequence
  derived and/or modified sequence
atgggggagaatgatcccccagccgtggaggccccttttagttttaggtccttatttggtcttgatgatctgaagatctctcctgttgcccctgatgcagacgcggttgccgctcaaattctctccctgctccccctcaaattcttccccataattgtcattggcataattgctctgattcttgccttagctatcggccttggtattcactttgattgtagcgggaagtatcgatgccgcagctcgtttaagtgcatcgaactgattgctaggtgtgacggggtctctgactgtaaggacggcgaagatgaataccgctgcgtgcgggttgggggtcaaaatgccgtgctccaggtattcacagcagccagctggaaaaccatgtgctcagatgactggaaaggccattacgcaaacgtcgcctgtgcacagcttggctttcccagttacgtatcttccgacaatctccgcgtgtcatcactcgaagggcagttccgggaagaatttgtgtccatcgaccacctgctaccagatgataaagtgactgccctgcaccacagcgtctacgtaagagagggttgcgcatcaggccacgtggtgacccttcaatgcactgcttgcgggcaccgaagggggtattcctcacgcatagtcggcggtaacatgtctctactctctcagtggccctggcaagcaagtctacagtttcagggctatcatctgtgtgggggttcagtcatcactcctctctggatcatcactgctgcccactgcgtgtatgacctgtatcttcccaaaagctggacgatccaggtcggcctggtgagtcttctggacaacccggcacctagtcatctggttgagaagatcgtctatcactctaagtacaagcctaaacgcttagggaacgacatcgcgctgatgaagcttgcgggtccgctaaccttcaacgaaatgatccagcctgtttgccttcctaactccgaggagaatttcccagatgggaaggtgtgctggacctctgggtggggtgcgacagaagacggaggggatgcctcacccgtgttgaaccatgccgcagtccctttgatctccaataagatttgcaaccatagggacgtctacgggggaatcatctcaccttcgatgctgtgtgctggttacctgactggaggggtcgactcatgccagggcgactccggcggaccactggtatgccaggagcggaggctgtggaagctggtgggagccacatcgtttggtatcgggtgtgctgaggtcaacaaaccaggcgtttatacccgggtgaccagctttcttgactggatccatgagcaaatggagcgcgacctgaaaacctag

SEQ ID NO: 90251 - DNA, 2403 bp, Artificial Sequence
  derived and/or modified sequence
cttaattaggtcatgcccgtgtgagccaggaaagggctgtgtttatgggaagccagtaacactgtggcctactatctcttccgtggtgccatctacatttttgggactcgggaattatgaggtagaggtggaggcggagccggatgtcagaggtcctgaaatagtcaccatgggggaaaatgatccgcctgctgttgaagcccccttctcattccgatcgctttttggccttgatgatttgaaaataagtcctgttgcaccagatgcagatgctgttgctgcacagatcctgtcactgctgccattgaagttttttccaatcatcgtcattgggatcattgcattgatattagcactggccattggtctgggcatccacttcgactgctcagggaagtacagatgtcgctcatcctttaagtgtatcgagctgatagctcgatgtgacggagtctcggattgcaaagacggggaggacgagtaccgctgtgtccgggtgggtggtcagaatgccgtgctccaggtgttcacagctgcttcgtggaagaccatgtgctccgatgactggaagggtcactacgcaaatgttgcctgtgcccaactgggtttcccaagctatgtgagttcagataacctcagagtgagctcgctggaggggcagttccgggaggagtttgtgtccatcgatcacctcttgccagatgacaaggtgactgcattacaccactcagtatatgtgagggagggatgtgcctctggccacgtggttaccttgcagtgcacagcctgtggtcatagaaggggctacagctcacgcatcgtgggtggaaacatgtccttgctctcgcagtggccctggcaggccagccttcagttccagggctaccacctgtgcgggggctctgtcatcacgcccctgtggatcatcactgctgcacactgtgtttatgacttgtacctccccaagtcatggaccatccaggtgggtctagtttccctgttggacaatccagccccatcccacttggtggagaagattgtctaccacagcaagtacaagccaaagaggctgggcaatgacatcgcccttatgaagctggccgggccactcacgttcaatgaaatgatccagcctgtgtgcctgcccaactctgaagagaacttccccgatggaaaagtgtgctggacgtcaggatggggggccacagaggatggaggtgacgcctcccctgtcctgaaccacgcggccgtccctttgatttccaacaagatctgcaaccacagggacgtgtacggtggcatcatctccccctccatgctctgcgcgggctacctgacgggtggcgtggacagctgccagggggacagcggggggcccctggtgtgtcaagagaggaggctgtggaagttagtgggagcgaccagctttggcatcggctgcgcagaggtgaacaagcctggggtgtacacccgtgtcacctccttcctggactggatccacgagcagatggagagagacctaaaaacctgaagaggaaggggacaagtagccacctgagttcctgaggtgatgaagacagcccgatcctcccctggactcccgtgtaggaacctgcacacgagcagacacccttggagctctgagttccggcaccagtagcaggcccgaaagaggcacccttccatctgattccagcacaaccttcaagctgctttttgttttttgtttttttgagatggagtctcgctctgttgcccaggctggagtgcagtggcgaaatccctgctcactgcagcctccgcttccctggttcaagcgattctcttgcctcagcttccccagtagctgggaccacaggtgcccgccaccacacccaactaatttttgtatttttagtagagacagggtttcaccatgttggccaggctgctctcaaacccctgacctcaaatgatgtgcctgcttcagcctcccacagtgctgggattacaggcatgggccaccacgcctagcctcacgctcctttctgatcttcactaagaacaaaagaagcagcaacttgcaagggcggcctttcccactggtccatctggttttctctccaggggtcttgcaaaattcctgacgagataagcagttatgtgacctcacgtgcaaagccaccaacagccactcagaaaagacgcaccagcccagaagtgcagaactgcagtcactgcacgttttcatctctagggaccagaaccaaacccaccctttctacttccaagacttattttcacatgtggggaggttaatctaggaatgactcgtttaaggcctattttcatgatttctttgtagcatttggtgcttgacgtattattgtcctttgattccaaataatatgtttccttccctca

SEQ ID NO: 90252 - protein, 2314 aa, Artificial Sequence
  derived and/or modified sequence
MDEEEDGAGAEESGQPRSFMRLNDLSGAGGRPGPGSAEKDPGSADSEAEGLPYPALAPVVFFYLSQDSRPRSWCLRTVCNPWFERISMLVILLNCVTLGMFRPCEDIACDSQRCRILQAFDDFIFAFFAVEMVVKMVALGIFGKKCYLGDTWNRLDFFIVIAGMLEYSLDLQNVSFSAVRTVRVLRPLRAINRVPSMRILVTLLLDTLPMLGNVLLLCFFVFFIFGIVGVQLWAGLLRNRCFLPENFSLPLSVDLERYYQTENEDESPFICSQPRENGMRSCRSVPTLRGDGGGGPPCGLDYEAYNSSSNTTCVNWNQYYTNCSAGEHNPFKGAINFDNIGYAWIAIFQVITLEGWVDIMYFVMDAHSFYNFIYFILLIIVGSFFMINLCLVVIATQFSETKQRESQLMREQRVRFLSNASTLASFSEPGSCYEELLKYLVYILRKAARRLAQVSRAAGVRVGLLSSPAPLGGQETQPSSSCSRSHRRLSVHHLVHHHHHHHHHYHLGNGTLRAPRASPEIQDRDANGSRRLMLPPPSTPALSGAPPGGAESVHSFYHADCHLEPVRCQAPPPRSPSEASGRTVGSGKVYPTVHTSPPPETLKEKALVEVAASSGPPTLTSLNIPPGPYSSMHKLLETQSTGACQSSCKISSPCLKADSGACGPDSCPYCARAGAGEVELADREMPDSDSEAVYEFTQDAQHSDLRDPHSRRQRSLGPDAEPSSVLAFWRLICDTFRKIVDSKYFGRGIMIAILVNTLSMGIEYHEQPEELTNALEISNIVFTSLFALEMLLKLLVYGPFGYIKNPYNIFDGVIVVISVWEIVGQQGGGLSVLRTFRLMRVLKLVRFLPALQRQLVVLMKTMDNVATFCMLLMLFIFIFSILGMHLFGCKFASERDGDTLPDRKNFDSLLWAIVTVFQILTQEDWNKVLYNGMASTSSWAALYFIALMTFGNYVLFNLLVAILVEGFQAEEISKREDASGQLSCIQLPVDSQGGDANKSESEPDFFSPSLDGDGDRKKCLALVSLGEHPELRKSLLPPLIIHTAATPMSLPKSTSTGLGEALGPASRRTSSSGSAEPGAAHEMKSPPSARSSPHSPWSAASSWTSRRSSRNSLGRAPSLKRRSPSGERRSLLSGEGQESQDEEESSEEERASPAGSDHRHRGSLEREAKSSFDLPDTLQVPGLHRTASGRGSASEHQDCNGKSASGRLARALRPDDPPLDGDDADDEGNLSKGERVRAWIRARLPACCLERDSWSAYIFPPQSRFRLLCHRIITHKMFDHVVLVIIFLNCITIAMERPKIDPHSAERIFLTLSNYIFTAVFLAEMTVKVVALGWCFGEQAYLRSSWNVLDGLLVLISVIDILVSMVSDSGTKILGMLRVLRLLRTLRPLRVISRAQGLKLVVETLMSSLKPIGNIVVICCAFFIIFGILGVQLFKGKFFVCQGEDTRNITNKSDCAEASYRWVRHKYNFDNLGQALMSLFVLASKDGWVDIMYDGLDAVGVDQQPIMNHNPWMLLYFISFLLIVAFFVLNMFVGVVVENFHKCRQHQEEEEARRREEKRLRRLEKKRRKAQCKPYYSDYSRFRLLVHHLCTSHYLDLFITGVIGLNVVTMAMEHYQQPQILDEALKICNYIFTVIFVLESVFKLVAFGFRRFFQDRWNQLDLAIVLLSIMGITLEEIEVNASLPINPTIIRIMRVLRIARVLKLLKMAVGMRALLDTVMQALPQVGNLGLLFMLLFFIFAALGVELFGDLECDETHPCEGLGRHATFRNFGMAFLTLFRVSTGDNWNGIMKDTLRDCDQESTCYNTVISPIYFVSFVLTAQFVLVNVVIAVLMKHLEESNKEAKEEAELEAELELEMKTLSPQPHSPLGSPFLWPGVEGPDSPDSPKPGALHPAAHARSASHFSLEHPTDRQLFDTISLLIQGSLEWELKLMDELAGPGGQPSAFPSAPSLGGSDPQMQPHPTELPGPDLLTVRKSGVSRTHSLPNDSYMCRHGSTAEGPLGHRGWGLPKAQSGSVLSVHSQPADTSYILQLPKDAPHLLQPHSAPTWGTIPKLPPPGRSPLAQRPLRRQAAIRTDSLDVQGLGSREDLLAEVSGPSPPLARAYSFWGQSSTQAQQHSRSHSKISKHMTPPAPCPGPEPNWGKGPPETRSSLELDTELSWISGDLLPPGGQEEPPSPRDLKKCYSVEAQSCQRRPTSWLDEQRRHSIAVSCLDSGSQPHLGTDPSNLGGQPLGGPGSRPKKKLSPPSITIDPPESQGPRTPPSPGICLRRRAPSSDSKDPLASGPPDSMAASPSPKKDVLSLSGLSSDPADLDP

SEQ ID NO: 90253 - DNA, 5277 bp, Artificial Sequence
  derived and/or modified sequence
atggacgaggaggaggacggcgccggcgccgaggagagcggccagcccagaagcttcatgagactgaacgacctgagcggcgccggcggcagacccggccccggcagcgccgagaaggaccccggcagcgccgacagcgaggccgagggcctgccctaccccgccctggcccccgtggtgttcttctacctgagccaggacagcagacccagaagctggtgcctgagaaccgtgtgcaacccctggttcgagagaatcagcatgctggtgatcctgctgaactgcgtgaccctgggcatgttcagaccctgcgaggacatcgcctgcgacagccagagatgcagaatcctgcaggccttcgacgacttcatcttcgccttcttcgccgtggagatggtggtgaagatggtggccctgggcatcttcggcaagaagtgctacctgggcgacacctggaacagactggacttcttcatcgtgatcgccggcatgctggagtacagcctggacctgcagaacgtgagcttcagcgccgtgagaaccgtgagagtgctgagacccctgagagccatcaacagagtgcccagcatgagaatcctggtgaccctgctgctggacaccctgcccatgctgggcaacgtgctgctgctgtgcttcttcgtgttcttcatcttcggcatcgtgggcgtgcagctgtgggccggcctgctgagaaacagatgcttcctgcccgagaacttcagcctgcccctgagcgtggacctggagagatactaccagaccgagaacgaggacgagagccccttcatctgcagccagcccagagagaacggcatgagaagctgcagaagcgtgcccaccctgagaggcgacggcggcggcggccccccctgcggcctggactacgaggcctacaacagcagcagcaacaccacctgcgtgaactggaaccagtactacaccaactgcagcgccggcgagcacaaccccttcaagggcgccatcaacttcgacaacatcggctacgcctggatcgccatcttccaggtgatcaccctggagggctgggtggacatcatgtacttcgtgatggacgcccacagcttctacaacttcatctacttcatcctgctgatcatcgtgggcagcttcttcatgatcaacctgtgcctggtggtgatcgccacccagttcagcgagaccaagcagagagagagccagctgatgagagagcagagagtgagattcctgagcaacgccagcaccctggccagcttcagcgagcccggcagctgctacgaggagctgctgaagtacctggtgtacatcctgagaaaggccgccagaagactggcccaggtgagcagagccgccggcgtgagagtgggcctgctgagcagccccgcccccctgggcggccaggagacccagcccagcagcagctgcagcagaagccacagaagactgagcgtgcaccacctggtgcaccaccaccaccaccaccaccaccactaccacctgggcaacggcaccctgagagcccccagagccagccccgagatccaggacagagacgccaacggcagcagaagactgatgctgcccccccccagcacccccgccctgagcggcgccccccccggcggcgccgagagcgtgcacagcttctaccacgccgactgccacctggagcccgtgagatgccaggcccccccccccagaagccccagcgaggccagcggcagaaccgtgggcagcggcaaggtgtaccccaccgtgcacaccagccccccccccgagaccctgaaggagaaggccctggtggaggtggccgccagcagcggcccccccaccctgaccagcctgaacatcccccccggcccctacagcagcatgcacaagctgctggagacccagagcaccggcgcctgccagagcagctgcaagatcagcagcccctgcctgaaggccgacagcggcgcctgcggccccgacagctgcccctactgcgccagagccggcgccggcgaggtggagctggccgacagagagatgcccgacagcgacagcgaggccgtgtacgagttcacccaggacgcccagcacagcgacctgagagacccccacagcagaagacagagaagcctgggccccgacgccgagcccagcagcgtgctggccttctggagactgatctgcgacaccttcagaaagatcgtggacagcaagtacttcggcagaggcatcatgatcgccatcctggtgaacaccctgagcatgggcatcgagtaccacgagcagcccgaggagctgaccaacgccctggagatcagcaacatcgtgttcaccagcctgttcgccctggagatgctgctgaagctgctggtgtacggccccttcggctacatcaagaacccctacaacatcttcgacggcgtgatcgtggtgatcagcgtgtgggagatcgtgggccagcagggcggcggcctgagcgtgctgagaaccttcagactgatgagagtgctgaagctggtgagattcctgcccgccctgcagagacagctggtggtgctgatgaagaccatggacaacgtggccaccttctgcatgctgctgatgctgttcatcttcatcttcagcatcctgggcatgcacctgttcggctgcaagttcgccagcgagagagacggcgacaccctgcccgacagaaagaacttcgacagcctgctgtgggccatcgtgaccgtgttccagatcctgacccaggaggactggaacaaggtgctgtacaacggcatggccagcaccagcagctgggccgccctgtacttcatcgccctgatgaccttcggcaactacgtgctgttcaacctgctggtggccatcctggtggagggcttccaggccgaggagatcagcaagagagaggacgccagcggccagctgagctgcatccagctgcccgtggacagccagggcggcgacgccaacaagagcgagagcgagcccgacttcttcagccccagcctggacggcgacggcgacagaaagaagtgcctggccctggtgagcctgggcgagcaccccgagctgagaaagagcctgctgccccccctgatcatccacaccgccgccacccccatgagcctgcccaagagcaccagcaccggcctgggcgaggccctgggccccgccagcagaagaaccagcagcagcggcagcgccgagcccggcgccgcccacgagatgaagagcccccccagcgccagaagcagcccccacagcccctggagcgccgccagcagctggaccagcagaagaagcagcagaaacagcctgggcagagcccccagcctgaagagaagaagccccagcggcgagagaagaagcctgctgagcggcgagggccaggagagccaggacgaggaggagagcagcgaggaggagagagccagccccgccggcagcgaccacagacacagaggcagcctggagagagaggccaagagcagcttcgacctgcccgacaccctgcaggtgcccggcctgcacagaaccgccagcggcagaggcagcgccagcgagcaccaggactgcaacggcaagagcgccagcggcagactggccagagccctgagacccgacgacccccccctggacggcgacgacgccgacgacgagggcaacctgagcaagggcgagagagtgagagcctggatcagagccagactgcccgcctgctgcctggagagagacagctggagcgcctacatcttccccccccagagcagattcagactgctgtgccacagaatcatcacccacaagatgttcgaccacgtggtgctggtgatcatcttcctgaactgcatcaccatcgccatggagagacccaagatcgacccccacagcgccgagagaatcttcctgaccctgagcaactacatcttcaccgccgtgttcctggccgagatgaccgtgaaggtggtggccctgggctggtgcttcggcgagcaggcctacctgagaagcagctggaacgtgctggacggcctgctggtgctgatcagcgtgatcgacatcctggtgagcatggtgagcgacagcggcaccaagatcctgggcatgctgagagtgctgagactgctgagaaccctgagacccctgagagtgatcagcagagcccagggcctgaagctggtggtggagaccctgatgagcagcctgaagcccatcggcaacatcgtggtgatctgctgcgccttcttcatcatcttcggcatcctgggcgtgcagctgttcaagggcaagttcttcgtgtgccagggcgaggacaccagaaacatcaccaacaagagcgactgcgccgaggccagctacagatgggtgagacacaagtacaacttcgacaacctgggccaggccctgatgagcctgttcgtgctggccagcaaggacggctgggtggacatcatgtacgacggcctggacgccgtgggcgtggaccagcagcccatcatgaaccacaacccctggatgctgctgtacttcatcagcttcctgctgatcgtggccttcttcgtgctgaacatgttcgtgggcgtggtggtggagaacttccacaagtgcagacagcaccaggaggaggaggaggccagaagaagagaggagaagagactgagaagactggagaagaagagaagaaaggcccagtgcaagccctactacagcgactacagcagattcagactgctggtgcaccacctgtgcaccagccactacctggacctgttcatcaccggcgtgatcggcctgaacgtggtgaccatggccatggagcactaccagcagccccagatcctggacgaggccctgaagatctgcaactacatcttcaccgtgatcttcgtgctggagagcgtgttcaagctggtggccttcggcttcagaagattcttccaggacagatggaaccagctggacctggccatcgtgctgctgagcatcatgggcatcaccctggaggagatcgaggtgaacgccagcctgcccatcaaccccaccatcatcagaatcatgagagtgctgagaatcgccagagtgctgaagctgctgaagatggccgtgggcatgagagccctgctggacaccgtgatgcaggccctgccccagctgtgggcctggagcagcctggagacctggagcgtgaccagacacacccccgtgagagcctgggccgtgatgccccccttcggcaccctggcctggcccagctag

SEQ ID NO: 90254 - DNA, 6945 bp, Artificial Sequence
  derived and/or modified sequence
atggacgaggaggaggacggcgccggcgccgaggagagcggccagcccagaagcttcatgagactgaacgacctgagcggcgccggcggcagacccggccccggcagcgccgagaaggaccccggcagcgccgacagcgaggccgagggcctgccctaccccgccctggcccccgtggtgttcttctacctgagccaggacagcagacccagaagctggtgcctgagaaccgtgtgcaacccctggttcgagagaatcagcatgctggtgatcctgctgaactgcgtgaccctgggcatgttcagaccctgcgaggacatcgcctgcgacagccagagatgcagaatcctgcaggccttcgacgacttcatcttcgccttcttcgccgtggagatggtggtgaagatggtggccctgggcatcttcggcaagaagtgctacctgggcgacacctggaacagactggacttcttcatcgtgatcgccggcatgctggagtacagcctggacctgcagaacgtgagcttcagcgccgtgagaaccgtgagagtgctgagacccctgagagccatcaacagagtgcccagcatgagaatcctggtgaccctgctgctggacaccctgcccatgctgggcaacgtgctgctgctgtgcttcttcgtgttcttcatcttcggcatcgtgggcgtgcagctgtgggccggcctgctgagaaacagatgcttcctgcccgagaacttcagcctgcccctgagcgtggacctggagagatactaccagaccgagaacgaggacgagagccccttcatctgcagccagcccagagagaacggcatgagaagctgcagaagcgtgcccaccctgagaggcgacggcggcggcggccccccctgcggcctggactacgaggcctacaacagcagcagcaacaccacctgcgtgaactggaaccagtactacaccaactgcagcgccggcgagcacaaccccttcaagggcgccatcaacttcgacaacatcggctacgcctggatcgccatcttccaggtgatcaccctggagggctgggtggacatcatgtacttcgtgatggacgcccacagcttctacaacttcatctacttcatcctgctgatcatcgtgggcagcttcttcatgatcaacctgtgcctggtggtgatcgccacccagttcagcgagaccaagcagagagagagccagctgatgagagagcagagagtgagattcctgagcaacgccagcaccctggccagcttcagcgagcccggcagctgctacgaggagctgctgaagtacctggtgtacatcctgagaaaggccgccagaagactggcccaggtgagcagagccgccggcgtgagagtgggcctgctgagcagccccgcccccctgggcggccaggagacccagcccagcagcagctgcagcagaagccacagaagactgagcgtgcaccacctggtgcaccaccaccaccaccaccaccaccactaccacctgggcaacggcaccctgagagcccccagagccagccccgagatccaggacagagacgccaacggcagcagaagactgatgctgcccccccccagcacccccgccctgagcggcgccccccccggcggcgccgagagcgtgcacagcttctaccacgccgactgccacctggagcccgtgagatgccaggcccccccccccagaagccccagcgaggccagcggcagaaccgtgggcagcggcaaggtgtaccccaccgtgcacaccagccccccccccgagaccctgaaggagaaggccctggtggaggtggccgccagcagcggcccccccaccctgaccagcctgaacatcccccccggcccctacagcagcatgcacaagctgctggagacccagagcaccggcgcctgccagagcagctgcaagatcagcagcccctgcctgaaggccgacagcggcgcctgcggccccgacagctgcccctactgcgccagagccggcgccggcgaggtggagctggccgacagagagatgcccgacagcgacagcgaggccgtgtacgagttcacccaggacgcccagcacagcgacctgagagacccccacagcagaagacagagaagcctgggccccgacgccgagcccagcagcgtgctggccttctggagactgatctgcgacaccttcagaaagatcgtggacagcaagtacttcggcagaggcatcatgatcgccatcctggtgaacaccctgagcatgggcatcgagtaccacgagcagcccgaggagctgaccaacgccctggagatcagcaacatcgtgttcaccagcctgttcgccctggagatgctgctgaagctgctggtgtacggccccttcggctacatcaagaacccctacaacatcttcgacggcgtgatcgtggtgatcagcgtgtgggagatcgtgggccagcagggcggcggcctgagcgtgctgagaaccttcagactgatgagagtgctgaagctggtgagattcctgcccgccctgcagagacagctggtggtgctgatgaagaccatggacaacgtggccaccttctgcatgctgctgatgctgttcatcttcatcttcagcatcctgggcatgcacctgttcggctgcaagttcgccagcgagagagacggcgacaccctgcccgacagaaagaacttcgacagcctgctgtgggccatcgtgaccgtgttccagatcctgacccaggaggactggaacaaggtgctgtacaacggcatggccagcaccagcagctgggccgccctgtacttcatcgccctgatgaccttcggcaactacgtgctgttcaacctgctggtggccatcctggtggagggcttccaggccgaggagatcagcaagagagaggacgccagcggccagctgagctgcatccagctgcccgtggacagccagggcggcgacgccaacaagagcgagagcgagcccgacttcttcagccccagcctggacggcgacggcgacagaaagaagtgcctggccctggtgagcctgggcgagcaccccgagctgagaaagagcctgctgccccccctgatcatccacaccgccgccacccccatgagcctgcccaagagcaccagcaccggcctgggcgaggccctgggccccgccagcagaagaaccagcagcagcggcagcgccgagcccggcgccgcccacgagatgaagagcccccccagcgccagaagcagcccccacagcccctggagcgccgccagcagctggaccagcagaagaagcagcagaaacagcctgggcagagcccccagcctgaagagaagaagccccagcggcgagagaagaagcctgctgagcggcgagggccaggagagccaggacgaggaggagagcagcgaggaggagagagccagccccgccggcagcgaccacagacacagaggcagcctggagagagaggccaagagcagcttcgacctgcccgacaccctgcaggtgcccggcctgcacagaaccgccagcggcagaggcagcgccagcgagcaccaggactgcaacggcaagagcgccagcggcagactggccagagccctgagacccgacgacccccccctggacggcgacgacgccgacgacgagggcaacctgagcaagggcgagagagtgagagcctggatcagagccagactgcccgcctgctgcctggagagagacagctggagcgcctacatcttccccccccagagcagattcagactgctgtgccacagaatcatcacccacaagatgttcgaccacgtggtgctggtgatcatcttcctgaactgcatcaccatcgccatggagagacccaagatcgacccccacagcgccgagagaatcttcctgaccctgagcaactacatcttcaccgccgtgttcctggccgagatgaccgtgaaggtggtggccctgggctggtgcttcggcgagcaggcctacctgagaagcagctggaacgtgctggacggcctgctggtgctgatcagcgtgatcgacatcctggtgagcatggtgagcgacagcggcaccaagatcctgggcatgctgagagtgctgagactgctgagaaccctgagacccctgagagtgatcagcagagcccagggcctgaagctggtggtggagaccctgatgagcagcctgaagcccatcggcaacatcgtggtgatctgctgcgccttcttcatcatcttcggcatcctgggcgtgcagctgttcaagggcaagttcttcgtgtgccagggcgaggacaccagaaacatcaccaacaagagcgactgcgccgaggccagctacagatgggtgagacacaagtacaacttcgacaacctgggccaggccctgatgagcctgttcgtgctggccagcaaggacggctgggtggacatcatgtacgacggcctggacgccgtgggcgtggaccagcagcccatcatgaaccacaacccctggatgctgctgtacttcatcagcttcctgctgatcgtggccttcttcgtgctgaacatgttcgtgggcgtggtggtggagaacttccacaagtgcagacagcaccaggaggaggaggaggccagaagaagagaggagaagagactgagaagactggagaagaagagaagaaaggcccagtgcaagccctactacagcgactacagcagattcagactgctggtgcaccacctgtgcaccagccactacctggacctgttcatcaccggcgtgatcggcctgaacgtggtgaccatggccatggagcactaccagcagccccagatcctggacgaggccctgaagatctgcaactacatcttcaccgtgatcttcgtgctggagagcgtgttcaagctggtggccttcggcttcagaagattcttccaggacagatggaaccagctggacctggccatcgtgctgctgagcatcatgggcatcaccctggaggagatcgaggtgaacgccagcctgcccatcaaccccaccatcatcagaatcatgagagtgctgagaatcgccagagtgctgaagctgctgaagatggccgtgggcatgagagccctgctggacaccgtgatgcaggccctgccccaggtgggcaacctgggcctgctgttcatgctgctgttcttcatcttcgccgccctgggcgtggagctgttcggcgacctggagtgcgacgagacccacccctgcgagggcctgggcagacacgccaccttcagaaacttcggcatggccttcctgaccctgttcagagtgagcaccggcgacaactggaacggcatcatgaaggacaccctgagagactgcgaccaggagagcacctgctacaacaccgtgatcagccccatctacttcgtgagcttcgtgctgaccgcccagttcgtgctggtgaacgtggtgatcgccgtgctgatgaagcacctggaggagagcaacaaggaggccaaggaggaggccgagctggaggccgagctggagctggagatgaagaccctgagcccccagccccacagccccctgggcagccccttcctgtggcccggcgtggagggccccgacagccccgacagccccaagcccggcgccctgcaccccgccgcccacgccagaagcgccagccacttcagcctggagcaccccaccgacagacagctgttcgacaccatcagcctgctgatccagggcagcctggagtgggagctgaagctgatggacgagctggccggccccggcggccagcccagcgccttccccagcgcccccagcctgggcggcagcgacccccagatgcagccccaccccaccgagctgcccggccccgacctgctgaccgtgagaaagagcggcgtgagcagaacccacagcctgcccaacgacagctacatgtgcagacacggcagcaccgccgagggccccctgggccacagaggctggggcctgcccaaggcccagagcggcagcgtgctgagcgtgcacagccagcccgccgacaccagctacatcctgcagctgcccaaggacgccccccacctgctgcagccccacagcgcccccacctggggcaccatccccaagctgcccccccccggcagaagccccctggcccagagacccctgagaagacaggccgccatcagaaccgacagcctggacgtgcagggcctgggcagcagagaggacctgctggccgaggtgagcggccccagcccccccctggccagagcctacagcttctggggccagagcagcacccaggcccagcagcacagcagaagccacagcaagatcagcaagcacatgaccccccccgccccctgccccggccccgagcccaactggggcaagggcccccccgagaccagaagcagcctggagctggacaccgagctgagctggatcagcggcgacctgctgccccccggcggccaggaggagccccccagccccagagacctgaagaagtgctacagcgtggaggcccagagctgccagagaagacccaccagctggctggacgagcagagaagacacagcatcgccgtgagctgcctggacagcggcagccagccccacctgggcaccgaccccagcaacctgggcggccagcccctgggcggccccggcagcagacccaagaagaagctgagcccccccagcatcaccatcgacccccccgagagccagggccccagaaccccccccagccccggcatctgcctgagaagaagagcccccagcagcgacagcaaggaccccctggccagcggcccccccgacagcatggccgccagccccagccccaagaaggacgtgctgagcctgagcggcctgagcagcgaccccgccgacctggacccctag

SEQ ID NO: 90255 - DNA, 5277 bp, Artificial Sequence
  derived and/or modified sequence
atggatgaggaggaagacggggctggcgcggaggagtcagggcaacctcgatccttcatgcgattaaacgacctgtcaggggcaggaggacgacccgggcccggaagcgctgaaaaggatccaggatctgctgactcagaggcagagggactcccttatcctgcactggcacctgttgtcttcttctatctttctcaggattctcgcccaaggtcttggtgtctccgaacggtctgcaacccctggttcgagagaatatcaatgctggttatccttctgaactgcgtgacattgggaatgtttcgaccatgcgaggacattgcctgcgacagtcaaaggtgtcgcattctgcaggctttcgacgactttatctttgccttctttgccgtggagatggtggttaagatggttgctctggggatcttcggaaagaagtgctacctaggcgacacatggaaccgcctcgactttttcattgtgattgctgggatgctggaatactcactagatcttcagaatgtgagcttctcggccgtgaggacagtgagggtactgagaccactgagagcaatcaatagagtaccttctatgcgcatccttgtgacccttctactcgacactctaccaatgctggggaatgtgctcctactctgcttctttgtgttttttattttcggaatcgtcggagttcagctctgggctggtctgctgcgtaatcgatgctttctccctgaaaacttttccctgcccttgagcgttgacctggaaaggtattaccagaccgagaacgaggatgaaagtccgtttatttgtagccaacctcgggagaatggaatgagatcatgcaggtccgtgcccacactgagaggcgacggcggtggaggtcctccttgtggcctcgattatgaggcttacaacagctccagcaatactacctgcgtcaattggaaccaatactacacaaattgttccgcgggtgagcataatccttttaagggagctatcaactttgacaatattgggtacgcctggatcgctatttttcaggtgatcactctcgagggctgggtggacataatgtactttgtcatggatgcacacagcttctacaatttcatctacttcattctactcatcatcgtaggcagcttttttatgatcaatctttgtctcgtcgtgattgccactcagttcagcgaaactaaacaaagggaaagtcagcttatgcgcgaacagcgcgtccggttcctgtcaaacgcaagcactctggccagttttagcgagcctggcagctgctacgaggagctgctaaaatatttggtgtatatacttcggaaagcggcccggcgcttggcccaagtgtctagagctgctggagtgcgcgtgggactgttgagctcgcccgcacccctaggcggacaggagactcagcctagcagctcatgctctcgcagtcatagacggctttctgtccaccatttggtgcaccaccaccaccaccaccatcaccattaccacttgggcaatggtactctaagggcacctagggcctcacctgaaattcaagatcgcgacgctaatgggtcacggagactgatgcttccgcctccatccacgcccgcgttgtccggtgcgccgccgggaggtgcagagtccgtccattctttctaccacgccgattgtcatctcgaacccgtgcggtgtcaggccccacctccacggagcccatccgaagccagtggccggaccgtgggctccggaaaagtataccccacagtgcacacatcccctcctccagagacactcaaagagaaggctctcgttgaagtggcagccagttccggacctcccaccctgacatctctcaacatccctcctggcccgtactctagcatgcataaactcttggagacccagtccactggcgcctgccagtcctcctgcaagataagctcaccctgtctgaaagcagatagtggagcttgcggacccgatagctgcccatactgtgcccgcgcgggtgccggagaggtggaactggcagatcgcgaaatgccggacagcgacagcgaagccgtgtacgagttcacccaagacgcacagcatagcgatctgcgtgatccacattccaggcggcagaggtccctcggccccgatgccgaaccctcttccgtgttggctttctggcgtctgatctgcgacaccttccgcaaaatagtagactcaaagtactttggccgagggataatgatcgccatacttgttaataccctcagcatgggtattgagtatcacgagcagcctgaggaacttaccaatgcactggaaatttcaaatattgtgtttacttccctgtttgccttggagatgctgcttaagctgttggtctatggtccttttggttacataaagaatccatataatatctttgacggggtgatcgttgtgataagtgtctgggaaattgtggggcaacaagggggcgggctaagcgtgctgcgcacattccgcctgatgagggttctgaaactcgttcgtttcctcccagctcttcagaggcaactcgtcgtactgatgaagaccatggacaacgttgcaaccttctgcatgctgctgatgttgttcatctttatcttttcaattttaggcatgcatctgtttggctgcaaatttgcctctgagagggacggcgatactctcccggaccggaaaaacttcgatagtctcctgtgggccatcgtaacggtgtttcaaatcctaacacaggaagactggaacaaagtgctatacaacggcatggccagcacatccagctgggcagccctgtactttattgcattaatgacctttggaaattacgtgctcttcaacctcttagtggccattttggtcgaggggttccaagcggaggaaatttccaagagagaagatgcctctgggcagctgagttgcattcagctgcccgtcgatagtcaggggggcgacgccaataaaagtgagtctgagcccgatttctttagcccgagcctggacggagatggcgaccggaagaagtgtctggctctagtgtccctgggtgagcatccagagcttcggaaatctctcctgccaccactgataattcatactgctgccactccgatgtcactccccaagtccacatctaccgggttaggagaagcgttgggacctgccagtagaagaacctcaagctccggatctgcggagccgggcgctgcccatgaaatgaaatccccaccctctgctagatctagcccacatagtccttggtctgctgcctcttcttggacaagtcgccgttcctccaggaacagcctgggccgcgccccaagcttgaagcggcggtcgcccagcggagagaggaggagtctgctctcgggcgagggacaggaatctcaggacgaagaggagtcatccgaagaagagagagcctcaccggccggctctgatcatcgtcatcgcgggagcttagagcgggaggcgaaaagctccttcgacctgccagatacgctgcaagtccctgggctacaccggactgcttcaggccggggctcggcatccgagcaccaagattgtaacggaaagagcgccagcggtcgtctggctagagccctcagacctgatgaccctccacttgatggggatgacgccgatgacgaaggtaatctgtccaaaggggagcgtgtccgcgcatggatccgagcccgcttgcccgcctgctgcctggaacgggatagctggtccgcttacatcttccctcctcaatctcgcttcagactgctgtgtcatagaattatcactcacaaaatgtttgatcacgtggttctcgttataatctttctcaattgcattactatcgccatggagcgtcccaagattgaccctcacagcgctgagaggatctttctcacactatctaactatattttcaccgccgtgttcctcgctgaaatgactgtcaaagtggtcgccctgggctggtgtttcggggaacaggcatatctccgctcttcttggaacgtactagacggactgcttgtgttgatctcggtgatagatatcctagtcagcatggtctctgactctggaaccaaaattctggggatgcttcgtgtgctgcggttgctccgtaccctgcggccccttagggtcattagtcgcgcccagggccttaagcttgtggttgagacactgatgtcctcactcaaacctatcggtaacattgtggtgatctgttgtgcctttttcataattttcggcatactgggtgtccaactgttcaagggaaagttttttgtctgccagggcgaagatacccggaatattaccaacaaatccgattgcgccgaagccagttatcgctgggtgaggcacaaatacaattttgataatttgggccaggctctgatgtctctgtttgtgctggcatccaaagacggatgggtcgacatcatgtacgacggattggatgcagtgggagtagaccagcaaccaatcatgaaccacaacccatggatgctgctctatttcatctcttttctgttgattgtcgcctttttcgtgctgaatatgtttgtcggcgtggtggtggagaactttcataaatgccgccaacaccaggaggaggaagaagctcgaagaagagaagaaaagcgcttaagaaggttggagaagaagagacgcaaggctcagtgtaaaccttactacagtgactactcgcgcttccgtctgctggtgcaccatctctgcacgtctcactatttggacctgtttatcactggagtcatcggactgaacgtggtaactatggctatggagcattatcagcagccccagattcttgacgaggctcttaagatatgtaattatattttcaccgttatatttgtgctcgagtccgtcttcaaactggtcgcattcggattcaggcgatttttccaagacagatggaaccagctcgacctcgctatcgtccttctctctataatggggattaccttagaggagatcgaggtgaatgcctcccttcccatcaatcccacaatcattcggatcatgcgcgttctgaggatcgccagagtgcttaaattactgaaaatggccgtgggaatgcgggccctgctggacacggttatgcaggcgctgccccagctctgggcctggagttctttggaaacttggtcagtgacacgccatacccccgtccgggcatgggcggtgatgcccccttttgggactctagcttggccctcatag

SEQ ID NO: 90256 - DNA, 6945 bp, Artificial Sequence
  derived and/or modified sequence
atggacgaggaagaggatggagcaggagctgaggagtccggtcagccccgctcttttatgcgcttaaatgacctgagcggcgccggcgggcgcccaggcccgggctcggctgaaaaggatcccgggagcgccgactctgaagccgagggcttaccttaccccgctctcgccccagtcgttttcttttatctgtcacaggacagtcggccaagaagctggtgcctacggaccgtgtgcaatccttggttcgagcggatctcaatgctggtaatcctacttaattgtgtaacactcgggatgtttagaccctgcgaagacatcgcttgcgatagccagaggtgccggattctgcaagcttttgacgatttcatctttgctttcttcgccgtcgagatggtggtcaagatggttgcactgggaattttcggaaagaaatgctacctgggggatacatggaaccgactcgacttttttatcgtcattgccgggatgctggagtatagtctggatctccaaaatgtgagcttttcagcggtccgaacggtccgcgttctgagacctctgagagccattaatagagtgcctagtatgcggatcctagtaactttgcttttagacacactcccgatgctgggaaacgtccttctgctctgctttttcgtattttttatcttcggcatagttggtgtccagctgtgggcgggacttcttaggaacagatgtttcctgcctgagaacttctcattgcccttgtcagtagacctggaaagatactatcagactgagaacgaggacgagagcccttttatatgctcacagcctcgggagaatgggatgagaagctgcaggagtgtaccaacactccgcggcgatggtggtggcgggcccccctgcggtctagattacgaggcctataactccagcagcaacaccacctgcgttaactggaatcagtattatacgaactgtagtgctggagaacataatcctttcaagggcgcaattaacttcgacaacataggctacgcgtggatagccatttttcaagtgattacacttgaggggtgggtggacatcatgtattttgtgatggatgctcattctttctacaatttcatctattttattcttctgatcatcgtgggctccttctttatgattaacctgtgcttggttgtgatagccacacaatttagcgaaacaaaacagagggagtcacaactgatgcgcgagcaacgagtgcggtttctttccaacgcttctaccctggctagtttcagcgagcctggatcttgttatgaggagctgctaaaatacctggtgtatatcctgagaaaagcagcacggcgcctggcgcaagtaagtagggccgctggagtgagggtggggctgctgtcaagtccagcccccctgggcggccaagagactcagccctcctcctcatgctccaggagccacagaaggctaagtgtgcatcatctcgtacaccaccatcaccaccatcatcaccactaccatctgggaaatggtacgctgcgtgcgccaagagcgagtcctgagattcaggaccgggacgctaatggcagccgccggctgatgttgccccccccctcgactccggccctttccggggccccccctgggggagctgaatctgtgcacagtttttaccatgccgactgccatctcgaacctgttaggtgtcaggcacctcccccccggtccccgtctgaggccagcgggcggactgtcggtagcggtaaggtatatcccacagtacatacttcacccccaccagagaccttaaaggaaaaggccctggttgaggtggccgccagctccggacctcccacactcacctctctgaacatcccccctgggccttactcctccatgcacaagctcctggagactcagtcaaccggcgcctgccagtcttcttgcaaaatttctagcccttgcctaaaggccgattctggagcctgcggccccgactcgtgcccatattgcgctcgcgccggtgcaggcgaggtcgagctggctgacagagagatgccggacagcgactcagaagcggtgtacgagttcacacaggacgcgcaacactcagatttgagggaccctcactcgagacgccagcggtccttagggccggacgcagagccttcttccgtcctggcgttttggcgccttatttgtgacactttcagaaagatagtcgactcaaaatacttcgggcgtgggatcatgattgccatcctcgtgaacaccctgtctatgggaattgagtaccatgagcagcctgaagaattgactaatgccctggaaatcagtaacattgtatttacaagtctgttcgccttggagatgctgcttaagctgctggtttacggaccctttggctacataaaaaatccttataatatcttcgatggagtcattgtcgtgatctctgtgtgggaaatagtgggacagcagggaggtggcctgtctgtcctgagaactttccggctcatgcgggtgctgaagctggtcagattcctccccgctcttcagcgccagctggtggtactgatgaagaccatggacaatgtggccaccttctgtatgctgctcatgctctttatctttatattcagtatcttaggaatgcacttatttggctgcaaattcgcttcggagcgtgatggcgacacactgccagaccgcaaaaactttgatagcctgctgtgggctatagttacagtgttccagatcctgacccaggaggactggaataaagtgttgtacaacggcatggcttctacatcgtcttgggcggcgctgtactttattgccttgatgaccttcggtaactacgtgctgtttaacctactggtcgccatcttggtggaaggttttcaggcagaggagattagtaagcgggaagatgcttctggccaattgtcatgtatccagctgcctgtggattcacagggtggcgatgctaataagtccgagagtgaacccgacttctttagcccgtctttagatggcgatggtgacaggaaaaagtgcctggcgctagtgtctctcggagagcatcccgagctcaggaaaagcctcctgccgccactaattatacacactgcagccacaccaatgtctcttcctaagagcactagtacaggcctaggtgaggccttgggacctgcgagtcggagaactagctcttctggctcagccgagccaggcgccgctcacgagatgaagtccccaccatcagcacggagttcccctcactccccatggagcgcagcctcttcttggacgagcagacgcagcagccgcaactccttaggcagggcaccctcccttaagcgacggagtccctccggcgaaaggagaagtctgttaagcggagagggacaggagtctcaggacgaagaagaatctagcgaggaagagagggctagcccagccgggtctgatcataggcaccggggatcgctcgagagagaagctaaatcatcatttgacctcccagacacccttcaggtaccaggactccatagaacagcttccgggaggggttctgctagtgaacaccaggattgcaacggcaagagcgctagcggccgattagctcgtgctttgaggcccgatgacccacctctcgacggtgatgatgctgatgacgagggaaacctgtccaagggagaacgagttcgcgcctggattagagcgcggctgccagcctgctgcctcgagagagattcctggagcgcttacatttttccccctcagagcagattcaggctgttatgtcacagaatcataacccataagatgttcgatcacgtggtgcttgtgatcatttttctgaactgtattacaattgccatggaaaggcccaaaatagatccacattcagccgagcgcatatttctgaccctgagtaattatattttcacggctgttttcttggctgagatgacggttaaggtggtggctttgggctggtgcttcggcgaacaggcctatctgcggtcctcctggaatgttctggacggtctcctcgtgctgatctcagttatcgatattctcgtcagtatggttagtgactctgggacgaagattctgggcatgctacgggttttgagacttcttcggaccctgagacccctccgggtaattagtagagcacagggacttaaactggtcgtcgaaactctcatgtcatcccttaagcccattgggaatatcgtagttatttgctgtgctttctttattatcttcggcatccttggagtccagctgtttaagggcaagttctttgtgtgtcagggggaagatacgaggaatattacaaacaaaagtgattgcgcagaggcatcttaccgatgggtaaggcataagtataactttgacaacttggggcaggcactgatgtctctcttcgttctggcttctaaagatggatgggttgacatcatgtacgatggtctggacgctgtgggggtggaccagcaacccataatgaatcacaatccatggatgctgctttacttcatcagtttcctcctgatcgtggcctttttcgtcctgaacatgtttgttggggtcgtagtggagaactttcataagtgccgccaacaccaggaggaagaggaggcgagaaggcgggaggaaaagaggctacggcgcttggaaaaaaagcggcgcaaggcccagtgcaagccttactacagcgattatagccgattcaggttgctggtacatcatttgtgcaccagtcattacttagacctcttcattaccggtgtgattggtctaaacgtggtcaccatggcaatggagcactatcaacagcctcagatactcgatgaagcattaaagatttgtaattatatcttcacggtgatttttgtgcttgaatcagtttttaagctggtggcgttcgggtttagacgattctttcaggatagatggaaccaacttgacctggccatagttctgctctcaattatgggaatcactttggaggagatagaggtcaatgccagtttacctattaaccccaccattattagaatcatgagggtgctacgtatagctcgggtcctgaagctgctcaaaatggcagtcggaatgagggccctgcttgacaccgtcatgcaagcactgccacaagtggggaaccttggtctccttttcatgctactgtttttcatttttgccgctctgggggtcgagttattcggcgatctagagtgcgatgagacgcacccctgtgaaggactcggccggcacgccaccttccgtaatttcggtatggccttcctaacactgtttcgggtgagcactggggacaattggaacggcatcatgaaagacaccctgagagactgtgatcaggagagtacttgctataacacagtcatttctccaatatacttcgtgagctttgttctcaccgctcagttcgtgttggtgaacgttgttattgccgtgctgatgaagcacctagaggaaagcaacaaagaagccaaagaggaggctgaactagaagccgagctggagctggagatgaagaccctctctccccagccacactcccctctgggttctccctttctgtggcctggggtagaaggtcctgattcaccggactctccgaaacctggagcccttcatccagcggctcatgcgcgctccgcatcacacttcagcttggagcaccccacagaccggcaactgtttgataccattagcctccttattcaaggctccctggagtgggaacttaagctgatggacgagttggccggtccaggtggacagcctagcgcgttcccctcggccccgtcgctgggcgggtccgatccacagatgcagccacaccccaccgaattaccaggtcccgatttgttgactgtacgaaaatccggagtgagtcggactcactccctacccaatgacagttatatgtgccgccacggctccactgcagagggcccattggggcatcgaggatggggccttccaaaagcccaatccggctcagtcttgagtgtccattcacagcctgctgacacaagctacattttacagcttcctaaggatgctccccaccttttgcagcctcactcagctcccacatggggaaccattcccaaattacccccccccggccggagtcctctggcccaacgtccgctcaggcgccaagctgcgatccgcactgacagtctcgatgtccaggggctcggatcccgcgaggatcttctggccgaagtgtctggcccctccccccccctcgcaagggcatacagtttctgggggcagagtagtactcaggcacagcagcatagtcgctcgcattccaaaatctctaagcacatgacacctccggcaccttgtcccggccccgagcctaactggggtaagggaccacccgagaccagaagctctctcgaactcgatacagaactcagttggatctccggcgatctgctccctcccggtggtcaagaagagccccctagccctcgagatctgaaaaagtgttacagcgtggaggcacagagctgtcagcgccgtcctacgtcctggttggatgaacaacggcgtcactcaatcgccgtcagctgtctcgattcgggctctcagccgcacctcggcaccgacccctccaatcttggaggacagcccctggggggcccaggcagccgccccaaaaagaagctgagccccccaagtatcacaatagacccccccgagagccagggtccgaggactcctccatcgcccgggatttgcttaagacgccgggcaccctcttctgactcaaaggacccactggcttcgggtccgcccgactccatggccgcttctccaagtcccaagaaggacgtgctatccttatcgggactcagctccgacccagcggacttggacccctag

SEQ ID NO: 90257 - DNA, 5277 bp, Artificial Sequence
  derived and/or modified sequence
atggatgaggaggaggatggagctggagctgaggagagcggccagcccaggagcttcatgaggctgaatgacctgagcggggccggcggccggcccggccctggcagcgctgagaaggaccccggcagcgctgacagcgaggccgagggcctgccctacccagccctggcccctgtggtgttcttctacctgagccaggacagccggcccaggtcctggtgcctgaggacagtgtgcaacccctggtttgagcgcatctccatgctggtgatcctgctgaactgtgtgaccctgggcatgttccggccctgtgaagatattgcctgtgacagccagcgctgccgcatcctgcaggcctttgatgacttcatctttgccttctttgctgtggagatggtggtgaagatggtggccctgggcatctttgggaagaagtgctacctgggggacacctggaaccggctggacttcttcatcgtgattgctggcatgctggagtacagcctggacctgcagaatgtgtccttctctgctgtgaggacagtgcgggtgctgcggcccctgcgggccatcaacagagtgcccagcatgaggatcctggtgaccctgctgctggacaccctgcccatgctgggcaatgtgctgctgctgtgcttctttgtgttcttcatctttggaattgtgggcgtgcagctgtgggccggcctgctgaggaaccgctgcttcctgcctgagaacttcagcctgcccctgtctgtggacctggagcgctactaccagacagaaaatgaagatgagagccccttcatctgcagccagccccgggagaatggcatgaggagctgccgctctgtgcccaccctgcggggagatggcggcggcggccccccctgtggcctggactatgaggcctacaacagcagcagcaacaccacctgtgtgaactggaaccagtactacaccaactgcagcgctggggagcacaaccccttcaagggggccatcaactttgacaacatcggctacgcctggatcgccatcttccaggtgatcaccctggagggctgggtggacatcatgtactttgtgatggatgcccacagcttctacaacttcatctacttcatcctgctgatcatcgtgggcagcttcttcatgatcaacctgtgcctggtggtgattgccacccagttcagcgagaccaagcagcgggagagccagctgatgagggagcagagggtgcgcttcctgagcaatgccagcaccctggccagcttcagcgagcccggcagctgctatgaggagctgctgaagtacctggtgtacatcctgaggaaggccgcccggcggctggcccaggtgtccagagctgctggggtgcgggtgggcctgctgagcagccctgcccccctgggcggccaggagacccagcccagcagcagctgcagccgcagccaccggcggctgtctgtgcaccacctggtgcaccaccaccaccaccaccaccaccactaccacctgggcaatggcaccctgcgggccccccgggccagccctgagatccaggacagagatgccaacggcagccggcggctgatgctgcccccacccagcaccccagccctgagcggggcccctcctggaggagctgagagcgtgcacagcttctaccacgccgactgccacctggagcctgtgcgctgccaggcccccccacccaggagccccagcgaggccagcggccgcacagtgggcagcggcaaggtgtaccccaccgtgcacaccagccccccacctgagaccctgaaggagaaggccctggtggaggtggccgccagcagcggcccccccaccctgaccagcctgaacatccccccaggcccctacagctccatgcacaagctgctggagacccagagcactggagcctgccagagcagctgcaagatcagcagcccctgcctgaaggctgacagcggggcctgtggccctgacagctgcccctactgtgcccgggccggggccggggaggtggagctggccgaccgggagatgccagacagcgacagcgaggccgtgtatgagttcacccaggatgcccagcacagcgacctgcgggacccccacagccggcggcagaggagcctgggcccagatgctgagcccagctctgtgctggccttctggaggctcatctgtgacaccttcaggaagatcgtggacagcaagtacttcggccggggcatcatgattgccatcctggtgaacaccctgtccatgggcatcgagtaccacgagcagcctgaggagctgaccaatgccctggagatcagcaacatcgtgttcaccagcctgtttgccctggagatgctgctgaagctgctggtgtatggccccttcggctacatcaagaacccctacaacatctttgatggagtcatcgtggtgatctctgtgtgggagatcgtgggccagcagggcggcggcctgtctgtgctgcggaccttccggctgatgagggtgctgaagctggtgcgcttcctgcctgccctgcagaggcagctggtggtgctgatgaagaccatggacaacgtggccaccttctgcatgctgctgatgctgttcatcttcatcttcagcatcctgggcatgcacctgtttggctgcaagtttgccagcgagagagatggagacaccctgcctgacaggaagaactttgacagcctgctgtgggccatcgtgacagtgttccagatcctgacccaggaggactggaacaaggtgctgtacaacggcatggccagcaccagctcctgggccgccctgtacttcatcgccctgatgaccttcggcaactacgtgctcttcaacctgctggtggccatcctggtggagggcttccaggccgaggagatcagcaagcgggaggatgccagcggccagctgagctgcatccagctgcctgtggacagccagggcggagatgccaacaagtctgagagcgagccagacttcttcagccccagcctggatggagatggagacaggaagaagtgcctggccctggtgtccctgggggagcaccctgagctgaggaagagcctgctgcccccactcatcatccacacagctgccacccccatgagcctgcccaagagcaccagcacaggcctgggggaggccctgggccctgccagcaggaggaccagcagcagcggcagcgctgagcctggagctgcccacgagatgaagagcccccccagcgcccggagcagcccccacagcccctggagcgctgccagctcctggaccagccgccgcagcagcaggaacagcctgggccgggcccccagcctgaagagaagaagccccagcggggagcggcgcagcctgctgtctggagagggccaggagagccaggatgaggaggagagcagcgaggaggagcgggccagccctgctggcagtgaccaccgccaccggggcagcctggagcgggaggccaagagcagctttgacctgcctgacaccctgcaggtgcccggcctgcacaggacagccagcggccggggcagcgccagcgagcaccaggactgcaatggcaagagcgccagcggccgcctggcccgggccctgcggccagatgatcctcccctggatggagatgatgctgatgatgagggcaacctgagcaagggggagcgggtgcgggcctggatccgggcccggctgcctgcctgctgcctggagcgggacagctggagcgcctacatcttccccccccagagccgcttccggctgctgtgccaccgcatcatcacccacaagatgtttgaccacgtggtgctggtgatcatcttcctgaactgcatcaccatcgccatggagcggcccaagattgacccccacagcgctgagcgcatcttcctgaccctgagcaactacatcttcaccgctgtgttcctggccgagatgacagtgaaggtggtggccctgggctggtgcttcggggagcaggcctacctgcggagctcctggaatgtgctggatggcctgctggtgctgatctctgtgattgacatcctggtgtccatggtgtctgattctggcaccaagatcctgggcatgctgcgggtgctgcggctgctgcggaccctgcggcccctgcgggtcatcagccgggcccagggcctgaagctggtggtggagaccctgatgagcagcctgaagcccatcggcaacatcgtggtgatctgctgtgccttcttcatcatcttcggcatcctgggcgtgcagctgttcaagggcaagttctttgtgtgccagggcgaggacaccaggaacatcaccaacaagagtgactgtgccgaggccagctaccgctgggtgcgccacaagtacaactttgacaacctgggccaggccctgatgagcctgtttgtgctggccagcaaggatggctgggtggacatcatgtatgatggcctggatgctgtgggcgtggaccagcagcccatcatgaaccacaacccctggatgctgctgtacttcatctccttcctgctgattgtggccttctttgtgctgaacatgtttgtgggcgtggtggtggagaacttccacaagtgccggcagcaccaggaggaggaggaggcccggcggcgggaggagaagaggctgcggcggctggagaagaagaggaggaaggcccagtgcaagccctactacagcgactacagccgcttccggctgctggtgcaccacctgtgcaccagccactacctggacctcttcatcaccggggtgattggcctgaatgtggtgaccatggccatggagcactaccagcagccccagatcctggatgaggccctgaagatctgcaactacatcttcaccgtcatctttgtgctggagagcgtcttcaagctggtggccttcggcttccgccgcttcttccaggaccgctggaaccagctggacctggccatcgtgctgctgagcatcatgggcatcaccctggaggagattgaggtgaatgccagcctgcccatcaaccccaccatcatccgcatcatgagggtgctgcgcatcgcccgggtgctgaagctgctgaagatggctgtgggcatgagggccctgctggacacagtgatgcaggccctgccccagctgtgggcctggagcagcctggagacctggagcgtgaccaggcacacccctgtgcgggcctgggccgtgatgcccccatttggcaccctggcctggcccagctag

SEQ ID NO: 90258 - DNA, 6945 bp, Artificial Sequence
  derived and/or modified sequence
atggatgaggaggaggatggagctggagctgaggagagcggccagcccaggagcttcatgaggctgaatgacctgagcggggccggcggccggcccggccctggcagcgctgagaaggaccccggcagcgctgacagcgaggccgagggcctgccctacccagccctggcccctgtggtgttcttctacctgagccaggacagccggcccaggtcctggtgcctgaggacagtgtgcaacccctggtttgagcgcatctccatgctggtgatcctgctgaactgtgtgaccctgggcatgttccggccctgtgaagatattgcctgtgacagccagcgctgccgcatcctgcaggcctttgatgacttcatctttgccttctttgctgtggagatggtggtgaagatggtggccctgggcatctttgggaagaagtgctacctgggggacacctggaaccggctggacttcttcatcgtgattgctggcatgctggagtacagcctggacctgcagaatgtgtccttctctgctgtgaggacagtgcgggtgctgcggcccctgcgggccatcaacagagtgcccagcatgaggatcctggtgaccctgctgctggacaccctgcccatgctgggcaatgtgctgctgctgtgcttctttgtgttcttcatctttggaattgtgggcgtgcagctgtgggccggcctgctgaggaaccgctgcttcctgcctgagaacttcagcctgcccctgtctgtggacctggagcgctactaccagacagaaaatgaagatgagagccccttcatctgcagccagccccgggagaatggcatgaggagctgccgctctgtgcccaccctgcggggagatggcggcggcggccccccctgtggcctggactatgaggcctacaacagcagcagcaacaccacctgtgtgaactggaaccagtactacaccaactgcagcgctggggagcacaaccccttcaagggggccatcaactttgacaacatcggctacgcctggatcgccatcttccaggtgatcaccctggagggctgggtggacatcatgtactttgtgatggatgcccacagcttctacaacttcatctacttcatcctgctgatcatcgtgggcagcttcttcatgatcaacctgtgcctggtggtgattgccacccagttcagcgagaccaagcagcgggagagccagctgatgagggagcagagggtgcgcttcctgagcaatgccagcaccctggccagcttcagcgagcccggcagctgctatgaggagctgctgaagtacctggtgtacatcctgaggaaggccgcccggcggctggcccaggtgtccagagctgctggggtgcgggtgggcctgctgagcagccctgcccccctgggcggccaggagacccagcccagcagcagctgcagccgcagccaccggcggctgtctgtgcaccacctggtgcaccaccaccaccaccaccaccaccactaccacctgggcaatggcaccctgcgggccccccgggccagccctgagatccaggacagagatgccaacggcagccggcggctgatgctgcccccacccagcaccccagccctgagcggggcccctcctggaggagctgagagcgtgcacagcttctaccacgccgactgccacctggagcctgtgcgctgccaggcccccccacccaggagccccagcgaggccagcggccgcacagtgggcagcggcaaggtgtaccccaccgtgcacaccagccccccacctgagaccctgaaggagaaggccctggtggaggtggccgccagcagcggcccccccaccctgaccagcctgaacatccccccaggcccctacagctccatgcacaagctgctggagacccagagcactggagcctgccagagcagctgcaagatcagcagcccctgcctgaaggctgacagcggggcctgtggccctgacagctgcccctactgtgcccgggccggggccggggaggtggagctggccgaccgggagatgccagacagcgacagcgaggccgtgtatgagttcacccaggatgcccagcacagcgacctgcgggacccccacagccggcggcagaggagcctgggcccagatgctgagcccagctctgtgctggccttctggaggctcatctgtgacaccttcaggaagatcgtggacagcaagtacttcggccggggcatcatgattgccatcctggtgaacaccctgtccatgggcatcgagtaccacgagcagcctgaggagctgaccaatgccctggagatcagcaacatcgtgttcaccagcctgtttgccctggagatgctgctgaagctgctggtgtatggccccttcggctacatcaagaacccctacaacatctttgatggagtcatcgtggtgatctctgtgtgggagatcgtgggccagcagggcggcggcctgtctgtgctgcggaccttccggctgatgagggtgctgaagctggtgcgcttcctgcctgccctgcagaggcagctggtggtgctgatgaagaccatggacaacgtggccaccttctgcatgctgctgatgctgttcatcttcatcttcagcatcctgggcatgcacctgtttggctgcaagtttgccagcgagagagatggagacaccctgcctgacaggaagaactttgacagcctgctgtgggccatcgtgacagtgttccagatcctgacccaggaggactggaacaaggtgctgtacaacggcatggccagcaccagctcctgggccgccctgtacttcatcgccctgatgaccttcggcaactacgtgctcttcaacctgctggtggccatcctggtggagggcttccaggccgaggagatcagcaagcgggaggatgccagcggccagctgagctgcatccagctgcctgtggacagccagggcggagatgccaacaagtctgagagcgagccagacttcttcagccccagcctggatggagatggagacaggaagaagtgcctggccctggtgtccctgggggagcaccctgagctgaggaagagcctgctgcccccactcatcatccacacagctgccacccccatgagcctgcccaagagcaccagcacaggcctgggggaggccctgggccctgccagcaggaggaccagcagcagcggcagcgctgagcctggagctgcccacgagatgaagagcccccccagcgcccggagcagcccccacagcccctggagcgctgccagctcctggaccagccgccgcagcagcaggaacagcctgggccgggcccccagcctgaagagaagaagccccagcggggagcggcgcagcctgctgtctggagagggccaggagagccaggatgaggaggagagcagcgaggaggagcgggccagccctgctggcagtgaccaccgccaccggggcagcctggagcgggaggccaagagcagctttgacctgcctgacaccctgcaggtgcccggcctgcacaggacagccagcggccggggcagcgccagcgagcaccaggactgcaatggcaagagcgccagcggccgcctggcccgggccctgcggccagatgatcctcccctggatggagatgatgctgatgatgagggcaacctgagcaagggggagcgggtgcgggcctggatccgggcccggctgcctgcctgctgcctggagcgggacagctggagcgcctacatcttccccccccagagccgcttccggctgctgtgccaccgcatcatcacccacaagatgtttgaccacgtggtgctggtgatcatcttcctgaactgcatcaccatcgccatggagcggcccaagattgacccccacagcgctgagcgcatcttcctgaccctgagcaactacatcttcaccgctgtgttcctggccgagatgacagtgaaggtggtggccctgggctggtgcttcggggagcaggcctacctgcggagctcctggaatgtgctggatggcctgctggtgctgatctctgtgattgacatcctggtgtccatggtgtctgattctggcaccaagatcctgggcatgctgcgggtgctgcggctgctgcggaccctgcggcccctgcgggtcatcagccgggcccagggcctgaagctggtggtggagaccctgatgagcagcctgaagcccatcggcaacatcgtggtgatctgctgtgccttcttcatcatcttcggcatcctgggcgtgcagctgttcaagggcaagttctttgtgtgccagggcgaggacaccaggaacatcaccaacaagagtgactgtgccgaggccagctaccgctgggtgcgccacaagtacaactttgacaacctgggccaggccctgatgagcctgtttgtgctggccagcaaggatggctgggtggacatcatgtatgatggcctggatgctgtgggcgtggaccagcagcccatcatgaaccacaacccctggatgctgctgtacttcatctccttcctgctgattgtggccttctttgtgctgaacatgtttgtgggcgtggtggtggagaacttccacaagtgccggcagcaccaggaggaggaggaggcccggcggcgggaggagaagaggctgcggcggctggagaagaagaggaggaaggcccagtgcaagccctactacagcgactacagccgcttccggctgctggtgcaccacctgtgcaccagccactacctggacctcttcatcaccggggtgattggcctgaatgtggtgaccatggccatggagcactaccagcagccccagatcctggatgaggccctgaagatctgcaactacatcttcaccgtcatctttgtgctggagagcgtcttcaagctggtggccttcggcttccgccgcttcttccaggaccgctggaaccagctggacctggccatcgtgctgctgagcatcatgggcatcaccctggaggagattgaggtgaatgccagcctgcccatcaaccccaccatcatccgcatcatgagggtgctgcgcatcgcccgggtgctgaagctgctgaagatggctgtgggcatgagggccctgctggacacagtgatgcaggccctgccccaggtgggcaacctgggcctgctcttcatgctgctcttcttcatctttgctgccctgggcgtggagctgtttggagacctggagtgtgatgagacccacccctgtgagggcctgggcagacatgccaccttcaggaactttggcatggccttcctgaccctcttccgggtgtccactggagacaactggaatggcatcatgaaggacaccctgcgggactgtgaccaggagagcacctgctacaacacagtcatcagccccatctactttgtgtcctttgtgctgacagcccagtttgtgctggtgaatgtggtgattgctgtgctgatgaagcacctggaggagagcaacaaggaggccaaggaggaggccgagctggaggccgagctggagctggagatgaagaccctgagcccccagccccacagccccctgggcagccccttcctgtggccaggagtggagggccctgacagcccagacagccccaagccaggggccctgcaccctgctgcccacgcccggagcgccagccacttcagcctggagcaccccacagaccggcagctgtttgacaccatcagcctgctgatccagggcagcctggagtgggagctgaagctgatggatgagctggccggccctgggggccagcccagcgccttccccagcgcccccagcctgggcggcagtgacccccagatgcagccccaccccacagagctgcccggccctgacctgctgactgtgaggaagagcggcgtgtccaggacccacagcctgcccaatgacagctacatgtgcagacatggcagcacagctgagggccccctgggccaccggggctggggcctgcccaaggcccagagcggctctgtgctgtctgtgcacagccagcctgctgacaccagctacatcctgcagctgcccaaggatgccccccacctgctgcagccccacagcgcccccacctggggcaccatccccaagctgcccccacctggccgcagccccctggcccagaggcccctgcggcggcaggccgccatcagaacagacagcctggatgtgcagggcctgggcagccgggaggacctgctggccgaggtgtctggccccagcccccccctggcccgggcctacagcttctggggccagagcagcacccaggcccagcagcacagccgcagccacagcaagatcagcaagcacatgaccccaccagccccctgccccggccctgagcccaactggggcaaaggacctcctgagaccaggagcagcctggagctggacacagagctgtcctggatcagcggggacctgctgcccccaggcggccaggaggagccccccagcccccgggacctgaagaagtgctacagcgtggaggcccagagctgccagaggcggcccacctcctggctggatgagcagaggaggcacagcattgctgtgtcctgcctggacagcggcagccagccccacctgggcacagaccccagcaacctgggcggccagcccctgggcggccctggcagccggcccaagaagaagctgagccccccatccatcaccatcgaccccccagagagccagggccccaggaccccacccagccctggcatctgcctgcggcggcgggcccccagcagtgacagcaaggaccccctggccagcggccccccagacagcatggccgccagccccagccccaagaaggatgtgctgagcctgagcggcctgagcagtgaccctgctgacctggacccctag

SEQ ID NO: 90259 - DNA, 5277 bp, Artificial Sequence
  derived and/or modified sequence
atggacgaggaggaggacggcgccggcgccgaggagagcggccagccaaggagcttcatgcgcctcaatgacctcagtggagccggggggcgccctggacccgggtcagccgagaaagacccaggatctgcggattcggaagccgaggggctgccatatcctgccctggcccccgtagtgttcttctacctctcccaggatagtagacctcggagttggtgcctccgaaccgtgtgcaacccttggttcgagcggattagcatgctagtgattttgcttaattgtgtaacgctggggatgttccggccctgcgaggatatcgcctgtgattctcaacgctgcagaatcttgcaggcttttgatgactttatatttgcgttctttgccgtcgagatggtggttaagatggtcgcgttgggaatattcggaaaaaagtgttacctcggcgacacgtggaataggctcgactttttcattgtgatcgccggaatgttagagtattctctagacttgcagaatgtgtctttctctgcagtgcgcacggtgagagtcctgagaccgctgcgggcgataaacagagtcccctctatgcgcatactggttaccctgctgctcgatactctacctatgctgggaaacgtcttactactgtgctttttcgttttcttcattttcggtattgtcggagtccagctgtgggctggcctcctgcggaaccgctgctttctccctgagaacttctcactgccgctgagcgtggacctcgagaggtattatcagacagagaacgaagatgagtccccgttcatctgttcccagcctagagagaacggaatgagatcctgccggagtgttcccacgctgcggggtgacggcggcgggggaccaccttgcgggctggattacgaagcgtataacagctctagtaatactacatgtgtcaactggaatcaatactacaccaattgcagcgcaggcgaacacaaccccttcaaaggggcgatcaacttcgataacataggttatgcttggatcgccattttccaggttatcacactcgaggggtgggttgacattatgtacttcgtgatggacgcccattctttctacaattttatctacttcattctgctgatcatcgtcggcagcttttttatgatcaatctctgtctcgtagtcatcgctacccaattctcggaaaccaagcagagggaatcgcaactgatgcgagagcagcgcgttcgcttcctgagcaatgcatctacactggctagtttttcagagcctggcagctgttacgaggagcttctaaagtacctcgtttatattctccgaaaggccgctaggcgattggctcaggtcagccgcgctgccggagttcgggtgggcttattatcaagcccagcccctctgggcgggcaagagacccaacccagcagttcatgctctcgttcccatcgcaggttgagtgtgcaccatctcgtgcatcaccatcaccatcatcatcaccactatcacctgggaaacgggacgctgcgagcccctagggcctcccctgaaattcaggatcgagacgccaacggcagtaggcggcttatgctgcctccaccaagtacgcctgcgctctcaggggcccctccaggaggagccgagagcgtgcattctttttatcatgcggactgccacttagagcctgtaaggtgtcaagcaccacccccccggtcacctagcgaagcctctgggcgcacagtgggctccgggaaagtataccctacggtccatacgtccccgcctccagagactctaaaggagaaggccctggttgaagtcgccgcttcttcagggccccctactctcacctctcttaatatcccccccggaccctacagctcaatgcataagcttctggagacacagtctacaggggcctgccagtcatcttgcaagatctccagcccctgcctcaaggcagacagtggggcatgcgggcctgatagctgtccgtactgcgcgagggccggcgccggggaggtggaattagccgaccgggagatgccagacagcgattcggaggcggtttatgaatttactcaagacgcccagcacagcgacctccgggatcctcattcaaggaggcagaggagtctcggccccgatgcagagccctcatccgtacttgccttctggaggctgatctgtgataccttccggaaaattgttgactctaagtatttcggaagaggaatcatgattgcaatactcgttaatacgctgagtatgggtatagaataccacgaacagccagaagaactaacaaatgcactcgaaatcagtaacatagtcttcacatccttgtttgctctggaaatgctgctgaagctgcttgtctacgggcctttcggatacattaagaacccatataatattttcgatggcgtaatcgtggtgatatctgtgtgggaaatcgtcgggcagcagggtggcgggctctccgtgttgcgaactttccgccttatgagagtcctgaagttagtgaggtttctgccggctctgcagcggcagctggtcgtacttatgaagaccatggacaacgtcgcgaccttctgcatgcttctgatgctgtttattttcatcttctccatcctggggatgcatctgtttggctgtaagttcgcctccgaacgtgatggggacacgctgcccgatcgaaaaaattttgactctcttttatgggctattgttacggtctttcagatcctgacacaggaagattggaacaaggtgctgtataacgggatggctagcacttcgtcttgggccgctctgtactttatcgccttaatgaccttcggcaactacgttctcttcaacctgttggttgcaatcctggttgaaggttttcaggccgaggagatcagtaagcgggaggatgcctcagggcaactgagctgtatacagctgccagttgattctcaaggaggcgacgccaacaaaagcgaaagcgagcctgatttcttctccccaagcttggacggcgacggagaccgtaagaaatgcctggcattggtgtcattgggcgaacatccagagcttaggaagagtctacttcccccgttgataatccacacagccgccaccccaatgtcactgcctaagtctacatcaacagggctgggggaggcactagggccggccagcagaagaaccagctcctcaggttctgccgagcctggtgccgcacacgaaatgaagagccccccctccgcccggagtagcccacatagtccatggtccgcagcctcttcctggacatcgcggcggagtagcagaaactcactcgggcgggccccctctttaaagcggcggtccccctctggagagcggaggtcactcttatcaggggaaggacaggagtctcaggatgaggaagagtcctctgaagaggagcgggcctctccagcaggaagtgaccacaggcaccggggctctctggagcgcgaagccaaatcctccttcgatctgccagatacattgcaagtacccgggttacaccggactgcctccggccggggctctgcctctgagcaccaggattgcaacgggaagagcgcaagcggccgactggcacgcgccctgcggcccgacgacccccccttagacggtgatgatgcggatgacgagggcaatctcagcaaaggagaaagggtgcgtgcctggataagggctcggctgcctgcctgctgcctggaaagggattcatggtctgcttatatttttcccccccaatcaaggttccggctgctttgccatagaattatcacccataagatgttcgaccacgtagtcctggttattatcttccttaactgcatcacaatcgctatggaaagacccaagattgacccgcactcggccgaaaggatcttcctaacactgagtaattatattttcactgcagtgttcctcgccgagatgactgtaaaagtggtggcactcgggtggtgttttggcgagcaggcctatctgcgctccagctggaatgtgctagacgggcttttggtgttgattagcgtgattgatattctcgtcagcatggttagtgattcaggcacaaagattctggggatgctgcgagtcctccgacttctcagaacactcaggcctctgagggtgatttcgagagcccagggcctgaaattggtggtggagactctcatgtcctctctcaaacctatagggaatatcgtggtaatctgctgcgctttcttcatcatttttggaattttgggagtccagttatttaagggcaagttttttgtgtgccagggagaagacacccgcaatattaccaataaatctgattgcgcagaagcatcttatcggtgggttcgccataagtataacttcgacaatctgggccaggcattgatgtcactgtttgtgctcgcttctaaagacgggtgggttgacatcatgtacgatggtctggatgccgtgggcgtggatcagcagccaatcatgaaccacaacccttggatgttgctctactttatctcctttctgctgatcgttgccttctttgtcctgaacatgttcgtgggggtggtagtggaaaattttcataaatgtcggcagcatcaggaggaagaagaagctcggcggagagaagagaagcgtttacgtcgactggaaaagaagaggcggaaggcccaatgtaagccgtattattctgactattctcgctttagacttctggtccaccacctgtgtacatcccactacctggatttgttcattaccggggttattggcctgaacgtggtgaccatggcaatggagcattatcagcagccacagatcttagacgaagccctgaagatctgtaactatatctttactgtgatattcgtcctcgagagcgttttcaaactcgttgccttcgggttccggaggttcttccaggatcgctggaatcagttagatctggcaatcgttctgctatcaatcatgggcattacactcgaagaaatcgaggtcaatgcctcgctgcctatcaatcccaccatcatccgcattatgcgcgttctcaggatagcaagggtcctgaagcttttaaagatggctgtgggcatgagggcactgctggacaccgtgatgcaggctctaccacagctatgggcatggtcaagcttggagacctggagcgttactcgacatactcctgtcagggcctgggcggtaatgcctccatttggtaccctggcatggccaagctag

SEQ ID NO: 90260 - DNA, 6945 bp, Artificial Sequence
  derived and/or modified sequence
atggacgaggaggaggacggcgccggcgccgaggagagcggccagcccagatcctttatgagactcaacgatctgtcgggtgccggagggcggcccggcccaggctctgcagagaaagatcccggatccgctgattcagaggcagaagggcttccttacccagccctcgcaccagtggtgttcttctacttgagccaggacagtaggcccaggtcctggtgtctccgcacagtctgcaacccctggttcgagcgcatctctatgcttgtgatcctgcttaactgtgtgacgctaggcatgtttagaccttgcgaggatattgcatgtgacagccagaggtgccgaatcctgcaggcattcgatgacttcatcttcgccttttttgccgtagagatggtcgttaagatggtggctttgggcatattcggaaagaaatgttatctcggtgacacctggaataggctggatttctttatagtgatagcagggatgcttgagtattccctcgatctgcagaacgtaagcttctccgccgtgcgaaccgtcagagtcctgcgaccactgcgcgcaatcaatcgggtgcctagcatgcgcatactagtcactcttctgctggacactttacccatgcttggcaacgtcctgctcctgtgtttttttgtattttttatctttggaatagtcggcgttcagctgtgggccggcctcctgaggaacaggtgtttcctgccagagaatttctctctccccttgtcagttgatctggagagatactatcagacagaaaacgaggacgagtctccctttatttgttcgcagccacgagagaacggtatgcgatcctgccgttccgtgcccactcttcggggtgacggagggggtggccccccctgtgggctggattacgaggcctataacagctcatccaatacaacttgtgtgaattggaaccaatactacaccaactgttccgctggtgaacacaatccgttcaaaggcgcgattaatttcgacaacatcgggtacgcttggattgcaatcttccaggttatcaccctcgaaggatgggttgatataatgtactttgtgatggacgcccactcgttttataatttcatctactttatcctcctgatcattgtggggagtttcttcatgataaacctgtgtctggtggtcatcgccacacaattcagcgagacaaagcagcgggaatcccagctcatgcgggaacagcgcgtgcgtttcctgagcaatgcaagtaccctggcatccttctccgagccggggtcctgctacgaagagcttttaaaatacctcgtttatatcttgagaaaagcagctcgacgtctggcacaggtgagccgtgccgccggtgtgcgggtgggcttgctgagcagtccggccccactgggaggccaggaaacccagcccagcagcagttgttccaggagccaccggcgcttgtccgtgcatcatctcgtgcatcatcaccatcatcaccatcatcactaccaccttggaaatgggaccctcagggcaccacgggcaagtcctgaaatccaagatcgcgacgccaatggatcacgcagattaatgttgcctccgccttccactcccgccttgagcggcgctccgccaggaggcgcggagtccgtgcactcgttctatcatgccgactgccaccttgaaccagtgaggtgtcaggccccaccccctcgcagcccctctgaggcgtccgggaggactgtcgggagtggtaaggtgtacccaactgttcacacttcaccccctcccgaaacgctgaaagagaaagctctcgtggaggtggctgcctcaagcggtccgcccacactaactagtttgaatatcccaccaggtccttatagtagtatgcacaagctgctggaaacccagtccaccggcgcctgtcagagctcctgtaaaatttcctctccgtgtcttaaagccgactcaggtgcgtgtggccctgactcctgcccatattgcgccagagctggggccggcgaggtggaattagctgacagagagatgcccgatagcgattcggaagctgtttacgagttcacccaggacgcccaacactcagatttaagggatcctcacagcaggagacagaggagtctgggtcctgatgcggaacctagttctgtgttggcgttctggagactgatctgcgatactttccgcaagatagtggattcaaaatatttcgggcgggggattatgattgctatcctggtaaacacattgtctatgggcattgagtaccacgagcaaccggaagaactgactaacgcactggagatctccaatatcgtcttcacgtcgttattcgcgctggagatgttattgaagctgctggtgtatggaccatttgggtatataaagaacccatacaatatcttcgatggcgtcatcgtcgtcatttctgtctgggaaatagtcgggcaacagggtggtggattaagcgtcctccgcaccttcagattgatgcgcgtattgaagttggtccggttcctacccgctctgcagcgccagctagtggttctaatgaagactatggataatgtcgcaacattctgcatgctgctaatgttgttcatcttcatatttagcatattgggaatgcacctgttcggctgcaaatttgcctctgaaagggacggcgataccctccccgatcggaaaaattttgactctcttctgtgggcaatagtgaccgtttttcagatactgacacaggaggattggaacaaggtgctctacaacggtatggcatcaaccagtagctgggcggccctgtacttcatcgcattgatgacattcgggaattacgttctgtttaacttgctggtggctattttggtagagggatttcaggcagaagaaatctcaaagagggaagacgcctctggacagctgagctgcatccagctcccagtggactcccaggggggcgacgcgaataagagcgagtccgagcccgattttttttcgccaagccttgatggagatggtgacagaaagaaatgcttggccctagtgtccctgggagagcaccccgaactgcgcaaatccctgcttccccccttgattatccacactgcagctacccctatgtccctgcccaaaagcacgtcaacaggtctaggggaggcccttgggcccgctagccgacggacaagtagtagtggctccgcagaacccggagctgcccacgagatgaagtcgcccccaagcgcacgctctagcccccacagcccatggagtgccgccagctcttggacgtcccgacgcagtagccgcaattcactcgggcgcgccccgagcctaaagaggaggagcccaagcggagagcgccgcagtctgctcagtggcgaggggcaagagtcccaagacgaagaggagagctccgaagaagagagagcttcccctgccgggagcgaccataggcaccgaggatctcttgagcgggaagccaagtcttccttcgatttgccagacactttgcaggtcccagggcttcacagaacagcctctggaaggggaagcgctagcgaacaccaagactgtaatggaaagtcagcatctggacgcctggctcgagccttgaggccagacgatcctcccctggacggagatgacgctgacgacgaaggcaatcttagcaaaggcgaacgtgtgagggcatggatcagagctcgcctaccagcgtgctgtttggagcgcgacagctggtccgcctatatctttccgccacagagtaggttccggctgctgtgccaccggattatcacacacaaaatgttcgaccatgtggtcttagtaattatttttctgaactgcataactattgccatggagcgacctaaaatcgacccccacagcgccgagcggatattcctgacactcagcaattatatttttaccgcggttttcctggctgaaatgacagtaaaggtggtggcactgggatggtgttttggagaacaggcctatctccggagtagttggaatgtcttagacgggttgctggtacttattagcgtaatcgacatactggtcagcatggtgagcgacagtggcacaaagatcctcggaatgttgcgcgtccttcgactcctgcggaccctgcgtcctcttagggtgatttcacgtgctcagggcctcaaattggttgtggaaacactcatgtcctctctaaagccaataggtaacatcgtagtcatctgctgtgccttctttatcatatttgggatactgggcgttcagctgttcaaaggcaagttcttcgtgtgtcaaggtgaagataccagaaatataaccaacaaaagcgattgtgccgaagcgtcataccgatgggtacggcacaagtataatttcgacaatctcgggcaggcgcttatgtctctgtttgtattggctagtaaggacggatgggtggatatcatgtacgacggacttgatgcagttggcgtggaccagcagcccattatgaaccacaatccatggatgctgctgtattttatttccttcctgttgattgttgcttttttcgtcctgaatatgttcgtcggcgtggtagttgaaaactttcacaagtgcagacagcatcaggaagaagaggaggcccgcagaagggaagagaagcggctgagacggttggagaaaaaaagaaggaaggcacaatgcaaaccctattacagcgattactctaggttcaggctactggtacatcacctgtgcactagccattatctggacctgttcattacaggagtcattggtctcaatgtagtgacaatggcgatggagcattatcaacagccccagatcctggacgaagctctgaagatatgcaactacatattcaccgttatctttgtattagagagtgtgtttaagctcgtcgcatttggtttccggaggtttttccaagatcggtggaatcagctcgacttggcgattgtccttctcagtatcatgggaatcacgttggaggaaatagaagtgaacgcctccctccccattaatccaacgatcattcggatcatgcgggtgttgcgcattgccagggtgttaaagctcctaaaaatggctgttggcatgagagccctgcttgatacggtgatgcaagctctgccccaggtgggtaaccttggactactgttcatgctcctcttttttatttttgccgcattgggagtggagcttttcggtgatctcgagtgcgatgaaactcatccctgtgagggtcttggacggcacgcgacgtttagaaattttggaatggcctttcttacacttttcagggtaagcaccggtgataactggaacggaattatgaaggatactctgcgcgactgcgaccaggaaagcacatgctataataccgtgataagtccaatttattttgtttccttcgttttgaccgcccagttcgtgctggtgaacgtcgtgattgctgtgttaatgaagcatttagaagaaagtaataaagaggctaaggaggaggccgagctggaggcagagctggaactagaaatgaaaacactttctccccaaccgcacagcccgctgggtagtcccttcttgtggccaggcgttgaggggcccgactcgcccgatagtcccaaacctggcgccctgcacccagccgcacatgcgcgatccgcaagccacttctctctggagcaccccactgatcggcagctctttgacacaatctccttgttgatccaggggtccctggagtgggaacttaagctgatggacgaactcgctggaccgggtgggcagcccagcgcctttccatccgccccctcattaggaggatcagacccccagatgcagcctcacccgacagaactgcctggccccgatctgctcaccgtcaggaagagtggagtgagtaggacccatagtctgcccaacgactcttatatgtgtcgccacggcagcaccgccgaaggcccacttgggcatcggggttggggcttaccaaaagcacagtccgggtccgtactgtcggtccattcccagcccgccgacacttcttacattctccagctgccaaaggacgcgcctcacctgcttcaaccccatagcgcccctacgtggggcacaatccctaagctacctccccccggccgaagcccactggcccaacggccgttgcgcaggcaggccgcaatccgcacagattcactggatgtccaaggcctcggaagtagggaagatctattagccgaggtcagcggcccttccccgcctttggcccgagcatactctttttggggccagtcttccactcaggcccaacagcattcacggtcacattccaaaattagtaagcatatgacccctcctgccccttgtcccggacccgaaccgaactgggggaaggggcctcctgaaaccaggtcaagccttgagcttgacacggagctgtcctggatatcaggggacctgctacccccaggaggacaggaagagcctcctagtcctcgcgaccttaagaaatgctattcagtggaggcgcagtcctgtcagcggcggcccacctcttggctagacgagcagcggaggcatagcatagctgtcagctgcctggatagtggcagccaaccacaccttggtaccgatccttccaacctcggaggtcagcctttaggcggacctggatccagacccaagaagaagctttctcccccttccattacaatagatcctccagagtcccagggaccacgcacccctccatccccagggatatgccttaggcggagggcccctagttctgattccaaagaccctctggctagcggaccacccgactcaatggccgccagtccttcccctaaaaaggacgtgctgtcactcagtggcctctctagcgatccggccgacttggacccctag

SEQ ID NO: 90261 - DNA, 5276 bp, Artificial Sequence
  derived and/or modified sequence
atggacgaggaggaggacggggctggggcagaagagagcgggcagcctcggtccttcatgcgacttaatgatcttagcggggctggtggaagacctggccctgggagtgcggagaaagacccaggatcagctgactctgaggcagagggcttaccttacccagcgctggcacctgttgtgtttttttatctgagccaggattcgaggcctcgcagttggtgcctgcggaccgtttgcaacccctggtttgaaaggatcagcatgctggtgatactgttaaattgtgttaccttaggaatgttcagaccatgcgaggacattgcctgtgactcccaacgttgccgcattttgcaggctttcgatgactttatttttgctttctttgcggtcgagatggtggtgaagatggtcgcactcggcatcttcggaaagaagtgctacttaggagacacgtggaataggttggatttcttcatcgttattgctgggatgctggagtatagtcttgacctacaaaacgtatccttctcagccgtccgtaccgtcagagtgctgagaccactgagagctattaatagggtaccgagtatgcgaattctggttacccttctattggatactttgccaatgctcggcaacgtcttactcctctgcttttttgtcttcttcatctttggaattgtgggggtgcagctctgggcgggattgttacgcaataggtgttttctccctgagaactttagccttcctctgtcagtagatctggagcgatattaccagaccgaaaatgaagacgaatccccatttatttgttctcagcctagagagaacgggatgcggagttgcaggagcgtgccaaccctccgcggagatggcggaggtgggccaccatgcgggctggactacgaagcctacaatagttcctctaacaccacctgcgtgaattggaaccagtactataccaactgtagcgcaggcgagcataacccctttaaaggagcgataaactttgataacataggctacgcttggattgccatttttcaggtaattaccttagaagggtgggtggacattatgtatttcgtgatggatgcccatagcttctacaatttcatctactttattctgctgattatcgtgggaagcttctttatgataaatttgtgccttgtggtcatcgccacacagttttccgagacaaaacaaagagagtctcaactcatgagagaacagcgggtaagattcctgagtaatgcatccacgctggccagcttttccgaaccgggttcatgctatgaagaactgttgaaatatctggtgtacattctcagaaaagctgcccgaaggttggctcaggttagtcgagccgcaggcgttagagtgggtctcttatcctccccagctcccctcggtggtcaagagacccaaccgtcctcaagctgttcgaggtcacacagacgcctttccgtgcaccatctggttcatcatcaccatcatcaccaccatcattatcacctcggcaatggtaccctgagagctccaagggcgtctccagaaattcaggatcgcgacgcaaacggctccaggcggctgatgctcccaccaccgtccacaccagcgctctcaggcgctccacctggtggagctgagtccgtacactctttctaccacgccgactgtcatttggagcccgtgcgctgtcaggctccgccacccagatccccctccgaagcgagtgggcgtaccgttgggagcggcaaggtttatcctaccgtgcacacctctccacctcccgagacactcaaggagaaggcacttgttgaggtcgctgcatcttccggcccaccaaccctgacctccctgaacattcctcctggtccttatagcagcatgcacaagttgctggaaacccagagcactggggcatgtcagagctcctgtaaaatcagctctccttgcctgaaagccgattctggcgcatgcgggcctgatagctgcccatactgtgcgcgtgccggtgccggtgaggttgaactggcggatcgtgagatgccagattcagacagcgaggcagtgtatgaattcactcaggacgcacaacactcagacttgagggatccgcactcgagaaggcaacgttcattgggacctgacgccgaaccatcttccgttctggctttttggcgactgatttgtgacacctttaggaaaattgtggattctaagtatttcgggaggggaattatgattgccatactcgtgaacaccttatcaatgggaatcgaataccatgagcaacccgaagagctaaccaacgcactcgagatcagcaacatagtattcacatcgctatttgccctcgagatgcttcttaaacttctcgtttatggtccattcggctacatcaaaaatccatacaacatctttgatggagtcatagtagtgatttccgtttgggaaattgtggggcagcaaggcggagggctcagtgtgctgagaacctttcggctgatgagagtgctcaagcttgtgcgctttctaccagcccttcagcggcagctggtggtcctgatgaagaccatggacaacgtagccaccttttgcatgctcctgatgctgttcatcttcatattttctatcctcggtatgcacctgttcggctgtaagttcgcttcagagagggatggagacacactccctgatcgcaagaacttcgatagccttctgtgggcaattgtgacggtcttccagattctgacacaagaggactggaacaaggtgctgtataacgggatggcctcaacttcctcatgggctgctctgtacttcattgcccttatgacatttggcaattacgtgctttttaacctcctggtggccatccttgtcgagggcttccaggccgaggagatttcaaagagagaggatgccagcgggcagttatcatgtatccagctgccagtggactctcagggcggagatgccaacaagagtgagtccgaaccggacttcttctctccaagtctggacggtgatggagatcgaaaaaagtgcctggctctggtcagtctgggggagcatccagagctgcgcaaatccttgcttccccctctgattattcacaccgcagccacaccaatgtctcttcctaagagcaccagtacaggccttggggaggcactgggtcctgcgtcgcggagaacctcttcatccggctccgccgagccaggtgcagcacacgaaatgaagtctcctcccagcgcacgtagttctccccattccccgtggtccgcggcatcttcttggacgtcccgtcgctcttccagaaacagcttggggagagccccaagcttgaagcggcgatcaccctctggagagcgacgcagcctgctgagcggcgaaggccaagagtctcaggacgaagaggagagcagcgaggaggagcgtgcgtcccctgcaggtagtgaccaccggcaccggggtagtctggaaagggaagctaagagctccttcgacctaccagacacactgcaagtgcccggactgcataggaccgcaagcggtcgcggaagcgccagcgaacaccaggactgcaacgggaaatcagcttcaggtcggctggctcgcgcacttcgacctgatgatccaccactggacggggacgatgcagatgacgaaggaaatctgtctaagggagagcgcgtacgggcttggattagagccagactacctgcttgttgtctggagagagacagctggagtgcctatatcttcccccctcagtctcggttccgcctgttgtgccaccggatcattactcacaaaatgttcgaccacgtggtcctggttatcatattcttgaattgtatcacaatcgcaatggagcggccaaaaattgatccccattcagcggagagaatctttctgaccctttccaactacatcttcaccgccgtctttctagccgagatgactgtcaaggtggttgccctgggctggtgttttggcgagcaggcctacctgaggtcttcctggaatgtcctggacgggcttctagtacttattagcgtaatagacatcttggtctccatggtgtcagattcgggtactaaaatactcggaatgttgcgggtgctccgcttactgcgaactcttcgccctctccgggtaattagccgggctcaagggctaaagctcgtggtggagacccttatgtcatccttaaagcctataggaaatatcgtggttatatgctgcgctttctttatcattttcggaattctgggggtgcagctgtttaagggcaaattctttgtgtgccaaggcgaggacactaggaatattactaacaaatccgattgcgccgaagcatcatacaggtgggtacggcataagtataactttgataatttaggacaagcattaatgtctctcttcgtactggcgagtaaggatggatgggtcgatattatgtacgacggccttgacgccgtaggcgttgaccagcagcccattatgaaccacaatccctggatgctgctgtatttcatctctttcctactgattgtcgccttctttgtgcttaacatgttcgtgggagtagtggtggaaaatttccacaaatgtagacagcaccaggaggaagaggaagcgaggcgacgagaagagaagcgtcttagaagattggagaaaaagagaaggaaggctcagtgcaagccatattattcagactactctcgttttcgcttacttgtgcaccacctgtgtacaagccattaccttgacctgttcattaccggcgttataggcctcaatgttgttactatggccatggagcattatcagcagccccagatccttgacgaggctctcaagatttgcaattacattttcacagttatattcgtgttggagtctgtgttcaagcttgtggcgttcggcttccgaagatttttccaagatagatggaatcagctggaccttgccattgttctgctgagtattatggggattactctggaggagatcgaggtaaatgccagtttgccgattaatccgacgatcatccgtatcatgcgcgtgttacgtattgcgcgagtcttgaagctgctgaagatggcagtcgggatgagggccctgctagacaccgtgatgcaagctttgccacagctgtgggcctggagctccctcgaaacttggtctgtcacccggcacaccccagttcgagcatgggcagtaatgcctcccttcggaacattagcatggccttcata

SEQ ID NO: 90262 - DNA, 6944 bp, Artificial Sequence
  derived and/or modified sequence
atggatgaagaggaggacggagctggggctgaagagtctggccagccgaggagcttcatgaggctaaatgatctgagcggcgctggtggcaggcctggaccagggagcgccgagaaagaccctggcagtgccgattcggaagctgagggcttaccttaccccgctctcgcaccagttgtgtttttttacttgagccaagattccagaccgagatcctggtgtcttcggacagtctgcaatccctggttcgagcggataagtatgctcgtcatcctccttaactgcgttacgcttggcatgttcaggccttgcgaggatattgcatgtgattcacaaaggtgccgcattctgcaagcatttgacgattttatctttgctttttttgcggtggaaatggtggtgaaaatggttgccctgggcattttcggaaaaaagtgctatctaggggatacctggaacaggctggacttttttatcgtgatcgccggaatgctggaatattcactggacctgcaaaatgtcagcttttcagcagtccgcaccgttcgggtgctccgtccactgcgtgccattaatcgtgtcccatcaatgcgcattcttgtcacgctacttctcgacactcttcccatgttggggaatgtcctgctgctttgcttcttcgtattcttcatcttcggcatcgtcggagtgcaactatgggcagggttactgcggaatcgttgttttctccctgaaaatttctccctgcctctcagcgtcgacctcgagcgctattatcagaccgagaatgaagacgaatctccgttcatctgctcacagccacgcgaaaatggcatgcgaagctgcagatccgtgccaaccttacgcggtgacggtggcggtggtccaccctgtggcctcgattatgaggcctacaattcatcttcaaacacaacctgtgtgaactggaaccagtactacactaactgctcagccggagagcataaccccttcaaaggagcgatcaactttgataacattggatatgcgtggattgccatttttcaagtgatcacactggaaggttgggtcgatatcatgtacttcgtaatggacgcccatagtttctacaactttatatattttattcttctgatcatcgtaggcagctttttcatgataaacctatgcctggtggtcattgccacccagtttagtgagacaaaacaacgagaaagccaactcatgagggagcagcgagtccgtttcttgtctaatgcgagcactctcgccagcttctccgagccagggtcttgctacgaagagctgctcaagtacctggtctatattctcagaaaagcagctagacgactggcacaagtttcacgtgctgcaggtgtgcgtgttggtttgttatcatctccagctcccctcggtggacaggaaacacagccgagctcttcatgttcacggtcacatcggagattgtctgtacaccacctagtgcaccatcaccaccaccaccaccaccattatcacctagggaatggaacgttgcgggcacctagagcctcccctgaaatacaagaccgggacgctaatggcagccgacgcctaatgctgcctccacctagcacacctgccctgtctggagcccctccgggaggcgctgaatcagtgcattctttttaccatgccgactgtcacttagagccagttcgatgtcaggcaccgccaccgcgtagcccgagcgaagcctcaggtagaaccgtgggttctggaaaggtctaccccactgtccatactagccccccaccagagaccttgaaagaaaaggccctggttgaggtagctgcctcctctggacctcccactctcactagcttgaacatacctcccggtccctatagctcaatgcacaagcttttagaaacccagagtaccggagcctgccagagtagttgcaagataagcagtccttgcctcaaggcagattcgggcgcatgcggccctgactcttgcccatactgcgcacgcgcaggagcaggagaagttgagctggcagatagggaaatgcctgatagtgatagtgaagccgtttatgagtttacccaggatgctcaacattccgatctgcgtgaccctcactccaggaggcagaggagcctcggccctgacgccgagcctagtagtgtgctggcgttctggaggcttatttgtgataccttcaggaagattgtggattccaagtattttggtcgtggcatcatgatcgctattctggtaaacaccctatctatggggattgagtatcacgaacagccagaagagctgacaaatgcactagaaattagcaatatcgtctttacgagcctcttcgcgctagagatgctgctgaaactgcttgtatacggcccttttggctacattaaaaacccttataacatattcgacggcgtcatcgtcgtgatctccgtttgggagatagtcgggcagcagggagggggtctcagtgtgctccgaacatttcgcctaatgagggtgctgaaactggtgcggtttctgccagctttacagaggcagttagtcgttctgatgaagacgatggacaacgtggccacattttgtatgctactgatgttgtttattttcatcttctccattctgggaatgcatttattcgggtgcaagtttgcctctgagcgagatggagacacattgcccgatcgtaagaattttgactctcttctgtgggctattgttactgtgttccagattctcacacaagaagactggaacaaggtactctataacggcatggccagtacctcttcttgggccgctctttatttcatcgcccttatgactttcgggaactacgtcctttttaatctcttagtggctattctcgtggagggattccaggcagaggaaatatctaaacgcgaggatgcttctgggcaattatcctgtattcagctccccgtagattcccaaggcggagacgctaacaagtccgaaagtgagcctgattttttcagtccatctctcgatggcgatggtgacagaaagaaatgcctcgcccttgttagcttgggcgaacaccctgagctccggaagagtttgttgcctcccctcatcatacatactgcagcgacgcctatgtctctaccgaagagtacaagtacaggtcttggtgaggccctaggtcctgcttcacgccgtactagctcgagcggatctgctgagcccggagcagctcacgaaatgaagtctcccccatctgcacgatcgtccccacactccccatggagtgctgcttcctcatggactagcagacgctcctcgcgcaattcacttgggcgagctccaagcctgaaaaggaggtccccaagtggagagaggaggagtctgctgtctggggagggtcaggagtcccaggacgaggaagaatcttccgaagaggaacgagcctctcctgccggttccgaccacaggcacaggggctctctggaaagggaggccaaaagtagtttcgacttacccgatactttgcaggtccccggactgcatagaacagcttccgggcgtggaagcgcctcggagcatcaagattgtaacggcaagtctgcctctggcagactcgcacgcgcactcaggcccgatgaccctccactggacggagatgatgctgacgacgagggcaatctatcgaaaggtgagagagtcagagcctggatccgtgcacgattaccagcctgctgcctcgagagagattcctggtcagcttacatctttccacctcagtcaagattcaggcttctgtgccacaggatcattacccataaaatgtttgatcacgtggttttggttatcatcttcttaaactgcattactatagctatggagcgccctaagatcgatcctcacagtgctgagcgaatatttctcacattatcaaactatatctttactgccgtgttcctggcggaaatgaccgtcaaggttgttgccctcggctggtgtttcggtgaacaagcctaccttcgctcttcatggaatgtgttggacggcttgcttgtgctgatctcggtgattgacatcttggtcagcatggtcagcgactctggcaccaagattctgggaatgcttagggtcctaagactgctgagaacactgaggccgctgagggtcatttcacgagcacaaggcctaaaattggtggtagagacgctcatgagtagtctgaagcccattggtaatatagtcgtgatctgttgcgccttcttcatcatttttggcatcctgggagtgcagcttttcaaaggcaagttcttcgtctgtcaaggcgaagatacgagaaacattaccaacaaatccgactgtgctgaagcatcctaccggtgggtgagacacaaatacaactttgataatttgggccaagcactgatgtcactttttgtgctcgcatccaaagacggctgggtggacattatgtatgatggtctggatgccgttggggtggatcagcagcccattatgaatcataacccttggatgttgctttacttcatttccttcctgctgatagtggcattttttgtgctgaatatgttcgtgggcgtggtagttgagaatttccacaagtgcagacagcatcaggaagaggaggaagccaggagacgcgaggagaaaaggctaagaaggctggagaagaaaaggagaaaggcacagtgtaaaccttattactcggactatagccggtttcgactcctggtacatcacctatgcacctcccactatctagacttgttcatcactggagtgattggcttgaacgtcgtaactatggccatggagcattaccagcagcctcagatcttggatgaggctctaaagatctgcaactacatctttacagtcatctttgtgttagaaagcgtgttcaaattggtagcattcggcttccgaaggttctttcaggatcgctggaatcaactggacctggccatcgtacttctctcaattatggggattaccctcgaggagatcgaagtcaacgcttctttaccaattaatcctaccatcatcagaattatgcgtgttctgcgcatagccagggtcctaaaactcttgaagatggctgttgggatgagagccttgctggatacggtgatgcaggccttacctcaggtgggcaacttaggtctcctgttcatgttgctgttttttattttcgctgcccttggagttgagctgttcggcgacctggaatgtgatgagacccacccatgcgagggacttggtcggcacgctacatttcgaaactttggcatggcctttctcaccttgttccgggtgagcacaggcgacaactggaatggcatcatgaaggacacactcagagattgcgaccaggagtcaacatgctacaacacagtgatcagtccaatttactttgttagttttgtcctcaccgcgcagtttgtcctggtgaacgttgttatagccgttcttatgaagcacctggaggaaagcaataaagaagctaaggaagaggccgaactcgaggccgagctggagttagagatgaagacactgagtccacaacctcattcacctctagggagtccctttctgtggcccggagttgaagggcctgacagtccagattcacccaaacccggtgccctccatcctgctgcccacgcacgatcagccagtcactttagtttagaacatcctaccgaccgtcagctgttcgacacgatttcccttctgattcaaggatcccttgaatgggagctcaagctgatggacgagcttgccggtcccggtgggcagccaagcgcctttcccagcgcaccctcattgggcggttcagatccccagatgcagccacacccgacagaactgccgggacctgaccttctcaccgtgcgaaagtcaggcgtgagtcgcacccatagtctgcccaacgatagctatatgtgccggcacgggagtactgccgaagggccactcggacatcggggatggggccttccaaaagctcagtctggtagcgtgctctccgttcatagccagccagccgatacttcctacatcttgcaactgcctaaagatgctccgcatttgctgcagccccacagtgcaccaacctggggaacgatccctaagctccctcctccgggaaggtcccctctcgcacaaaggcccctcaggcggcaggcggcaatccgaacagacagccttgacgtccaaggattgggctcacgggaggatctacttgccgaagtgagtggaccctctcctcctctggctcgggcatacagcttctggggtcaatcctccactcaggcgcagcaacacagtagaagtcactccaaaattagcaagcacatgactccccctgcaccatgccctggccctgagccgaattggggaaagggtccacctgagacccggtcttccctggaattggataccgagctcagttggatttccggggatttattgcctccaggcggtcaggaggagccaccctccccacgagacctgaaaaaatgctattccgtggaagcacaatcctgccagcggcgtcctacttcctggctcgacgaacagaggaggcactccatcgctgtctcctgcctggattccggttcccagccacacctggggactgacccatccaatctcgggggacaacccttggggggtccgggttctagaccgaagaagaagctttccccaccctctattaccatcgaccccccagaatcccaaggtcctaggactcctcccagtcctggtatctgtcttcgcagacgggctccttctagcgactcaaaagaccctctggccagcggcccaccagactctatggctgcaagtccttcccccaaaaaagacgtgctcagtctctcgggccttagcagcgaccccgctgacctggatccgta

SEQ ID NO: 90263 - DNA, 6767 bp, Artificial Sequence
  derived and/or modified sequence
atggacgaggaggaggatggagcgggcgccgaggagtcgggacagccccggagcttcatgcggctcaacgacctgtcgggggccgggggccggccggggccggggtcagcagaaaaggacccgggcagcgcggactccgaggcggaggggctgccgtacccggcgctggccccggtggttttcttctacttgagccaggacagccgcccgcggagctggtgtctccgcacggtctgtaacccctggtttgagcgcatcagcatgttggtcatccttctcaactgcgtgaccctgggcatgttccggccatgcgaggacatcgcctgtgactcccagcgctgccggatcctgcaggcctttgatgacttcatctttgccttctttgccgtggagatggtggtgaagatggtggccttgggcatctttgggaaaaagtgttacctgggagacacttggaaccggcttgactttttcatcgtcatcgcagggatgctggagtactcgctggacctgcagaacgtcagcttctcagctgtcaggacagtccgtgtgctgcgaccgctcagggccattaaccgggtgcccagcatgcgcatccttgtcacgttgctgctggatacgctgcccatgctgggcaacgtcctgctgctctgcttcttcgtcttcttcatcttcggcatcgtcggcgtccagctgtgggcagggctgcttcggaaccgatgcttcctacctgagaatttcagcctccccctgagcgtggacctggagcgctattaccagacagagaacgaggatgagagccccttcatctgctcccagccacgcgagaacggcatgcggtcctgcagaagcgtgcccacgctgcgcggggacgggggcggtggcccaccttgcggtctggactatgaggcctacaacagctccagcaacaccacctgtgtcaactggaaccagtactacaccaactgctcagcgggggagcacaaccccttcaagggcgccatcaactttgacaacattggctatgcctggatcgccatcttccaggtcatcacgctggagggctgggtcgacatcatgtactttgtgatggatgctcattccttctacaatttcatctacttcatcctcctcatcatcgtgggctccttcttcatgatcaacctgtgcctggtggtgattgccacgcagttctcagagaccaagcagcgggaaagccagctgatgcgggagcagcgtgtgcggttcctgtccaacgccagcaccctggctagcttctctgagcccggcagctgctatgaggagctgctcaagtacctggtgtacatccttcgtaaggcagcccgcaggctggctcaggtctctcgggcagcaggtgtgcgggttgggctgctcagcagcccagcacccctcgggggccaggagacccagcccagcagcagctgctctcgctcccaccgccgcctatccgtccaccacctggtgcaccaccaccaccaccatcaccaccactaccacctgggcaatgggacgctcagggccccccgggccagcccggagatccaggacagggatgccaatgggtcccgccggctcatgctgccaccaccctcgacgcctgccctctccggggccccccctggtggcgcagagtctgtgcacagcttctaccatgccgactgccacttagagccagtccgctgccaggcgccccctcccaggtccccatctgaggcatccggcaggactgtgggcagcgggaaggtgtatcccaccgtgcacaccagccctccaccggagacgctgaaggagaaggcactagtagaggtggctgccagctctgggcccccaaccctcaccagcctcaacatcccacccgggccctacagctccatgcacaagctgctggagacacagagtacaggtgcctgccaaagctcttgcaagatctccagcccttgcttgaaagcagacagtggagcctgtggtccagacagctgcccctactgtgcccgggccggggcaggggaggtggagctcgccgaccgtgaaatgcctgactcagacagcgaggcagtttatgagttcacacaggatgcccagcacagcgacctccgggacccccacagccggcggcaacggagcctgggcccagatgcagagcccagctctgtgctggccttctggaggctaatctgtgacaccttccgaaagattgtggacagcaagtactttggccggggaatcatgatcgccatcctggtcaacacactcagcatgggcatcgaataccacgagcagcccgaggagcttaccaacgccctagaaatcagcaacatcgtcttcaccagcctctttgccctggagatgctgctgaagctgcttgtgtatggtccctttggctacatcaagaatccctacaacatcttcgatggtgtcattgtggtcatcagcgtgtgggagatcgtgggccagcaggggggcggcctgtcggtgctgcggaccttccgcctgatgcgtgtgctgaagctggtgcgcttcctgccggcgctgcagcggcagctggtggtgctcatgaagaccatggacaacgtggccaccttctgcatgctgcttatgctcttcatcttcatcttcagcatcctgggcatgcatctcttcggctgcaagtttgcctctgagcgggatggggacaccctgccagaccggaagaattttgactccttgctctgggccatcgtcactgtctttcagatcctgacccaggaggactggaacaaagtcctctacaatggtatggcctccacgtcgtcctgggcggccctttatttcattgccctcatgaccttcggcaactacgtgctcttcaatttgctggtcgccattctggtggagggcttccaggcggaggaaatcagcaaacgggaagatgcgagtggacagttaagctgtattcagctgcctgtcgactcccaggggggagatgccaacaagtccgaatcagagcccgatttcttctcacccagcctggatggtgatggggacaggaagaagtgcttggccttggtgtccctgggagagcacccggagctgcggaagagcctgctgccgcctctcatcatccacacggccgccacacccatgtcgctgcccaagagcaccagcacgggcctgggcgaggcgctgggccctgcgtcgcgccgcaccagcagcagcgggtcggcagagcctggggcggcccacgagatgaagtcaccgcccagcgcccgcagctctccgcacagcccctggagcgctgcaagcagctggaccagcaggcgctccagccggaacagcctcggccgtgcacccagcctgaagcggagaagcccaagtggagagcggcggtccctgttgtcgggagaaggccaggagagccaggatgaagaggagagctcagaagaggagcgggccagccctgcgggcagtgaccatcgccacagggggtccctggagcgggaggccaagagttcctttgacctgccagacacactgcaggtgccagggctgcatcgcactgccagtggccgagggtctgcttctgagcaccaggactgcaatggcaagtcggcttcagggcgcctggcccgggccctgcggcctgatgaccccccactggatggggatgacgccgatgacgagggcaacctgagcaaaggggaacgggtccgcgcgtggatccgagcccgactccctgcctgctgcctcgagcgagactcctggtcagcctacatcttccctcctcagtccaggttccgcctcctgtgtcaccggatcatcacccacaagatgttcgaccacgtggtccttgtcatcatcttccttaactgcatcaccatcgccatggagcgccccaaaattgacccccacagcgctgaacgcatcttcctgaccctctccaattacatcttcaccgcagtctttctggctgaaatgacagtgaaggtggtggcactgggctggtgcttcggggagcaggcgtacctgcggagcagttggaacgtgctggacgggctgttggtgctcatctccgtcatcgacattctggtgtccatggtctctgacagcggcaccaagatcctgggcatgctgagggtgctgcggctgctgcggaccctgcgcccgctcagggtgatcagccgggcgcaggggctgaagctggtggtggagacgctgatgtcctcactgaaacccatcggcaacattgtagtcatctgctgtgccttcttcatcattttcggcatcttgggggtgcagctcttcaaagggaagtttttcgtgtgccagggcgaggataccaggaacatcaccaataaatcggactgtgccgaggccagttaccggtgggtccggcacaagtacaactttgacaaccttggccaggccctgatgtccctgttcgttttggcctccaaggatggttgggtggacatcatgtacgatgggctggatgctgtgggcgtggaccagcagcccatcatgaaccacaacccctggatgctgctgtacttcatctcgttcctgctcattgtggccttctttgtcctgaacatgtttgtgggtgtggtggtggagaacttccacaagtgtcggcagcaccaggaggaagaggaggcccggcggcgggaggagaagcgcctacgaagactggagaaaaagagaaggaaagcccagtgcaaaccttactactccgactactcccgcttccggctcctcgtccaccacttgtgcaccagccactacctggacctcttcatcacaggtgtcatcgggctgaacgtggtcaccatggccatggagcactaccagcagccccagattctggatgaggctctgaagatctgcaactacatcttcactgtcatctttgtcttggagtcagttttcaaacttgtggcctttggtttccgtcggttcttccaggacaggtggaaccagctggacctggccattgtgctgctgtccatcatgggcatcacgctggaggaaatcgaggtcaacgcctcgctgcccatcaaccccaccatcatccgcatcatgagggtgctgcgcattgcccgagtgctgaagctgctgaagatggctgtgggcatgcgggcgctgctggacacggtgatgcaggccctgccccagctctgggcgtggagctctttggagacctggagtgtgacgagacacacccctgtgagggcctgggccgtcatgccacctttcggaactttggcatggccttcctaaccctcttccgagtctccacaggtgacaattggaatggcattatgaaggacaccctccgggactgtgaccaggagtccacctgctacaacacggtcatctcgcctatctactttgtgtccttcgtgctgacggcccagttcgtgctagtcaacgtggtgatcgccgtgctgatgaagcacctggaggagagcaacaaggaggccaaggaggaggccgagctagaggctgagctggagctggagatgaagaccctcagcccccagccccactcgccactgggcagccccttcctctggcctggggtcgagggccccgacagccccgacagccccaagcctggggctctgcacccagcggcccacgcgagatcagcctcccacttttccctggagcaccccacgatgcagccccaccccacggagctgccaggaccagacttactgactgtgcggaagtctggggtcagccgaacgcactctctgcccaatgacagctacatgtgtcggcatgggagcactgccgaggggcccctgggacacaggggctgggggctccccaaagctcagtcaggctccgtcttgtccgttcactcccagccagcagataccagctacatcctgcagcttcccaaagatgcacctcatctgctccagccccacagcgccccaacctggggcaccatccccaaactgcccccaccaggacgctcccctttggctcagaggccactcaggcgccaggcagcaataaggactgactccttggacgttcagggtctgggcagccgggaagacctgctggcagaggtgagtgggccctccccgcccctggcccgggcctactctttctggggccagtcaagtacccaggcacagcagcactcccgcagccacagcaagatctccaagcacatgaccccgccagccccttgcccaggcccagaacccaactggggcaagggccctccagagaccagaagcagcttagagttggacacggagctgagctggatttcaggagacctcctgccccctggcggccaggaggagcccccatccccacgggacctgaagaagtgctacagcgtggaggcccagagctgccagcgccggcctacgtcctggctggatgagcagaggagacactctatcgccgtcagctgcctggacagcggctcccaaccccacctgggcacagacccctctaaccttgggggccagcctcttggggggcctgggagccggcccaagaaaaaactcagcccgcctagtatcaccatagacccccccgagagccaaggtcctcggaccccgcccagccctggtatctgcctccggaggagggctccgtccagcgactccaaggatcccttggcctctggcccccctgacagcatggctgcctcgccctccccaaagaaagatgtgctgagtctctccggtttatcctctgacccagcagacctggacccctgagtcctgccccacttt

SEQ ID NO: 90264 - DNA, 6960 bp, Artificial Sequence
  derived and/or modified sequence
atggacgaggaggaggatggagcgggcgccgaggagtcgggacagccccggagcttcatgcggctcaacgacctgtcgggggccgggggccggccggggccggggtcagcagaaaaggacccgggcagcgcggactccgaggcggaggggctgccgtacccggcgctggccccggtggttttcttctacttgagccaggacagccgcccgcggagctggtgtctccgcacggtctgtaacccctggtttgagcgcatcagcatgttggtcatccttctcaactgcgtgaccctgggcatgttccggccatgcgaggacatcgcctgtgactcccagcgctgccggatcctgcaggcctttgatgacttcatctttgccttctttgccgtggagatggtggtgaagatggtggccttgggcatctttgggaaaaagtgttacctgggagacacttggaaccggcttgactttttcatcgtcatcgcagggatgctggagtactcgctggacctgcagaacgtcagcttctcagctgtcaggacagtccgtgtgctgcgaccgctcagggccattaaccgggtgcccagcatgcgcatccttgtcacgttgctgctggatacgctgcccatgctgggcaacgtcctgctgctctgcttcttcgtcttcttcatcttcggcatcgtcggcgtccagctgtgggcagggctgcttcggaaccgatgcttcctacctgagaatttcagcctccccctgagcgtggacctggagcgctattaccagacagagaacgaggatgagagccccttcatctgctcccagccacgcgagaacggcatgcggtcctgcagaagcgtgcccacgctgcgcggggacgggggcggtggcccaccttgcggtctggactatgaggcctacaacagctccagcaacaccacctgtgtcaactggaaccagtactacaccaactgctcagcgggggagcacaaccccttcaagggcgccatcaactttgacaacattggctatgcctggatcgccatcttccaggtcatcacgctggagggctgggtcgacatcatgtactttgtgatggatgctcattccttctacaatttcatctacttcatcctcctcatcatcgtgggctccttcttcatgatcaacctgtgcctggtggtgattgccacgcagttctcagagaccaagcagcgggaaagccagctgatgcgggagcagcgtgtgcggttcctgtccaacgccagcaccctggctagcttctctgagcccggcagctgctatgaggagctgctcaagtacctggtgtacatccttcgtaaggcagcccgcaggctggctcaggtctctcgggcagcaggtgtgcgggttgggctgctcagcagcccagcacccctcgggggccaggagacccagcccagcagcagctgctctcgctcccaccgccgcctatccgtccaccacctggtgcaccaccaccaccaccatcaccaccactaccacctgggcaatgggacgctcagggccccccgggccagcccggagatccaggacagggatgccaatgggtcccgccggctcatgctgccaccaccctcgacgcctgccctctccggggccccccctggtggcgcagagtctgtgcacagcttctaccatgccgactgccacttagagccagtccgctgccaggcgccccctcccaggtccccatctgaggcatccggcaggactgtgggcagcgggaaggtgtatcccaccgtgcacaccagccctccaccggagacgctgaaggagaaggcactagtagaggtggctgccagctctgggcccccaaccctcaccagcctcaacatcccacccgggccctacagctccatgcacaagctgctggagacacagagtacaggtgcctgccaaagctcttgcaagatctccagcccttgcttgaaagcagacagtggagcctgtggtccagacagctgcccctactgtgcccgggccggggcaggggaggtggagctcgccgaccgtgaaatgcctgactcagacagcgaggcagtttatgagttcacacaggatgcccagcacagcgacctccgggacccccacagccggcggcaacggagcctgggcccagatgcagagcccagctctgtgctggccttctggaggctaatctgtgacaccttccgaaagattgtggacagcaagtactttggccggggaatcatgatcgccatcctggtcaacacactcagcatgggcatcgaataccacgagcagcccgaggagcttaccaacgccctagaaatcagcaacatcgtcttcaccagcctctttgccctggagatgctgctgaagctgcttgtgtatggtccctttggctacatcaagaatccctacaacatcttcgatggtgtcattgtggtcatcagcgtgtgggagatcgtgggccagcaggggggcggcctgtcggtgctgcggaccttccgcctgatgcgtgtgctgaagctggtgcgcttcctgccggcgctgcagcggcagctggtggtgctcatgaagaccatggacaacgtggccaccttctgcatgctgcttatgctcttcatcttcatcttcagcatcctgggcatgcatctcttcggctgcaagtttgcctctgagcgggatggggacaccctgccagaccggaagaattttgactccttgctctgggccatcgtcactgtctttcagatcctgacccaggaggactggaacaaagtcctctacaatggtatggcctccacgtcgtcctgggcggccctttatttcattgccctcatgaccttcggcaactacgtgctcttcaatttgctggtcgccattctggtggagggcttccaggcggaggaaatcagcaaacgggaagatgcgagtggacagttaagctgtattcagctgcctgtcgactcccaggggggagatgccaacaagtccgaatcagagcccgatttcttctcacccagcctggatggtgatggggacaggaagaagtgcttggccttggtgtccctgggagagcacccggagctgcggaagagcctgctgccgcctctcatcatccacacggccgccacacccatgtcgctgcccaagagcaccagcacgggcctgggcgaggcgctgggccctgcgtcgcgccgcaccagcagcagcgggtcggcagagcctggggcggcccacgagatgaagtcaccgcccagcgcccgcagctctccgcacagcccctggagcgctgcaagcagctggaccagcaggcgctccagccggaacagcctcggccgtgcacccagcctgaagcggagaagcccaagtggagagcggcggtccctgttgtcgggagaaggccaggagagccaggatgaagaggagagctcagaagaggagcgggccagccctgcgggcagtgaccatcgccacagggggtccctggagcgggaggccaagagttcctttgacctgccagacacactgcaggtgccagggctgcatcgcactgccagtggccgagggtctgcttctgagcaccaggactgcaatggcaagtcggcttcagggcgcctggcccgggccctgcggcctgatgaccccccactggatggggatgacgccgatgacgagggcaacctgagcaaaggggaacgggtccgcgcgtggatccgagcccgactccctgcctgctgcctcgagcgagactcctggtcagcctacatcttccctcctcagtccaggttccgcctcctgtgtcaccggatcatcacccacaagatgttcgaccacgtggtccttgtcatcatcttccttaactgcatcaccatcgccatggagcgccccaaaattgacccccacagcgctgaacgcatcttcctgaccctctccaattacatcttcaccgcagtctttctggctgaaatgacagtgaaggtggtggcactgggctggtgcttcggggagcaggcgtacctgcggagcagttggaacgtgctggacgggctgttggtgctcatctccgtcatcgacattctggtgtccatggtctctgacagcggcaccaagatcctgggcatgctgagggtgctgcggctgctgcggaccctgcgcccgctcagggtgatcagccgggcgcaggggctgaagctggtggtggagacgctgatgtcctcactgaaacccatcggcaacattgtagtcatctgctgtgccttcttcatcattttcggcatcttgggggtgcagctcttcaaagggaagtttttcgtgtgccagggcgaggataccaggaacatcaccaataaatcggactgtgccgaggccagttaccggtgggtccggcacaagtacaactttgacaaccttggccaggccctgatgtccctgttcgttttggcctccaaggatggttgggtggacatcatgtacgatgggctggatgctgtgggcgtggaccagcagcccatcatgaaccacaacccctggatgctgctgtacttcatctcgttcctgctcattgtggccttctttgtcctgaacatgtttgtgggtgtggtggtggagaacttccacaagtgtcggcagcaccaggaggaagaggaggcccggcggcgggaggagaagcgcctacgaagactggagaaaaagagaaggaaagcccagtgcaaaccttactactccgactactcccgcttccggctcctcgtccaccacttgtgcaccagccactacctggacctcttcatcacaggtgtcatcgggctgaacgtggtcaccatggccatggagcactaccagcagccccagattctggatgaggctctgaagatctgcaactacatcttcactgtcatctttgtcttggagtcagttttcaaacttgtggcctttggtttccgtcggttcttccaggacaggtggaaccagctggacctggccattgtgctgctgtccatcatgggcatcacgctggaggaaatcgaggtcaacgcctcgctgcccatcaaccccaccatcatccgcatcatgagggtgctgcgcattgcccgagtgctgaagctgctgaagatggctgtgggcatgcgggcgctgctggacacggtgatgcaggccctgccccaggtggggaacctgggacttctcttcatgttgttgtttttcatctttgcagctctgggcgtggagctctttggagacctggagtgtgacgagacacacccctgtgagggcctgggccgtcatgccacctttcggaactttggcatggccttcctaaccctcttccgagtctccacaggtgacaattggaatggcattatgaaggacaccctccgggactgtgaccaggagtccacctgctacaacacggtcatctcgcctatctactttgtgtccttcgtgctgacggcccagttcgtgctagtcaacgtggtgatcgccgtgctgatgaagcacctggaggagagcaacaaggaggccaaggaggaggccgagctagaggctgagctggagctggagatgaagaccctcagcccccagccccactcgccactgggcagccccttcctctggcctggggtcgagggccccgacagccccgacagccccaagcctggggctctgcacccagcggcccacgcgagatcagcctcccacttttccctggagcaccccacggacaggcagctgtttgacaccatatccctgctgatccagggctccctggagtgggagctgaagctgatggacgagctggcaggcccagggggccagccctctgccttcccttctgcccccagcctgggaggctccgacccacagatgcagccccaccccacggagctgccaggaccagacttactgactgtgcggaagtctggggtcagccgaacgcactctctgcccaatgacagctacatgtgtcggcatgggagcactgccgaggggcccctgggacacaggggctgggggctccccaaagctcagtcaggctccgtcttgtccgttcactcccagccagcagataccagctacatcctgcagcttcccaaagatgcacctcatctgctccagccccacagcgccccaacctggggcaccatccccaaactgcccccaccaggacgctcccctttggctcagaggccactcaggcgccaggcagcaataaggactgactccttggacgttcagggtctgggcagccgggaagacctgctggcagaggtgagtgggccctccccgcccctggcccgggcctactctttctggggccagtcaagtacccaggcacagcagcactcccgcagccacagcaagatctccaagcacatgaccccgccagccccttgcccaggcccagaacccaactggggcaagggccctccagagaccagaagcagcttagagttggacacggagctgagctggatttcaggagacctcctgccccctggcggccaggaggagcccccatccccacgggacctgaagaagtgctacagcgtggaggcccagagctgccagcgccggcctacgtcctggctggatgagcagaggagacactctatcgccgtcagctgcctggacagcggctcccaaccccacctgggcacagacccctctaaccttgggggccagcctcttggggggcctgggagccggcccaagaaaaaactcagcccgcctagtatcaccatagacccccccgagagccaaggtcctcggaccccgcccagccctggtatctgcctccggaggagggctccgtccagcgactccaaggatcccttggcctctggcccccctgacagcatggctgcctcgccctccccaaagaaagatgtgctgagtctctccggtttatcctctgacccagcagacctggacccctgagtcctgccccacttt

SEQ ID NO: 90265 - protein, 2291 aa, Artificial Sequence
  derived and/or modified sequence
MDEEEDGAGAEESGQPRSFMRLNDLSGAGGRPGPGSAEKDPGSADSEAEGLPYPALAPVVFFYLSQDSRPRSWCLRTVCNPWFERISMLVILLNCVTLGMFRPCEDIACDSQRCRILQAFDDFIFAFFAVEMVVKMVALGIFGKKCYLGDTWNRLDFFIVIAGMLEYSLDLQNVSFSAVRTVRVLRPLRAINRVPSMRILVTLLLDTLPMLGNVLLLCFFVFFIFGIVGVQLWAGLLRNRCFLPENFSLPLSVDLERYYQTENEDESPFICSQPRENGMRSCRSVPTLRGDGGGGPPCGLDYEAYNSSSNTTCVNWNQYYTNCSAGEHNPFKGAINFDNIGYAWIAIFQVITLEGWVDIMYFVMDAHSFYNFIYFILLIIVGSFFMINLCLVVIATQFSETKQRESQLMREQRVRFLSNASTLASFSEPGSCYEELLKYLVYILRKAARRLAQVSRAAGVRVGLLSSPAPLGGQETQPSSSCSRSHRRLSVHHLVHHHHHHHHHYHLGNGTLRAPRASPEIQDRDANGSRRLMLPPPSTPALSGAPPGGAESVHSFYHADCHLEPVRCQAPPPRSPSEASGRTVGSGKVYPTVHTSPPPETLKEKALVEVAASSGPPTLTSLNIPPGPYSSMHKLLETQSTGACQSSCKISSPCLKADSGACGPDSCPYCARAGAGEVELADREMPDSDSEAVYEFTQDAQHSDLRDPHSRRQRSLGPDAEPSSVLAFWRLICDTFRKIVDSKYFGRGIMIAILVNTLSMGIEYHEQPEELTNALEISNIVFTSLFALEMLLKLLVYGPFGYIKNPYNIFDGVIVVISVWEIVGQQGGGLSVLRTFRLMRVLKLVRFLPALQRQLVVLMKTMDNVATFCMLLMLFIFIFSILGMHLFGCKFASERDGDTLPDRKNFDSLLWAIVTVFQILTQEDWNKVLYNGMASTSSWAALYFIALMTFGNYVLFNLLVAILVEGFQAEEISKREDASGQLSCIQLPVDSQGGDANKSESEPDFFSPSLDGDGDRKKCLALVSLGEHPELRKSLLPPLIIHTAATPMSLPKSTSTGLGEALGPASRRTSSSGSAEPGAAHEMKSPPSARSSPHSPWSAASSWTSRRSSRNSLGRAPSLKRRSPSGERRSLLSGEGQESQDEEESSEEERASPAGSDHRHRGSLEREAKSSFDLPDTLQVPGLHRTASGRGSASEHQDCNGKSASGRLARALRPDDPPLDGDDADDEGNLSKGERVRAWIRARLPACCLERDSWSAYIFPPQSRFRLLCHRIITHKMFDHVVLVIIFLNCITIAMERPKIDPHSAERIFLTLSNYIFTAVFLAEMTVKVVALGWCFGEQAYLRSSWNVLDGLLVLISVIDILVSMVSDSGTKILGMLRVLRLLRTLRPLRVISRAQGLKLVVETLMSSLKPIGNIVVICCAFFIIFGILGVQLFKGKFFVCQGEDTRNITNKSDCAEASYRWVRHKYNFDNLGQALMSLFVLASKDGWVDIMYDGLDAVGVDQQPIMNHNPWMLLYFISFLLIVAFFVLNMFVGVVVENFHKCRQHQEEEEARRREEKRLRRLEKKRRSKEKQMADLMLDDVIASGSSASAASEAQCKPYYSDYSRFRLLVHHLCTSHYLDLFITGVIGLNVVTMAMEHYQQPQILDEALKICNYIFTVIFVLESVFKLVAFGFRRFFQDRWNQLDLAIVLLSIMGITLEEIEVNASLPINPTIIRIMRVLRIARVLKLLKMAVGMRALLDTVMQALPQVGNLGLLFMLLFFIFAALGVELFGDLECDETHPCEGLGRHATFRNFGMAFLTLFRVSTGDNWNGIMKDTLRDCDQESTCYNTVISPIYFVSFVLTAQFVLVNVVIAVLMKHLEESNKEAKEEAELEAELELEMKTLSPQPHSPLGSPFLWPGVEGPDSPDSPKPGALHPAAHARSASHFSLEHPTMQPHPTELPGPDLLTVRKSGVSRTHSLPNDSYMCRHGSTAEGPLGHRGWGLPKAQSGSVLSVHSQPADTSYILQLPKDAPHLLQPHSAPTWGTIPKLPPPGRSPLAQRPLRRQAAIRTDSLDVQGLGSREDLLAEVSGPSPPLARAYSFWGQSSTQAQQHSRSHSKISKHMTPPAPCPGPEPNWGKGPPETRSSLELDTELSWISGDLLPPGGQEEPPSPRDLKKCYSVEAQSCQRRPTSWLDEQRRHSIAVSCLDSGSQPHLGTDPSNLGGQPLGGPGSRPKKKLSPPSITIDPPESQGPRTPPSPGICLRRRAPSSDSKDPLASGPPDSMAASPSPKKDVLSLSGLSSDPADLDP

SEQ ID NO: 90266 - DNA, 6876 bp, Artificial Sequence
  derived and/or modified sequence
atggacgaggaggaggacggcgccggcgccgaggagagcggccagcccagaagcttcatgagactgaacgacctgagcggcgccggcggcagacccggccccggcagcgccgagaaggaccccggcagcgccgacagcgaggccgagggcctgccctaccccgccctggcccccgtggtgttcttctacctgagccaggacagcagacccagaagctggtgcctgagaaccgtgtgcaacccctggttcgagagaatcagcatgctggtgatcctgctgaactgcgtgaccctgggcatgttcagaccctgcgaggacatcgcctgcgacagccagagatgcagaatcctgcaggccttcgacgacttcatcttcgccttcttcgccgtggagatggtggtgaagatggtggccctgggcatcttcggcaagaagtgctacctgggcgacacctggaacagactggacttcttcatcgtgatcgccggcatgctggagtacagcctggacctgcagaacgtgagcttcagcgccgtgagaaccgtgagagtgctgagacccctgagagccatcaacagagtgcccagcatgagaatcctggtgaccctgctgctggacaccctgcccatgctgggcaacgtgctgctgctgtgcttcttcgtgttcttcatcttcggcatcgtgggcgtgcagctgtgggccggcctgctgagaaacagatgcttcctgcccgagaacttcagcctgcccctgagcgtggacctggagagatactaccagaccgagaacgaggacgagagccccttcatctgcagccagcccagagagaacggcatgagaagctgcagaagcgtgcccaccctgagaggcgacggcggcggcggccccccctgcggcctggactacgaggcctacaacagcagcagcaacaccacctgcgtgaactggaaccagtactacaccaactgcagcgccggcgagcacaaccccttcaagggcgccatcaacttcgacaacatcggctacgcctggatcgccatcttccaggtgatcaccctggagggctgggtggacatcatgtacttcgtgatggacgcccacagcttctacaacttcatctacttcatcctgctgatcatcgtgggcagcttcttcatgatcaacctgtgcctggtggtgatcgccacccagttcagcgagaccaagcagagagagagccagctgatgagagagcagagagtgagattcctgagcaacgccagcaccctggccagcttcagcgagcccggcagctgctacgaggagctgctgaagtacctggtgtacatcctgagaaaggccgccagaagactggcccaggtgagcagagccgccggcgtgagagtgggcctgctgagcagccccgcccccctgggcggccaggagacccagcccagcagcagctgcagcagaagccacagaagactgagcgtgcaccacctggtgcaccaccaccaccaccaccaccaccactaccacctgggcaacggcaccctgagagcccccagagccagccccgagatccaggacagagacgccaacggcagcagaagactgatgctgcccccccccagcacccccgccctgagcggcgccccccccggcggcgccgagagcgtgcacagcttctaccacgccgactgccacctggagcccgtgagatgccaggcccccccccccagaagccccagcgaggccagcggcagaaccgtgggcagcggcaaggtgtaccccaccgtgcacaccagccccccccccgagaccctgaaggagaaggccctggtggaggtggccgccagcagcggcccccccaccctgaccagcctgaacatcccccccggcccctacagcagcatgcacaagctgctggagacccagagcaccggcgcctgccagagcagctgcaagatcagcagcccctgcctgaaggccgacagcggcgcctgcggccccgacagctgcccctactgcgccagagccggcgccggcgaggtggagctggccgacagagagatgcccgacagcgacagcgaggccgtgtacgagttcacccaggacgcccagcacagcgacctgagagacccccacagcagaagacagagaagcctgggccccgacgccgagcccagcagcgtgctggccttctggagactgatctgcgacaccttcagaaagatcgtggacagcaagtacttcggcagaggcatcatgatcgccatcctggtgaacaccctgagcatgggcatcgagtaccacgagcagcccgaggagctgaccaacgccctggagatcagcaacatcgtgttcaccagcctgttcgccctggagatgctgctgaagctgctggtgtacggccccttcggctacatcaagaacccctacaacatcttcgacggcgtgatcgtggtgatcagcgtgtgggagatcgtgggccagcagggcggcggcctgagcgtgctgagaaccttcagactgatgagagtgctgaagctggtgagattcctgcccgccctgcagagacagctggtggtgctgatgaagaccatggacaacgtggccaccttctgcatgctgctgatgctgttcatcttcatcttcagcatcctgggcatgcacctgttcggctgcaagttcgccagcgagagagacggcgacaccctgcccgacagaaagaacttcgacagcctgctgtgggccatcgtgaccgtgttccagatcctgacccaggaggactggaacaaggtgctgtacaacggcatggccagcaccagcagctgggccgccctgtacttcatcgccctgatgaccttcggcaactacgtgctgttcaacctgctggtggccatcctggtggagggcttccaggccgaggagatcagcaagagagaggacgccagcggccagctgagctgcatccagctgcccgtggacagccagggcggcgacgccaacaagagcgagagcgagcccgacttcttcagccccagcctggacggcgacggcgacagaaagaagtgcctggccctggtgagcctgggcgagcaccccgagctgagaaagagcctgctgccccccctgatcatccacaccgccgccacccccatgagcctgcccaagagcaccagcaccggcctgggcgaggccctgggccccgccagcagaagaaccagcagcagcggcagcgccgagcccggcgccgcccacgagatgaagagcccccccagcgccagaagcagcccccacagcccctggagcgccgccagcagctggaccagcagaagaagcagcagaaacagcctgggcagagcccccagcctgaagagaagaagccccagcggcgagagaagaagcctgctgagcggcgagggccaggagagccaggacgaggaggagagcagcgaggaggagagagccagccccgccggcagcgaccacagacacagaggcagcctggagagagaggccaagagcagcttcgacctgcccgacaccctgcaggtgcccggcctgcacagaaccgccagcggcagaggcagcgccagcgagcaccaggactgcaacggcaagagcgccagcggcagactggccagagccctgagacccgacgacccccccctggacggcgacgacgccgacgacgagggcaacctgagcaagggcgagagagtgagagcctggatcagagccagactgcccgcctgctgcctggagagagacagctggagcgcctacatcttccccccccagagcagattcagactgctgtgccacagaatcatcacccacaagatgttcgaccacgtggtgctggtgatcatcttcctgaactgcatcaccatcgccatggagagacccaagatcgacccccacagcgccgagagaatcttcctgaccctgagcaactacatcttcaccgccgtgttcctggccgagatgaccgtgaaggtggtggccctgggctggtgcttcggcgagcaggcctacctgagaagcagctggaacgtgctggacggcctgctggtgctgatcagcgtgatcgacatcctggtgagcatggtgagcgacagcggcaccaagatcctgggcatgctgagagtgctgagactgctgagaaccctgagacccctgagagtgatcagcagagcccagggcctgaagctggtggtggagaccctgatgagcagcctgaagcccatcggcaacatcgtggtgatctgctgcgccttcttcatcatcttcggcatcctgggcgtgcagctgttcaagggcaagttcttcgtgtgccagggcgaggacaccagaaacatcaccaacaagagcgactgcgccgaggccagctacagatgggtgagacacaagtacaacttcgacaacctgggccaggccctgatgagcctgttcgtgctggccagcaaggacggctgggtggacatcatgtacgacggcctggacgccgtgggcgtggaccagcagcccatcatgaaccacaacccctggatgctgctgtacttcatcagcttcctgctgatcgtggccttcttcgtgctgaacatgttcgtgggcgtggtggtggagaacttccacaagtgcagacagcaccaggaggaggaggaggccagaagaagagaggagaagagactgagaagactggagaagaagagaagaagcaaggagaagcagatggccgacctgatgctggacgacgtgatcgccagcggcagcagcgccagcgccgccagcgaggcccagtgcaagccctactacagcgactacagcagattcagactgctggtgcaccacctgtgcaccagccactacctggacctgttcatcaccggcgtgatcggcctgaacgtggtgaccatggccatggagcactaccagcagccccagatcctggacgaggccctgaagatctgcaactacatcttcaccgtgatcttcgtgctggagagcgtgttcaagctggtggccttcggcttcagaagattcttccaggacagatggaaccagctggacctggccatcgtgctgctgagcatcatgggcatcaccctggaggagatcgaggtgaacgccagcctgcccatcaaccccaccatcatcagaatcatgagagtgctgagaatcgccagagtgctgaagctgctgaagatggccgtgggcatgagagccctgctggacaccgtgatgcaggccctgccccaggtgggcaacctgggcctgctgttcatgctgctgttcttcatcttcgccgccctgggcgtggagctgttcggcgacctggagtgcgacgagacccacccctgcgagggcctgggcagacacgccaccttcagaaacttcggcatggccttcctgaccctgttcagagtgagcaccggcgacaactggaacggcatcatgaaggacaccctgagagactgcgaccaggagagcacctgctacaacaccgtgatcagccccatctacttcgtgagcttcgtgctgaccgcccagttcgtgctggtgaacgtggtgatcgccgtgctgatgaagcacctggaggagagcaacaaggaggccaaggaggaggccgagctggaggccgagctggagctggagatgaagaccctgagcccccagccccacagccccctgggcagccccttcctgtggcccggcgtggagggccccgacagccccgacagccccaagcccggcgccctgcaccccgccgcccacgccagaagcgccagccacttcagcctggagcaccccaccatgcagccccaccccaccgagctgcccggccccgacctgctgaccgtgagaaagagcggcgtgagcagaacccacagcctgcccaacgacagctacatgtgcagacacggcagcaccgccgagggccccctgggccacagaggctggggcctgcccaaggcccagagcggcagcgtgctgagcgtgcacagccagcccgccgacaccagctacatcctgcagctgcccaaggacgccccccacctgctgcagccccacagcgcccccacctggggcaccatccccaagctgcccccccccggcagaagccccctggcccagagacccctgagaagacaggccgccatcagaaccgacagcctggacgtgcagggcctgggcagcagagaggacctgctggccgaggtgagcggccccagcccccccctggccagagcctacagcttctggggccagagcagcacccaggcccagcagcacagcagaagccacagcaagatcagcaagcacatgaccccccccgccccctgccccggccccgagcccaactggggcaagggcccccccgagaccagaagcagcctggagctggacaccgagctgagctggatcagcggcgacctgctgccccccggcggccaggaggagccccccagccccagagacctgaagaagtgctacagcgtggaggcccagagctgccagagaagacccaccagctggctggacgagcagagaagacacagcatcgccgtgagctgcctggacagcggcagccagccccacctgggcaccgaccccagcaacctgggcggccagcccctgggcggccccggcagcagacccaagaagaagctgagcccccccagcatcaccatcgacccccccgagagccagggccccagaaccccccccagccccggcatctgcctgagaagaagagcccccagcagcgacagcaaggaccccctggccagcggcccccccgacagcatggccgccagccccagccccaagaaggacgtgctgagcctgagcggcctgagcagcgaccccgccgacctggacccctag

SEQ ID NO: 90267 - DNA, 6876 bp, Artificial Sequence
  derived and/or modified sequence
atggatgaagaggaagacggcgctggagctgaggaatctggccagcctagatcattcatgcggcttaacgatctgtccggcgctggcggcaggcccggacccggcagcgctgagaaggaccccggcagcgccgacagcgaggccgaaggtttaccatatcccgctctggcccccgtggtttttttctatctgtcacaagatagccggccgcgtagctggtgcctgcggactgtctgcaacccatggtttgagcggatctcaatgcttgtgatcctgctgaactgcgtgactctgggcatgttcaggccctgcgaggatatcgcctgcgacagccagcgctgccggatccttcaggcattcgatgatttcatatttgcattttttgcagtggagatggtagttaagatggtggcgcttggtatctttggaaaaaagtgctatttgggcgatacatggaatagactggatttcttcattgtcattgcaggcatgctagagtactctcttgacctgcagaatgtgagcttctccgctgttcgaaccgttcgcgtgctccgccctctacgcgctatcaacagggtgccctcgatgcgtatcctggtaaccctgctgttggacacactgcctatgctgggcaacgttcttctgctatgcttcttcgtgtttttcatcttcggtatcgtgggggtgcagctctgggccggcctgctgaggaaccgctgtttcctcccggagaacttctcattgccactatcagttgatctggagcgttattatcaaacagaaaatgaggacgaatctccctttatctgctcccaacctcgggagaacggcatgaggtcttgcagaagcgtccccactcttcgcggggacgggggagggggtccaccgtgcggcctcgattatgaagcttacaacagtagcagtaatacaacctgcgtgaattggaatcagtattacaccaattgtagcgcgggggaacacaatccgtttaaaggcgcaatcaacttcgacaacattgggtatgcctggatcgccatcttccaggttattacgctggaggggtgggtcgacatcatgtacttcgtgatggatgcccattcattctacaattttatctacttcattctgttaataatagtgggcagcttttttatgattaacctgtgtcttgtcgtcatcgctacccagttctcagaaactaagcagcgggagtctcagttgatgcgagaacagcgcgtccggttcctttccaatgctagcaccctggcctcctttagcgaaccaggatcctgttacgaagaactcttgaagtatcttgtatacattctgcggaaggccgctcgcagattggcacaggtgagcagagccgctggtgtgcgcgtggggctgctttccagccctgctccgcttggaggtcaggagacccaaccatcatcttcatgctccagatcccatcgacggctgagcgtgcaccacctggtgcatcatcatcatcatcatcaccaccactaccacttgggaaatggtactctgcgtgccccccgcgcatcgccggaaatccaagacagagatgcgaacgggtctcggcggctcatgctgccacccccttcaacgcctgcgttgagcggcgccccaccaggcggcgccgaatcagtccactcattttaccacgccgattgtcacctcgaaccggttagatgccaggctccgccgccgagatctccatctgaggcatccggccggaccgtggggagcgggaaagtgtatcccacggtgcatactagtccgccacccgagaccctgaaagagaaagccctagtcgaggttgctgcgagtagcgggcctcctacgttaacttcactcaacatccctccaggcccctactcttccatgcataaattactcgagactcagagtaccggagcttgccagtcgtcctgtaagatcagttccccgtgcctgaaggcagattctggagcatgtgggcccgatagctgtccttattgtgccagagccggagcaggcgaggttgaactagcggatcgtgagatgccagattccgatagtgaagcagtttatgagttcactcaggacgcgcagcattctgatttacgcgacccgcatagccgcagacagcgttcattgggtccagacgctgaaccaagctctgtgttagctttctggagactgatttgcgacacctttagaaaaattgtcgacagcaagtacttcgggagaggaatcatgatcgctattctggtgaacactctgtctatgggaatagaataccacgagcaacctgaggagcttactaatgctttggagatcagcaatattgtcttcacatcgctgttcgcattggaaatgctgctcaagctgttggtatacggccctttcggctacattaaaaacccatacaatatctttgacggagtgatcgtcgtgatcagtgtgtgggaaatcgtgggccaacaagggggcggcttgtctgtcctccggactttccggctaatgcgtgttcttaagctagtgcgatttctgccggccttgcaaaggcagctggtggtcttgatgaaaacaatggacaacgtggccacattctgcatgctgcttatgttatttatctttatttttagcatcctcgggatgcacctcttcgggtgcaaattcgcttcagagcgtgatggtgacacactgcccgatagaaaaaactttgacagtctgctctgggcaatcgtcaccgtctttcagattctcacacaggaggattggaacaaagttctttacaatgggatggccagtaccagttcttgggcagcactgtatttcattgccctcatgaccttcgggaactatgtgctctttaaccttcttgtggccattctggtggagggattccaggcagaggaaatttcaaagagggaggacgcctcaggacagttgtcctgtattcagctaccagtggattcccagggcggtgatgccaataaaagcgaatcagagcctgactttttctccccaagcctggacggcgatggtgaccggaagaaatgtctcgccctggtgtcgttaggggaacatcctgaattgagaaaaagcctgctgccaccgttgatcattcatacggcagctacgcctatgtccctccctaaaagcacatcgacaggcctgggtgaggcccttggacccgcttccaggcgcacctccagctctggttcggccgaacctggcgctgcacatgaaatgaagtcaccaccaagtgccaggagctctccccactcaccttggagcgccgcctctagctggacctccaggcggtcttctaggaatagcttgggaagggccccttcattgaagcggaggtcccctagcggagagcggaggtcactgctgtcaggcgaggggcaagagtcccaggatgaggaggaaagttcagaagaagagagggcgtcacccgctgggagcgaccataggcaccgcggtagtttggagcgggaggcgaagtcgagtttcgacctcccagacactttgcaggtgcctggcttgcaccgcacagcaagcggccgtgggtctgcttcggagcaccaagattgtaacgggaaaagcgcctcggggcggctcgcccgcgctttgaggcccgatgaccccccactggatggggacgacgccgacgacgaagggaacctgtcaaagggcgaacgtgtgagagcctggatcagggcccgacttccagcttgctgtctagaaagagatagctggtcagcatatatcttcccacctcagtctcgctttcgactgttatgccacaggataataactcacaagatgtttgaccacgttgttcttgtaataattttcctgaattgcatcaccatagctatggagcgacccaagattgacccacatagcgccgagaggatctttctgactctgtctaactatatcttcaccgccgtgtttctggccgagatgacagttaaggtggtcgcgctcggttggtgcttcggggagcaagcttacctgcgttcctcttggaacgtccttgatggcctgctcgttcttatctccgtcatagatatcctggtgagcatggtatcagactcgggtactaaaatcctggggatgttgcgggtgcttaggctgctgcggacccttcgtccacttagggtgatcagccgggcgcaaggcttgaaattagtggttgagaccttgatgtcatcactcaagcccatcggtaacattgttgtaatctgttgtgctttttttattatttttgggatcttaggtgtgcagctattcaagggcaaattttttgtctgtcagggcgaggacacgcggaatattaccaacaagtcggattgcgcagaggcctcctacaggtgggtgagacataaatacaattttgacaatctgggccaggctcttatgtcactgttcgtgctggcttccaaggacgggtgggtcgacataatgtatgacggcctcgacgcggttggggtcgatcaacagcccataatgaatcacaacccctggatgctgctgtactttatttcttttcttttgatcgtcgccttctttgtactgaacatgttcgttggtgtagtggtagagaacttccataaatgccgccagcatcaagaggaggaagaggccaggcgcagagaggagaaacggctgagaagacttgaaaagaagcgaaggagcaaagagaagcaaatggctgatctcatgctagatgacgtgattgcttccgggtcaagtgctagcgcagcatccgaggcacagtgtaagccatattactcagactattcacgatttagacttctggttcaccacctttgtaccagtcactacctggacctctttattaccggggtgatagggctcaacgtcgttacgatggctatggagcattaccagcaaccacaaatcctcgatgaggccctgaagatctgtaactacattttcaccgtgatctttgtccttgagagtgtgtttaagctcgtagccttcggttttcggcgctttttccaggataggtggaatcagctggatcttgccattgttcttctgtcaattatggggataaccctggaggagattgaggtaaatgcaagtctccccattaacccgacaattatcagaataatgagggtgttgcgtatcgcccgagttttgaagctgctgaaaatggccgtcggcatgcgtgccctgctggacactgtgatgcaagccctcccacaggtaggcaaccttggactactgtttatgctgctgtttttcatctttgctgcattgggagtcgagctctttggtgaccttgaatgtgatgagacccacccatgtgaaggcctgggccgacacgccacctttcgcaacttcggaatggcattcctgaccctgtttcgtgtttccaccggcgataactggaatgggataatgaaagacaccctgcgagattgtgaccaggagtcaacgtgctacaatactgtgatcagtccgatctactttgtctcgttcgtgcttacggcacagttcgtcctggttaatgtcgtgattgccgttcttatgaagcatttagaggagtccaacaaagaagccaaagaggaagccgagttagaagctgagctggagttggagatgaagacattgagcccgcaaccgcatagccccttgggcagcccatttctgtggccgggagtggagggaccagactccccagattcccccaagcccggagctctgcaccctgctgctcatgctagaagcgcctcccatttttccctggagcatccaacaatgcagccccaccctaccgaactccctgggccagatctgctcacggttagaaaaagcggagtgagtaggactcatagcttgcccaacgactcatacatgtgtcggcacgggtcgacagctgagggaccccttgggcataggggctggggtctccctaaagcccagtccggctccgtcctcagcgtgcacagtcaacccgccgatacctcctatatactgcagctccctaaagatgctccccacctgctgcagccacacagcgcccccacctggggcactatcccaaagctcccgccacctggtaggtcccctctggctcaaaggccactgcggcgacaggccgcaatcagaactgatagcttagacgtccaagggctgggaagccgcgaagatttacttgcagaggtctctggaccaagccccccactggcccgggcctacagcttttggggacagagctctactcaggctcagcagcatagtaggagtcacagcaaaatcagcaagcacatgacgccgcctgccccttgccccggacctgaaccaaattggggcaaaggtccccccgagactcggtcctccttagaactggataccgagctgagttggatttccggcgatctgttgcccccgggtggccaggaagagcctccctctccccgcgatctgaaaaagtgctactctgttgaagctcagagttgtcagagacgccccacctcatggctagatgaacaacggagacactctatcgcagtgagttgcctggattcgggatctcaaccacatttagggacagaccccagtaacctgggcggacagccactcggtggcccagggagccgcccgaagaaaaagctttcccccccctccatcacaatcgacccccctgaaagccaaggccccagaactccaccgagccccggaatctgcctgcggcgcagggctccctcctccgattccaaggacccacttgccagcggccctcctgactctatggcagcctcgccttcacctaagaaagacgttttatcgttgtccggcctttctagtgatccagcggacctggatccctag

SEQ ID NO: 90268 - DNA, 6876 bp, Artificial Sequence
  derived and/or modified sequence
atggatgaggaggaggatggagctggagctgaggagagcggccagcccaggagcttcatgaggctgaatgacctgagcggggccggcggccggcccggccctggcagcgctgagaaggaccccggcagcgctgacagcgaggccgagggcctgccctacccagccctggcccctgtggtgttcttctacctgagccaggacagccggcccaggtcctggtgcctgaggacagtgtgcaacccctggtttgagcgcatctccatgctggtgatcctgctgaactgtgtgaccctgggcatgttccggccctgtgaagatattgcctgtgacagccagcgctgccgcatcctgcaggcctttgatgacttcatctttgccttctttgctgtggagatggtggtgaagatggtggccctgggcatctttgggaagaagtgctacctgggggacacctggaaccggctggacttcttcatcgtgattgctggcatgctggagtacagcctggacctgcagaatgtgtccttctctgctgtgaggacagtgcgggtgctgcggcccctgcgggccatcaacagagtgcccagcatgaggatcctggtgaccctgctgctggacaccctgcccatgctgggcaatgtgctgctgctgtgcttctttgtgttcttcatctttggaattgtgggcgtgcagctgtgggccggcctgctgaggaaccgctgcttcctgcctgagaacttcagcctgcccctgtctgtggacctggagcgctactaccagacagaaaatgaagatgagagccccttcatctgcagccagccccgggagaatggcatgaggagctgccgctctgtgcccaccctgcggggagatggcggcggcggccccccctgtggcctggactatgaggcctacaacagcagcagcaacaccacctgtgtgaactggaaccagtactacaccaactgcagcgctggggagcacaaccccttcaagggggccatcaactttgacaacatcggctacgcctggatcgccatcttccaggtgatcaccctggagggctgggtggacatcatgtactttgtgatggatgcccacagcttctacaacttcatctacttcatcctgctgatcatcgtgggcagcttcttcatgatcaacctgtgcctggtggtgattgccacccagttcagcgagaccaagcagcgggagagccagctgatgagggagcagagggtgcgcttcctgagcaatgccagcaccctggccagcttcagcgagcccggcagctgctatgaggagctgctgaagtacctggtgtacatcctgaggaaggccgcccggcggctggcccaggtgtccagagctgctggggtgcgggtgggcctgctgagcagccctgcccccctgggcggccaggagacccagcccagcagcagctgcagccgcagccaccggcggctgtctgtgcaccacctggtgcaccaccaccaccaccaccaccaccactaccacctgggcaatggcaccctgcgggccccccgggccagccctgagatccaggacagagatgccaacggcagccggcggctgatgctgcccccacccagcaccccagccctgagcggggcccctcctggaggagctgagagcgtgcacagcttctaccacgccgactgccacctggagcctgtgcgctgccaggcccccccacccaggagccccagcgaggccagcggccgcacagtgggcagcggcaaggtgtaccccaccgtgcacaccagccccccacctgagaccctgaaggagaaggccctggtggaggtggccgccagcagcggcccccccaccctgaccagcctgaacatccccccaggcccctacagctccatgcacaagctgctggagacccagagcactggagcctgccagagcagctgcaagatcagcagcccctgcctgaaggctgacagcggggcctgtggccctgacagctgcccctactgtgcccgggccggggccggggaggtggagctggccgaccgggagatgccagacagcgacagcgaggccgtgtatgagttcacccaggatgcccagcacagcgacctgcgggacccccacagccggcggcagaggagcctgggcccagatgctgagcccagctctgtgctggccttctggaggctcatctgtgacaccttcaggaagatcgtggacagcaagtacttcggccggggcatcatgattgccatcctggtgaacaccctgtccatgggcatcgagtaccacgagcagcctgaggagctgaccaatgccctggagatcagcaacatcgtgttcaccagcctgtttgccctggagatgctgctgaagctgctggtgtatggccccttcggctacatcaagaacccctacaacatctttgatggagtcatcgtggtgatctctgtgtgggagatcgtgggccagcagggcggcggcctgtctgtgctgcggaccttccggctgatgagggtgctgaagctggtgcgcttcctgcctgccctgcagaggcagctggtggtgctgatgaagaccatggacaacgtggccaccttctgcatgctgctgatgctgttcatcttcatcttcagcatcctgggcatgcacctgtttggctgcaagtttgccagcgagagagatggagacaccctgcctgacaggaagaactttgacagcctgctgtgggccatcgtgacagtgttccagatcctgacccaggaggactggaacaaggtgctgtacaacggcatggccagcaccagctcctgggccgccctgtacttcatcgccctgatgaccttcggcaactacgtgctcttcaacctgctggtggccatcctggtggagggcttccaggccgaggagatcagcaagcgggaggatgccagcggccagctgagctgcatccagctgcctgtggacagccagggcggagatgccaacaagtctgagagcgagccagacttcttcagccccagcctggatggagatggagacaggaagaagtgcctggccctggtgtccctgggggagcaccctgagctgaggaagagcctgctgcccccactcatcatccacacagctgccacccccatgagcctgcccaagagcaccagcacaggcctgggggaggccctgggccctgccagcaggaggaccagcagcagcggcagcgctgagcctggagctgcccacgagatgaagagcccccccagcgcccggagcagcccccacagcccctggagcgctgccagctcctggaccagccgccgcagcagcaggaacagcctgggccgggcccccagcctgaagagaagaagccccagcggggagcggcgcagcctgctgtctggagagggccaggagagccaggatgaggaggagagcagcgaggaggagcgggccagccctgctggcagtgaccaccgccaccggggcagcctggagcgggaggccaagagcagctttgacctgcctgacaccctgcaggtgcccggcctgcacaggacagccagcggccggggcagcgccagcgagcaccaggactgcaatggcaagagcgccagcggccgcctggcccgggccctgcggccagatgatcctcccctggatggagatgatgctgatgatgagggcaacctgagcaagggggagcgggtgcgggcctggatccgggcccggctgcctgcctgctgcctggagcgggacagctggagcgcctacatcttccccccccagagccgcttccggctgctgtgccaccgcatcatcacccacaagatgtttgaccacgtggtgctggtgatcatcttcctgaactgcatcaccatcgccatggagcggcccaagattgacccccacagcgctgagcgcatcttcctgaccctgagcaactacatcttcaccgctgtgttcctggccgagatgacagtgaaggtggtggccctgggctggtgcttcggggagcaggcctacctgcggagctcctggaatgtgctggatggcctgctggtgctgatctctgtgattgacatcctggtgtccatggtgtctgattctggcaccaagatcctgggcatgctgcgggtgctgcggctgctgcggaccctgcggcccctgcgggtcatcagccgggcccagggcctgaagctggtggtggagaccctgatgagcagcctgaagcccatcggcaacatcgtggtgatctgctgtgccttcttcatcatcttcggcatcctgggcgtgcagctgttcaagggcaagttctttgtgtgccagggcgaggacaccaggaacatcaccaacaagagtgactgtgccgaggccagctaccgctgggtgcgccacaagtacaactttgacaacctgggccaggccctgatgagcctgtttgtgctggccagcaaggatggctgggtggacatcatgtatgatggcctggatgctgtgggcgtggaccagcagcccatcatgaaccacaacccctggatgctgctgtacttcatctccttcctgctgattgtggccttctttgtgctgaacatgtttgtgggcgtggtggtggagaacttccacaagtgccggcagcaccaggaggaggaggaggcccggcggcgggaggagaagaggctgcggcggctggagaagaagagaagaagcaaggagaagcagatggctgacctgatgctggatgatgtgattgccagcggcagcagcgccagcgctgccagcgaggcccagtgcaagccctactacagcgactacagccgcttccggctgctggtgcaccacctgtgcaccagccactacctggacctcttcatcactggagtcatcggcctgaatgtggtgaccatggccatggagcactaccagcagccccagatcctggatgaggccctgaagatctgcaactacatcttcaccgtcatctttgtgctggagagcgtcttcaagctggtggccttcggcttccgccgcttcttccaggaccgctggaaccagctggacctggccatcgtgctgctgagcatcatgggcatcaccctggaggagattgaggtgaatgccagcctgcccatcaaccccaccatcatccgcatcatgagggtgctgagaattgcccgggtgctgaagctgctgaagatggctgtgggcatgagggccctgctggacacagtgatgcaggccctgccccaggtgggcaacctgggcctgctcttcatgctgctcttcttcatctttgctgccctgggcgtggagctgtttggagacctggagtgtgatgagacccacccctgtgagggcctgggcagacatgccaccttcaggaactttggcatggccttcctgaccctcttccgggtgtccactggagacaactggaatggcatcatgaaggacaccctgcgggactgtgaccaggagagcacctgctacaacacagtcatcagccccatctactttgtgtcctttgtgctgacagcccagtttgtgctggtgaatgtggtgattgctgtgctgatgaagcacctggaggagagcaacaaggaggccaaggaggaggccgagctggaggccgagctggagctggagatgaagaccctgagcccccagccccacagccccctgggcagccccttcctgtggccaggagtggagggccctgacagcccagacagccccaagccaggggccctgcaccctgctgcccacgcccggagcgccagccacttcagcctggagcaccccaccatgcagccccaccccacagagctgcccggccctgacctgctgactgtgaggaagtctggagtgtccaggacccacagcctgcccaatgacagctacatgtgccgccacggcagcacagctgagggccccctgggccaccggggctggggcctgcccaaggcccagagcggctctgtgctgtctgtgcacagccagcctgctgacaccagctacatcctgcagctgcccaaggatgccccccacctgctgcagccccacagcgcccccacctggggcaccatccccaagctgcccccacctggccgcagccccctggcccagaggcccctgcggcggcaggccgccatcagaacagacagcctggatgtgcagggcctgggcagccgggaggacctgctggccgaggtgtctggccccagcccccccctggcccgggcctacagcttctggggccagagcagcacccaggcccagcagcacagccgcagccacagcaagatcagcaagcacatgaccccaccagccccctgccccggccctgagcccaactggggcaagggccccccagagaccaggagcagcctggagctggacacagagctgtcctggatcagcggggacctgctgcccccaggcggccaggaggagccccccagcccccgggacctgaagaagtgctacagcgtggaggcccagagctgccagaggcggcccacctcctggctggatgagcagaggaggcacagcattgctgtgtcctgcctggacagcggcagccagccccacctgggcacagaccccagcaacctgggcggccagcccctgggcggccctggcagccggcccaagaagaagctgagcccccccagcatcaccattgatcctcctgagagccagggccccaggaccccacccagccctggcatctgcctgcggcggcgggcccccagcagtgacagcaaggaccccctggccagcggccccccagacagcatggccgccagccccagccccaagaaggatgtgctgagcctgagcggcctgagcagtgaccctgctgacctggacccctag

SEQ ID NO: 90269 - DNA, 6876 bp, Artificial Sequence
  derived and/or modified sequence
atggacgaggaggaggacggcgccggcgccgaggagagcggccagccccgttccttcatgcgactgaacgatcttagcggtgcgggaggaagacccggtcctggatctgctgaaaaggaccctggcagcgctgattctgaggctgaaggcctcccttatcctgccctagcccctgttgtattcttctacttgtcccaagactcacggccaagaagctggtgtctgaggacagtgtgtaatccctggttcgagaggattagcatgctggtgattctgcttaattgtgtcacactaggcatgtttaggccctgcgaagatatcgcatgtgattcgcagcgatgccggatcctgcaggcctttgacgatttcatcttcgctttctttgctgttgaaatggtggtaaagatggtcgctctggggatcttcggcaagaaatgttacctgggcgacacatggaacaggctggactttttcatcgtgattgcgggaatgttagagtattcccttgatctccagaatgtttctttctccgccgtccgtaccgtcagggtgctccgcccattgagagccatcaatagggtgcctagtatgcggatcctggtgactctgcttttggacactctgcctatgctcggaaacgttctgctcttatgtttttttgttttcttcatttttggcatagttggcgtgcagctttgggccggattgctgaggaacagatgcttcctgcccgaaaatttcagtctcccactttctgtcgatctcgagcgctactaccagacagagaacgaagatgagagcccgtttatttgtagccagcctagagaaaacggaatgcggtcgtgccgctccgttcctacccttcgaggggacggaggaggcggccctccatgtggattggactatgaggcctacaacagcagttcaaataccacttgcgtgaactggaaccagtattacaccaactgtagtgccggagaacataacccgtttaaaggggcaattaattttgataatatcgggtatgcctggatcgccatcttccaagtcatcacgctggaaggatgggtcgacattatgtatttcgtaatggatgcccattctttctataacttcatctatttcatactcctcattattgtcggaagtttttttatgatcaatctgtgcctggtagtgatcgccacacagttcagtgaaaccaaacagcgagagtctcagctgatgcgggaacagagagtgcggtttttaagcaacgcttccacgctggctagttttagcgaaccaggatcatgttatgaggaactgctcaaatacttagtgtatatactgcggaaggctgcacgcagactcgctcaggtttctcgagcagcgggcgttcgtgtgggcctcctctcatccccggcccctctaggggggcaggaaactcagccatccagttcatgctcaaggtcacatagacggctgagcgtgcaccatttagtacaccatcatcaccaccatcatcatcattatcacctgggcaatggcaccctgcgggcccctcgggccagtccagagatccaggacagggacgctaacggcagccggaggctgatgttacctcccccaagcacccctgccctttcaggggcccctcccggcggagctgaaagtgtgcacagcttttaccacgccgattgccaccttgaaccggtgcgctgccaggcacctcccccccgatctcccagtgaagccagcgggcggacggttggaagtggcaaggtgtaccccaccgtacacacatcccctcccccagagaccctgaaagaaaaagcactagtcgaggtggcggccagcagcggacccccaaccttgaccagcctgaatatcccacctggcccttatagctcgatgcataaattattggaaacacagtcaaccggcgcatgtcagtcgagctgcaagatctcaagtccatgtctgaaagccgattctggggcctgcggccctgactcatgcccctactgtgctcgggccggggcaggagaggtcgaacttgctgaccgagagatgcccgatagcgattctgaggccgtctacgaatttacccaggatgcacagcactccgatttgagggatcctcactcgagacgacagagatcactaggccccgacgcggagccatcctccgtgctagccttttggaggctcatctgcgacaccttccggaagattgttgactcaaagtactttggtaggggaatcatgatcgcgatcctggtaaacactctgtcaatgggaattgagtatcacgagcagccagaagaactgaccaatgctctggaaatatcaaatattgtgttcacatccctgttcgcactagagatgcttctcaaactcttagtctacggcccattcgggtatattaaaaacccctataatatcttcgatggagtgattgtcgtcatcagtgtttgggaaatcgtgggacagcagggaggtggacttagtgttcttaggacatttcgcctgatgagggttctgaagctagtaaggtttcttcccgctcttcagcgccagttggtagtcctaatgaagactatggataatgtggctactttctgtatgttactgatgttgttcatatttattttttcaatcctgggtatgcacctgtttggttgcaagttcgcgagcgagcgagatggcgataccttgcctgatcggaagaattttgactccctcctgtgggccatcgtgacggtgtttcaaattctcacccaggaggattggaacaaagtcctatataatggcatggccagcacctcctcgtgggcagccctgtactttattgccttgatgaccttcggaaactatgtgctgttcaaccttctcgtcgcaattctggttgaaggttttcaagccgaagaaatttccaagcgagaagacgcaagcggacagctaagctgtatccagcttcccgttgatagccagggcggcgatgctaataagagcgagtccgagccagactttttttcccctagcctggacggggacggagaccggaagaagtgcctggctcttgtgtcactcggagagcatccagagctccgcaaaagcctcctgccccctctgattatccacacagccgctactcctatgtcccttccaaagtccacttctacgggcctaggggaggctctaggacctgccagccgccggacatccagctctggctctgcagaacctggcgcagcacacgaaatgaagtccccaccaagcgcaagatcatcaccgcactctccttggagcgccgcttcgtcctggacgtcacgacggtcatcacgtaactctctcggtcgggctccatctctaaaaaggcggtctccaagcggagaacgccggagcctcttgagtggcgagggtcaggagtcccaggatgaggaggagtcctctgaggaggaacgcgcttccccagcgggttctgaccaccgacatcggggaagccttgagagagaggctaagtcctcctttgatttgccagatactctgcaggtgcccgggttgcataggaccgcaagcggcaggggcagcgccagcgagcatcaggactgcaacggtaagagtgcgagcggtcggcttgcaagagctctgagacccgacgatcccccactggacggggacgacgcggacgacgaaggcaatctgagcaagggcgaacgagtcagagcctggatccgcgccaggcttcctgcgtgctgcctggagcgcgactcctggagcgcctatattttccctccccagtcgcggttcagattactctgccataggatcataacgcacaagatgtttgaccatgtcgtcttagtaattatcttcctgaattgcattactattgcaatggagagacctaagattgatccacactcagctgaacggattttccttaccctctctaattatatttttacagcagtcttcttggcggaaatgacagttaaagtggtcgcattaggctggtgttttggcgaacaggcgtacctgaggtctagttggaatgtattagacggcctactcgtcctgatctccgtaattgatatactggtgtcaatggtgagcgattctggaactaaaatactcgggatgctccgtgtgttaaggctcttacgcacgttgagacctttgcgggttatctccagagcgcagggattgaagcttgtcgtggaaactctgatgtcttccctgaagcctataggcaatattgttgtaatttgttgcgccttcttcatcatattcggtatcctgggggtgcagttgttcaaaggcaagttcttcgtctgtcagggtgaggacaccagaaatatcaccaataagagtgactgcgctgaggccagctacagatgggttcgccataagtataatttcgacaacctgggtcaggctcttatgtccctgttcgtgttggcttcgaaagatggctgggtggatattatgtacgacggactcgatgcagtaggcgtagaccagcagccgataatgaaccacaacccttggatgctgctgtacttcatatctttcttacttatcgtggctttttttgttctgaatatgtttgtgggggtcgtggttgagaatttccacaagtgtcgacagcatcaggaggaagaggaggcacgtcgacgggaggaaaagcgcctccggaggctggagaagaaaagacggtctaaagagaagcagatggccgacctgatgctcgacgatgtgatcgcatcaggctccagcgcatccgccgcaagtgaagcacagtgcaagccctattacagtgactactccaggttccgtctccttgtgcaccatctgtgcacaagccactatctggacctctttattactggggtgatcggcttgaacgtggttactatggccatggagcactaccaacaaccgcagatactggatgaagcattgaagatttgtaattacatcttcacagtgatcttcgtgttggagtctgtctttaaactggtagccttcggctttaggcgattcttccaggataggtggaatcaattggatcttgccattgtcctcctctccatcatgggaatcaccctggaagagatcgaggtgaacgcctcactgcctatcaaccccacgataatcaggatcatgcgggtgctgaggatcgcacgtgtgctgaaacttctaaagatggccgtaggaatgagagccctcctagataccgtcatgcaggccctcccacaggtcggtaacctggggctcctgttcatgctccttttttttatttttgccgcactgggggtggagctcttcggcgatcttgagtgcgacgagacccacccatgtgaaggactcggtcgccacgctaccttcagaaacttcgggatggcgttcctcaccctctttcgggtgtctaccggagacaattggaacggtatcatgaaagacacactgagagactgtgaccaagaatcaacttgctacaataccgtcataagtcccatctattttgttagttttgtcttgactgcccagttcgtgctggtgaatgtagtaattgctgttctaatgaagcatctcgaagagagtaacaaggaagctaaggaggaggccgaactcgaagcagaactggaactggaaatgaagacactttccccacaaccccattctcccctgggtagcccctttctctggcctggcgtagaggggcccgactctcctgacagtcctaaacctggggccctgcatcctgctgcccatgctcggagtgcaagccatttttctctcgaacaccctaccatgcagccgcatcctactgagctcccagggcccgatctgctgaccgtaagaaaaagcggagtatctagaacccatagcctgcctaacgattcctacatgtgtcgacacggcagcactgcagagggtcctctcggtcatcgcggctgggggctacctaaagctcagagtggctcagtgctgtccgttcattcgcagccagctgatacctcgtatatcctacagctacctaaggatgccccccacctactccagcctcattccgctcctacctgggggaccattccaaaacttccccctccgggacgaagccccctggcgcagcggccgcttaggcgccaggccgcaattagaacagatagcctggacgtgcaggggctcggatcacgcgaggatctcttggccgaagtgtccgggcccagtccacctctggcgcgggcctactctttctggggtcagtcgtctacacaggcccagcagcactcgaggagtcacagcaaaatctctaaacacatgacaccgcctgcaccttgtcctgggccggagccaaattggggcaagggccctcccgaaaccaggtcatctcttgaactcgacactgaacttagttggatcagtggggacctcctcccacccgggggccaagaggaacctcctagtcctcgggacctcaaaaagtgctactcggttgaagcacagagttgtcagagacgccctaccagctggctggatgagcagagacgccactccatcgccgtatcctgtctggattctgggagccagccgcatttgggcaccgatccttctaatttagggggacagccgctcggaggcccaggatcccgcccaaagaaaaagctgagtccaccaagcatcacgatcgatcccccagaatcccaggggcccagaactccgccttcacccgggatttgccttcggagaagagcaccttcaagcgactctaaagatcctctcgctagtggacctcccgactcaatggccgcctcgccttctccgaagaaagacgtcctgagcctgagcggcctgagctccgatcccgccgacctggatccatag

SEQ ID NO: 90270 - DNA, 6875 bp, Artificial Sequence
  derived and/or modified sequence
atggacgaagaagaggacggagctggtgccgaggaaagtgggcagcccaggtccttcatgagattgaatgacctgtctggcgctggtggcaggcctggccctggtagcgcagagaaggatcctgggtccgctgactctgaggcagagggtttaccatatcctgcccttgctcctgtggttttcttctatctcagccaagactcacggcctcgttcctggtgcttgagaactgtttgcaatccttggtttgagcggatctccatgctagtgatcttgctgaactgcgttaccctgggcatgttcaggccttgtgaggacatcgcgtgcgattcccagaggtgtcggatccttcaagcctttgacgactttatcttcgcattcttcgctgttgaaatggtggttaagatggttgcgctgggtatcttcggaaagaaatgttatcttggggacacctggaaccgcctggattttttcattgttatcgcgggtatgctggagtattcgcttgacctacaaaatgtgtccttcagcgcggttcggacagtacgtgtcctccgtccactgcgggcaatcaatcgggtaccttccatgcgaatcttagtgacccttctcctggatactcttccaatgttggggaacgtgctgctcttatgctttttcgtgttttttatcttcgggattgtgggcgttcagctatgggcaggactcctgcgcaaccgctgttttttgcctgaaaattttagtctgcccctgagtgtagatctggagcgatactaccagaccgaaaacgaagacgagtccccattcatatgttcccaaccgagagaaaatggtatgaggagttgcagatctgtaccaacccttcgcggtgacggcggtggaggtccaccttgtggacttgattatgaagcctataattctagctccaataccacttgcgtgaattggaatcagtattacactaactgtagcgctggcgaacataatcccttcaagggtgcaatcaatttcgataacattggctatgcttggatcgctattttccaggtgatcaccctcgagggatgggttgatattatgtacttcgtgatggacgcccactcattttataacttcatctacttcatcttacttattatagtaggaagctttttcatgatcaacctttgtctggtcgtgattgccacacagtttagcgagactaagcaacgagaaagtcaactgatgcgcgagcagagggtcagattcctgtctaatgccagcaccctggccagcttctcagagccaggatcctgttacgaggagctcttgaagtatcttgtttacatccttcggaaagccgcaaggcggctagcccaggtctcccgagcagccggtgtgcgtgtcggcttattatcaagccctgctccattgggcggacaagaaactcagcccagcagttcctgttccagaagtcatcgccgtctgagcgttcaccatttggttcaccatcaccatcatcaccaccaccactaccacctggggaacgggactctcagggctccccgtgcatcgccggagatccaagaccgggacgctaacgggtcacggcgattgatgctgccccctccctcgacccctgctttgtctggtgctccgcctggaggagccgaaagcgtgcacagcttttatcacgctgactgccacctcgagcctgttcgttgtcaggctccacctccgcgtagtccttccgaagccagtggcaggaccgtcgggtccgggaaggtttacccaaccgtacacacctcccctcctccagaaacacttaaagagaaagccctggtggaagtcgcggcatctagtgggccaccaaccctcacttccctgaacatcccgccaggcccatattcctccatgcacaagctgctggagactcagtctacaggagcatgtcagagcagttgtaaaatttcttcaccttgtctaaaggcagatagtggagcttgtggtccggattcttgcccctattgtgcaagagccggtgccggagaagttgagctggccgatagggagatgccagacagtgactccgaagctgtgtatgaattcactcaggacgcacaacactccgacttgcgagacccacactcaagaagacagcggtccctgggtccggacgcagagcccagttctgtcttagcattctggcgcctcatatgtgacacttttcgcaaaatcgtggattccaagtactttgggcgtggcatcatgatagccatcctggtcaacacactgagcatgggcattgaataccatgaacaaccagaagagttgactaacgccttagagatatcgaacatcgttttcactagcctgttcgccctggaaatgttgcttaaactccttgtttatgggccattcgggtacatcaaaaacccctataacatctttgatggcgttatcgtcgtgatcagtgtgtgggaaatcgtgggccagcagggtggcggactgtccgtgcttagaaccttcaggctaatgcgggttttgaaactggttagattcctgcccgctcttcagcggcagctggtagtcctcatgaagactatggacaatgtggccaccttttgcatgcttctgatgcttttcatcttcattttctctattctgggaatgcatctgttcgggtgtaagttcgctagtgaaagagacggagacactcttccagacagaaagaacttcgacagcctgctgtgggcaatcgtcactgtgtttcagattttgacacaggaggactggaacaaggtcctttataacggcatggcgagcacgtctagctgggcagctctgtactttattgctctgatgacttttggcaactacgtcctgtttaacttgctcgtggccatcctggtggagggcttccaggccgaggagatcagcaaacgcgaagatgcctcaggccagctaagctgtatccaactgcccgtcgacagtcagggcggtgatgcgaacaaaagtgagtccgagcccgattttttttcaccaagtctggatggggacggcgaccggaaaaaatgtctggctctggtgagccttggtgagcatcccgaattaaggaagtcacttttaccgccactaattattcacactgcagctacccccatgagcctgcccaagagcactagcactggcttgggcgaagctctcggacctgcctcccggagaacttcctcatctggaagcgccgagcctggcgctgcccacgaaatgaagagtcctccctcagcacggtcaagccctcatagtccatggagcgcagcgtcttcatggaccagccgcaggagttccagaaattccttgggtagagcccctagtctgaagcggaggtccccctccggcgaaaggaggtcactgctgagcggtgaggggcaagagtctcaagacgaggaagagagtagcgaagaagagcgcgctagcccagccggatcagaccatcgacaccgcggatctttagaacgggaagctaagtcttctttcgacctgcctgatacactgcaggtacccggtcttcatcgaacagcatcaggcagaggatcagcaagtgagcatcaggattgcaatggtaagagcgcaagcggacggctggccagagctctgagacccgacgaccccccactggatggtgacgacgcagacgatgaagggaacctcagcaagggagaacgtgtcagagcctggattcgtgcgagactgccggcatgttgcctagagcgagatagctggtccgcttatatatttccccctcaatcccgctttcgactgctttgtcaccgcattatcacccacaagatgttcgaccatgttgttctggtcattatctttctgaattgtataaccattgccatggagagacccaaaatcgatccacactccgcagagaggatttttctgacactctctaattacatatttactgcagtttttcttgctgagatgacagtaaaggtggtggcactgggctggtgtttcggcgaacaagcatatcttcgatcatcttggaatgtgctcgacggccttttagttctgattagcgtgattgatatcctggtgagcatggtctccgactctggaacaaagatcctgggaatgctgagggtcctcaggctgcttcgcacattgcggccacttagagtcattagccgggcacaaggcctgaaactggtggttgagacactgatgagcagtcttaaacccattgggaacatcgtggtgatatgttgcgccttcttcatcatttttggaattcttggggttcagctctttaaaggcaaattcttcgtatgtcaaggggaggatacaagaaacattaccaacaagagcgactgcgctgaagcgtcttatcgctgggtcaggcacaaatacaactttgataatctgggccaggctctgatgtccctttttgtgttggcttctaaggatggatgggtggacatcatgtatgacggcctggacgccgtgggcgtggatcagcagcctatcatgaatcacaatccttggatgcttctgtatttcataagctttcttctgattgtggcgttctttgtactgaatatgtttgtcggcgtcgtcgtggaaaacttccacaaatgccggcagcaccaggaggaggaggaggccagacgacgcgaagaaaagcgactcagacgactagagaagaaacgcagatctaaagagaagcagatggcagatctgatgctggacgacgtcatagcctcggggagcagtgcctccgcagcgagtgaggcacaatgcaaaccttactattctgattactctcgtttccggctgttggttcatcatctctgcaccagtcattatctggatttgttcattaccggagtgattgggttgaatgtcgtaactatggctatggagcactaccaacagcctcaaatcttggatgaagctctgaagatctgcaattacatcttcacagtgatcttcgtgctggagtcagtgttcaaactggttgcttttggtttccgccgattctttcaagacagatggaaccaactggacctagccatcgtccttctgtctatcatggggatcaccctggaggagattgaggtgaatgcttcacttcctattaatcctacaatcatccggattatgagggtcctgcgcatcgccagggttcttaagctgctcaaaatggcagtcggaatgagagcactcctggatacagtgatgcaggctctgccgcaggtcggaaaccttgggctcctgtttatgttgctgtttttcatcttcgccgcactgggcgtggagctattcggggatctagaatgcgacgaaacacatccctgcgagggattgggcaggcatgctacatttcgcaactttggaatggcctttctgacccttttccgcgtgtccactggcgacaactggaatggcatcatgaaggacaccttacgggattgtgatcaggaatcaacttgctataacacagtcatttcccctatttacttcgtgtccttcgtgctgaccgcacaattcgtcctggtcaatgtggtaatcgccgtgctgatgaagcatttagaagagtcaaacaaagaggcaaaagaggaggctgaattggaggcagagctagagttggaaatgaagactctgtcaccccaaccgcacagccctcttgggagtcctttcctgtggcccggagtggaggggccagatagccccgatagccctaaacccggagccctgcaccccgctgcgcacgctaggtctgctagtcacttcagtctggagcaccccaccatgcagcctcacccaacggagttgcctggacctgatcttctgacagtccggaaaagtggtgtcagtcgcacccatagcttacctaacgattcgtatatgtgccggcacggttcaactgccgaggggccactggggcaccgcggatggggattgccaaaagcacagagcggctctgtactttccgtacatagccagcccgctgacacatcctacatactgcagctacccaaggatgcccctcacctcttgcagccacattcagcgccaacatggggcacgatcccaaagttgccccctcctggtcgttcaccccttgcgcagcgcccactgaggagacaagcggctataagaaccgatagcttggacgttcaggggctcgggtctcgcgaagacctattagccgaagtcagcggcccttccccgcctttagcacgtgcttactccttctgggggcagtcaagcacacaagcacaacaacactcgcgctcgcactcgaaaatatctaagcatatgacgcctcccgctccctgccctggccctgagcctaactggggaaagggacccccagagactagatccagcctagaacttgatacagagctgagttggatttcaggagacctgttgccacccggtggccaggaggaaccaccctcccccagggacctgaaaaaatgttacagcgtggaagcccagagttgccagcggcgtccaacatcatggttggatgaacaaagacgtcacagcattgcggtgagctgcttggactctggctctcagcctcacctagggacagacccctcgaatcttggagggcaaccactgggaggtcccggttcacgccctaaaaagaaactgtctccgccttccattactatagatccaccagaaagccagggtcctcgaacccctccaagccctggcatctgcctgcggagaagggctccctctagcgatagcaaggaccctctcgccagcggaccacctgattccatggccgctagtccaagccctaagaaggacgtgttgagtttgagcgggctgtccagcgaccctgcagatctggatccata

SEQ ID NO: 90271 - DNA, 6891 bp, Artificial Sequence
  derived and/or modified sequence
atggacgaggaggaggatggagcgggcgccgaggagtcgggacagccccggagcttcatgcggctcaacgacctgtcgggggccgggggccggccggggccggggtcagcagaaaaggacccgggcagcgcggactccgaggcggaggggctgccgtacccggcgctggccccggtggttttcttctacttgagccaggacagccgcccgcggagctggtgtctccgcacggtctgtaacccctggtttgagcgcatcagcatgttggtcatccttctcaactgcgtgaccctgggcatgttccggccatgcgaggacatcgcctgtgactcccagcgctgccggatcctgcaggcctttgatgacttcatctttgccttctttgccgtggagatggtggtgaagatggtggccttgggcatctttgggaaaaagtgttacctgggagacacttggaaccggcttgactttttcatcgtcatcgcagggatgctggagtactcgctggacctgcagaacgtcagcttctcagctgtcaggacagtccgtgtgctgcgaccgctcagggccattaaccgggtgcccagcatgcgcatccttgtcacgttgctgctggatacgctgcccatgctgggcaacgtcctgctgctctgcttcttcgtcttcttcatcttcggcatcgtcggcgtccagctgtgggcagggctgcttcggaaccgatgcttcctacctgagaatttcagcctccccctgagcgtggacctggagcgctattaccagacagagaacgaggatgagagccccttcatctgctcccagccacgcgagaacggcatgcggtcctgcagaagcgtgcccacgctgcgcggggacgggggcggtggcccaccttgcggtctggactatgaggcctacaacagctccagcaacaccacctgtgtcaactggaaccagtactacaccaactgctcagcgggggagcacaaccccttcaagggcgccatcaactttgacaacattggctatgcctggatcgccatcttccaggtcatcacgctggagggctgggtcgacatcatgtactttgtgatggatgctcattccttctacaatttcatctacttcatcctcctcatcatcgtgggctccttcttcatgatcaacctgtgcctggtggtgattgccacgcagttctcagagaccaagcagcgggaaagccagctgatgcgggagcagcgtgtgcggttcctgtccaacgccagcaccctggctagcttctctgagcccggcagctgctatgaggagctgctcaagtacctggtgtacatccttcgtaaggcagcccgcaggctggctcaggtctctcgggcagcaggtgtgcgggttgggctgctcagcagcccagcacccctcgggggccaggagacccagcccagcagcagctgctctcgctcccaccgccgcctatccgtccaccacctggtgcaccaccaccaccaccatcaccaccactaccacctgggcaatgggacgctcagggccccccgggccagcccggagatccaggacagggatgccaatgggtcccgccggctcatgctgccaccaccctcgacgcctgccctctccggggccccccctggtggcgcagagtctgtgcacagcttctaccatgccgactgccacttagagccagtccgctgccaggcgccccctcccaggtccccatctgaggcatccggcaggactgtgggcagcgggaaggtgtatcccaccgtgcacaccagccctccaccggagacgctgaaggagaaggcactagtagaggtggctgccagctctgggcccccaaccctcaccagcctcaacatcccacccgggccctacagctccatgcacaagctgctggagacacagagtacaggtgcctgccaaagctcttgcaagatctccagcccttgcttgaaagcagacagtggagcctgtggtccagacagctgcccctactgtgcccgggccggggcaggggaggtggagctcgccgaccgtgaaatgcctgactcagacagcgaggcagtttatgagttcacacaggatgcccagcacagcgacctccgggacccccacagccggcggcaacggagcctgggcccagatgcagagcccagctctgtgctggccttctggaggctaatctgtgacaccttccgaaagattgtggacagcaagtactttggccggggaatcatgatcgccatcctggtcaacacactcagcatgggcatcgaataccacgagcagcccgaggagcttaccaacgccctagaaatcagcaacatcgtcttcaccagcctctttgccctggagatgctgctgaagctgcttgtgtatggtccctttggctacatcaagaatccctacaacatcttcgatggtgtcattgtggtcatcagcgtgtgggagatcgtgggccagcaggggggcggcctgtcggtgctgcggaccttccgcctgatgcgtgtgctgaagctggtgcgcttcctgccggcgctgcagcggcagctggtggtgctcatgaagaccatggacaacgtggccaccttctgcatgctgcttatgctcttcatcttcatcttcagcatcctgggcatgcatctcttcggctgcaagtttgcctctgagcgggatggggacaccctgccagaccggaagaattttgactccttgctctgggccatcgtcactgtctttcagatcctgacccaggaggactggaacaaagtcctctacaatggtatggcctccacgtcgtcctgggcggccctttatttcattgccctcatgaccttcggcaactacgtgctcttcaatttgctggtcgccattctggtggagggcttccaggcggaggaaatcagcaaacgggaagatgcgagtggacagttaagctgtattcagctgcctgtcgactcccaggggggagatgccaacaagtccgaatcagagcccgatttcttctcacccagcctggatggtgatggggacaggaagaagtgcttggccttggtgtccctgggagagcacccggagctgcggaagagcctgctgccgcctctcatcatccacacggccgccacacccatgtcgctgcccaagagcaccagcacgggcctgggcgaggcgctgggccctgcgtcgcgccgcaccagcagcagcgggtcggcagagcctggggcggcccacgagatgaagtcaccgcccagcgcccgcagctctccgcacagcccctggagcgctgcaagcagctggaccagcaggcgctccagccggaacagcctcggccgtgcacccagcctgaagcggagaagcccaagtggagagcggcggtccctgttgtcgggagaaggccaggagagccaggatgaagaggagagctcagaagaggagcgggccagccctgcgggcagtgaccatcgccacagggggtccctggagcgggaggccaagagttcctttgacctgccagacacactgcaggtgccagggctgcatcgcactgccagtggccgagggtctgcttctgagcaccaggactgcaatggcaagtcggcttcagggcgcctggcccgggccctgcggcctgatgaccccccactggatggggatgacgccgatgacgagggcaacctgagcaaaggggaacgggtccgcgcgtggatccgagcccgactccctgcctgctgcctcgagcgagactcctggtcagcctacatcttccctcctcagtccaggttccgcctcctgtgtcaccggatcatcacccacaagatgttcgaccacgtggtccttgtcatcatcttccttaactgcatcaccatcgccatggagcgccccaaaattgacccccacagcgctgaacgcatcttcctgaccctctccaattacatcttcaccgcagtctttctggctgaaatgacagtgaaggtggtggcactgggctggtgcttcggggagcaggcgtacctgcggagcagttggaacgtgctggacgggctgttggtgctcatctccgtcatcgacattctggtgtccatggtctctgacagcggcaccaagatcctgggcatgctgagggtgctgcggctgctgcggaccctgcgcccgctcagggtgatcagccgggcgcaggggctgaagctggtggtggagacgctgatgtcctcactgaaacccatcggcaacattgtagtcatctgctgtgccttcttcatcattttcggcatcttgggggtgcagctcttcaaagggaagtttttcgtgtgccagggcgaggataccaggaacatcaccaataaatcggactgtgccgaggccagttaccggtgggtccggcacaagtacaactttgacaaccttggccaggccctgatgtccctgttcgttttggcctccaaggatggttgggtggacatcatgtacgatgggctggatgctgtgggcgtggaccagcagcccatcatgaaccacaacccctggatgctgctgtacttcatctcgttcctgctcattgtggccttctttgtcctgaacatgtttgtgggtgtggtggtggagaacttccacaagtgtcggcagcaccaggaggaagaggaggcccggcggcgggaggagaagcgcctacgaagactggagaaaaagagaaggagtaaggagaagcagatggctgatctaatgctggacgatgtaattgcttccggcagctcagccagcgctgcgtcagaagcccagtgcaaaccttactactccgactactcccgcttccggctcctcgtccaccacttgtgcaccagccactacctggacctcttcatcacaggtgtcatcgggctgaacgtggtcaccatggccatggagcactaccagcagccccagattctggatgaggctctgaagatctgcaactacatcttcactgtcatctttgtcttggagtcagttttcaaacttgtggcctttggtttccgtcggttcttccaggacaggtggaaccagctggacctggccattgtgctgctgtccatcatgggcatcacgctggaggaaatcgaggtcaacgcctcgctgcccatcaaccccaccatcatccgcatcatgagggtgctgcgcattgcccgagtgctgaagctgctgaagatggctgtgggcatgcgggcgctgctggacacggtgatgcaggccctgccccaggtggggaacctgggacttctcttcatgttgttgtttttcatctttgcagctctgggcgtggagctctttggagacctggagtgtgacgagacacacccctgtgagggcctgggccgtcatgccacctttcggaactttggcatggccttcctaaccctcttccgagtctccacaggtgacaattggaatggcattatgaaggacaccctccgggactgtgaccaggagtccacctgctacaacacggtcatctcgcctatctactttgtgtccttcgtgctgacggcccagttcgtgctagtcaacgtggtgatcgccgtgctgatgaagcacctggaggagagcaacaaggaggccaaggaggaggccgagctagaggctgagctggagctggagatgaagaccctcagcccccagccccactcgccactgggcagccccttcctctggcctggggtcgagggccccgacagccccgacagccccaagcctggggctctgcacccagcggcccacgcgagatcagcctcccacttttccctggagcaccccacgatgcagccccaccccacggagctgccaggaccagacttactgactgtgcggaagtctggggtcagccgaacgcactctctgcccaatgacagctacatgtgtcggcatgggagcactgccgaggggcccctgggacacaggggctgggggctccccaaagctcagtcaggctccgtcttgtccgttcactcccagccagcagataccagctacatcctgcagcttcccaaagatgcacctcatctgctccagccccacagcgccccaacctggggcaccatccccaaactgcccccaccaggacgctcccctttggctcagaggccactcaggcgccaggcagcaataaggactgactccttggacgttcagggtctgggcagccgggaagacctgctggcagaggtgagtgggccctccccgcccctggcccgggcctactctttctggggccagtcaagtacccaggcacagcagcactcccgcagccacagcaagatctccaagcacatgaccccgccagccccttgcccaggcccagaacccaactggggcaagggccctccagagaccagaagcagcttagagttggacacggagctgagctggatttcaggagacctcctgccccctggcggccaggaggagcccccatccccacgggacctgaagaagtgctacagcgtggaggcccagagctgccagcgccggcctacgtcctggctggatgagcagaggagacactctatcgccgtcagctgcctggacagcggctcccaaccccacctgggcacagacccctctaaccttgggggccagcctcttggggggcctgggagccggcccaagaaaaaactcagcccgcctagtatcaccatagacccccccgagagccaaggtcctcggaccccgcccagccctggtatctgcctccggaggagggctccgtccagcgactccaaggatcccttggcctctggcccccctgacagcatggctgcctcgccctccccaaagaaagatgtgctgagtctctccggtttatcctctgacccagcagacctggacccctgagtcctgccccacttt

SEQ ID NO: 90272 - protein, 2287 aa, Artificial Sequence
  derived and/or modified sequence
MDEEEDGAGAEESGQPRSFMRLNDLSGAGGRPGPGSAEKDPGSADSEAEGLPYPALAPVVFFYLSQDSRPRSWCLRTVCNPWFERISMLVILLNCVTLGMFRPCEDIACDSQRCRILQAFDDFIFAFFAVEMVVKMVALGIFGKKCYLGDTWNRLDFFIVIAGMLEYSLDLQNVSFSAVRTVRVLRPLRAINRVPSMRILVTLLLDTLPMLGNVLLLCFFVFFIFGIVGVQLWAGLLRNRCFLPENFSLPLSVDLERYYQTENEDESPFICSQPRENGMRSCRSVPTLRGDGGGGPPCGLDYEAYNSSSNTTCVNWNQYYTNCSAGEHNPFKGAINFDNIGYAWIAIFQVITLEGWVDIMYFVMDAHSFYNFIYFILLIIVGSFFMINLCLVVIATQFSETKQRESQLMREQRVRFLSNASTLASFSEPGSCYEELLKYLVYILRKAARRLAQVSRAAGVRVGLLSSPAPLGGQETQPSSSCSRSHRRLSVHHLVHHHHHHHHHYHLGNGTLRAPRASPEIQDRDANGSRRLMLPPPSTPALSGAPPGGAESVHSFYHADCHLEPVRCQAPPPRSPSEASGRTVGSGKVYPTVHTSPPPETLKEKALVEVAASSGPPTLTSLNIPPGPYSSMHKLLETQSTGACQSSCKISSPCLKADSGACGPDSCPYCARAGAGEVELADREMPDSDSEAVYEFTQDAQHSDLRDPHSRRQRSLGPDAEPSSVLAFWRLICDTFRKIVDSKYFGRGIMIAILVNTLSMGIEYHEQPEELTNALEISNIVFTSLFALEMLLKLLVYGPFGYIKNPYNIFDGVIVVISVWEIVGQQGGGLSVLRTFRLMRVLKLVRFLPALQRQLVVLMKTMDNVATFCMLLMLFIFIFSILGMHLFGCKFASERDGDTLPDRKNFDSLLWAIVTVFQILTQEDWNKVLYNGMASTSSWAALYFIALMTFGNYVLFNLLVAILVEGFQAEEISKREDASGQLSCIQLPVDSQGGDANKSESEPDFFSPSLDGDGDRKKCLALVSLGEHPELRKSLLPPLIIHTAATPMSLPKSTSTGLGEALGPASRRTSSSGSAEPGAAHEMKSPPSARSSPHSPWSAASSWTSRRSSRNSLGRAPSLKRRSPSGERRSLLSGEGQESQDEEESSEEERASPAGSDHRHRGSLEREAKSSFDLPDTLQVPGLHRTASGRGSASEHQDCNGKSASGRLARALRPDDPPLDGDDADDEGNLSKGERVRAWIRARLPACCLERDSWSAYIFPPQSRFRLLCHRIITHKMFDHVVLVIIFLNCITIAMERPKIDPHSAERIFLTLSNYIFTAVFLAEMTVKVVALGWCFGEQAYLRSSWNVLDGLLVLISVIDILVSMVSDSGTKILGMLRVLRLLRTLRPLRVISRAQGLKLVVETLMSSLKPIGNIVVICCAFFIIFGILGVQLFKGKFFVCQGEDTRNITNKSDCAEASYRWVRHKYNFDNLGQALMSLFVLASKDGWVDIMYDGLDAVGVDQQNFHKCRQHQEEEEARRREEKRLRRLEKKRRSKEKQMAEAQCKPYYSDYSRFRLLVHHLCTSHYLDLFITGVIGLNVVTMAMEHYQQPQILDEALKICNYIFTVIFVLESVFKLVAFGFRRFFQDRWNQLDLAIVLLSIMGITLEEIEVNASLPINPTIIRIMRVLRIARVLKLLKMAVGMRALLDTVMQALPQVGNLGLLFMLLFFIFAALGVELFGDLECDETHPCEGLGRHATFRNFGMAFLTLFRVSTGDNWNGIMKDTLRDCDQESTCYNTVISPIYFVSFVLTAQFVLVNVVIAVLMKHLEESNKEAKEEAELEAELELEMKTLSPQPHSPLGSPFLWPGVEGPDSPDSPKPGALHPAAHARSASHFSLEHPTDRQLFDTISLLIQGSLEWELKLMDELAGPGGQPSAFPSAPSLGGSDPQMQPHPTELPGPDLLTVRKSGVSRTHSLPNDSYMCRHGSTAEGPLGHRGWGLPKAQSGSVLSVHSQPADTSYILQLPKDAPHLLQPHSAPTWGTIPKLPPPGRSPLAQRPLRRQAAIRTDSLDVQGLGSREDLLAEVSGPSPPLARAYSFWGQSSTQAQQHSRSHSKISKHMTPPAPCPGPEPNWGKGPPETRSSLELDTELSWISGDLLPPGGQEEPPSPRDLKKCYSVEAQSCQRRPTSWLDEQRRHSIAVSCLDSGSQPHLGTDPSNLGGQPLGGPGSRPKKKLSPPSITIDPPESQGPRTPPSPGICLRRRAPSSDSKDPLASGPPDSMAASPSPKKDVLSLSGLSSDPADLDP

SEQ ID NO: 90273 - DNA, 6864 bp, Artificial Sequence
  derived and/or modified sequence
atggacgaggaggaggacggcgccggcgccgaggagagcggccagcccagaagcttcatgagactgaacgacctgagcggcgccggcggcagacccggccccggcagcgccgagaaggaccccggcagcgccgacagcgaggccgagggcctgccctaccccgccctggcccccgtggtgttcttctacctgagccaggacagcagacccagaagctggtgcctgagaaccgtgtgcaacccctggttcgagagaatcagcatgctggtgatcctgctgaactgcgtgaccctgggcatgttcagaccctgcgaggacatcgcctgcgacagccagagatgcagaatcctgcaggccttcgacgacttcatcttcgccttcttcgccgtggagatggtggtgaagatggtggccctgggcatcttcggcaagaagtgctacctgggcgacacctggaacagactggacttcttcatcgtgatcgccggcatgctggagtacagcctggacctgcagaacgtgagcttcagcgccgtgagaaccgtgagagtgctgagacccctgagagccatcaacagagtgcccagcatgagaatcctggtgaccctgctgctggacaccctgcccatgctgggcaacgtgctgctgctgtgcttcttcgtgttcttcatcttcggcatcgtgggcgtgcagctgtgggccggcctgctgagaaacagatgcttcctgcccgagaacttcagcctgcccctgagcgtggacctggagagatactaccagaccgagaacgaggacgagagccccttcatctgcagccagcccagagagaacggcatgagaagctgcagaagcgtgcccaccctgagaggcgacggcggcggcggccccccctgcggcctggactacgaggcctacaacagcagcagcaacaccacctgcgtgaactggaaccagtactacaccaactgcagcgccggcgagcacaaccccttcaagggcgccatcaacttcgacaacatcggctacgcctggatcgccatcttccaggtgatcaccctggagggctgggtggacatcatgtacttcgtgatggacgcccacagcttctacaacttcatctacttcatcctgctgatcatcgtgggcagcttcttcatgatcaacctgtgcctggtggtgatcgccacccagttcagcgagaccaagcagagagagagccagctgatgagagagcagagagtgagattcctgagcaacgccagcaccctggccagcttcagcgagcccggcagctgctacgaggagctgctgaagtacctggtgtacatcctgagaaaggccgccagaagactggcccaggtgagcagagccgccggcgtgagagtgggcctgctgagcagccccgcccccctgggcggccaggagacccagcccagcagcagctgcagcagaagccacagaagactgagcgtgcaccacctggtgcaccaccaccaccaccaccaccaccactaccacctgggcaacggcaccctgagagcccccagagccagccccgagatccaggacagagacgccaacggcagcagaagactgatgctgcccccccccagcacccccgccctgagcggcgccccccccggcggcgccgagagcgtgcacagcttctaccacgccgactgccacctggagcccgtgagatgccaggcccccccccccagaagccccagcgaggccagcggcagaaccgtgggcagcggcaaggtgtaccccaccgtgcacaccagccccccccccgagaccctgaaggagaaggccctggtggaggtggccgccagcagcggcccccccaccctgaccagcctgaacatcccccccggcccctacagcagcatgcacaagctgctggagacccagagcaccggcgcctgccagagcagctgcaagatcagcagcccctgcctgaaggccgacagcggcgcctgcggccccgacagctgcccctactgcgccagagccggcgccggcgaggtggagctggccgacagagagatgcccgacagcgacagcgaggccgtgtacgagttcacccaggacgcccagcacagcgacctgagagacccccacagcagaagacagagaagcctgggccccgacgccgagcccagcagcgtgctggccttctggagactgatctgcgacaccttcagaaagatcgtggacagcaagtacttcggcagaggcatcatgatcgccatcctggtgaacaccctgagcatgggcatcgagtaccacgagcagcccgaggagctgaccaacgccctggagatcagcaacatcgtgttcaccagcctgttcgccctggagatgctgctgaagctgctggtgtacggccccttcggctacatcaagaacccctacaacatcttcgacggcgtgatcgtggtgatcagcgtgtgggagatcgtgggccagcagggcggcggcctgagcgtgctgagaaccttcagactgatgagagtgctgaagctggtgagattcctgcccgccctgcagagacagctggtggtgctgatgaagaccatggacaacgtggccaccttctgcatgctgctgatgctgttcatcttcatcttcagcatcctgggcatgcacctgttcggctgcaagttcgccagcgagagagacggcgacaccctgcccgacagaaagaacttcgacagcctgctgtgggccatcgtgaccgtgttccagatcctgacccaggaggactggaacaaggtgctgtacaacggcatggccagcaccagcagctgggccgccctgtacttcatcgccctgatgaccttcggcaactacgtgctgttcaacctgctggtggccatcctggtggagggcttccaggccgaggagatcagcaagagagaggacgccagcggccagctgagctgcatccagctgcccgtggacagccagggcggcgacgccaacaagagcgagagcgagcccgacttcttcagccccagcctggacggcgacggcgacagaaagaagtgcctggccctggtgagcctgggcgagcaccccgagctgagaaagagcctgctgccccccctgatcatccacaccgccgccacccccatgagcctgcccaagagcaccagcaccggcctgggcgaggccctgggccccgccagcagaagaaccagcagcagcggcagcgccgagcccggcgccgcccacgagatgaagagcccccccagcgccagaagcagcccccacagcccctggagcgccgccagcagctggaccagcagaagaagcagcagaaacagcctgggcagagcccccagcctgaagagaagaagccccagcggcgagagaagaagcctgctgagcggcgagggccaggagagccaggacgaggaggagagcagcgaggaggagagagccagccccgccggcagcgaccacagacacagaggcagcctggagagagaggccaagagcagcttcgacctgcccgacaccctgcaggtgcccggcctgcacagaaccgccagcggcagaggcagcgccagcgagcaccaggactgcaacggcaagagcgccagcggcagactggccagagccctgagacccgacgacccccccctggacggcgacgacgccgacgacgagggcaacctgagcaagggcgagagagtgagagcctggatcagagccagactgcccgcctgctgcctggagagagacagctggagcgcctacatcttccccccccagagcagattcagactgctgtgccacagaatcatcacccacaagatgttcgaccacgtggtgctggtgatcatcttcctgaactgcatcaccatcgccatggagagacccaagatcgacccccacagcgccgagagaatcttcctgaccctgagcaactacatcttcaccgccgtgttcctggccgagatgaccgtgaaggtggtggccctgggctggtgcttcggcgagcaggcctacctgagaagcagctggaacgtgctggacggcctgctggtgctgatcagcgtgatcgacatcctggtgagcatggtgagcgacagcggcaccaagatcctgggcatgctgagagtgctgagactgctgagaaccctgagacccctgagagtgatcagcagagcccagggcctgaagctggtggtggagaccctgatgagcagcctgaagcccatcggcaacatcgtggtgatctgctgcgccttcttcatcatcttcggcatcctgggcgtgcagctgttcaagggcaagttcttcgtgtgccagggcgaggacaccagaaacatcaccaacaagagcgactgcgccgaggccagctacagatgggtgagacacaagtacaacttcgacaacctgggccaggccctgatgagcctgttcgtgctggccagcaaggacggctgggtggacatcatgtacgacggcctggacgccgtgggcgtggaccagcagaacttccacaagtgcagacagcaccaggaggaggaggaggccagaagaagagaggagaagagactgagaagactggagaagaagagaagaagcaaggagaagcagatggccgaggcccagtgcaagccctactacagcgactacagcagattcagactgctggtgcaccacctgtgcaccagccactacctggacctgttcatcaccggcgtgatcggcctgaacgtggtgaccatggccatggagcactaccagcagccccagatcctggacgaggccctgaagatctgcaactacatcttcaccgtgatcttcgtgctggagagcgtgttcaagctggtggccttcggcttcagaagattcttccaggacagatggaaccagctggacctggccatcgtgctgctgagcatcatgggcatcaccctggaggagatcgaggtgaacgccagcctgcccatcaaccccaccatcatcagaatcatgagagtgctgagaatcgccagagtgctgaagctgctgaagatggccgtgggcatgagagccctgctggacaccgtgatgcaggccctgccccaggtgggcaacctgggcctgctgttcatgctgctgttcttcatcttcgccgccctgggcgtggagctgttcggcgacctggagtgcgacgagacccacccctgcgagggcctgggcagacacgccaccttcagaaacttcggcatggccttcctgaccctgttcagagtgagcaccggcgacaactggaacggcatcatgaaggacaccctgagagactgcgaccaggagagcacctgctacaacaccgtgatcagccccatctacttcgtgagcttcgtgctgaccgcccagttcgtgctggtgaacgtggtgatcgccgtgctgatgaagcacctggaggagagcaacaaggaggccaaggaggaggccgagctggaggccgagctggagctggagatgaagaccctgagcccccagccccacagccccctgggcagccccttcctgtggcccggcgtggagggccccgacagccccgacagccccaagcccggcgccctgcaccccgccgcccacgccagaagcgccagccacttcagcctggagcaccccaccgacagacagctgttcgacaccatcagcctgctgatccagggcagcctggagtgggagctgaagctgatggacgagctggccggccccggcggccagcccagcgccttccccagcgcccccagcctgggcggcagcgacccccagatgcagccccaccccaccgagctgcccggccccgacctgctgaccgtgagaaagagcggcgtgagcagaacccacagcctgcccaacgacagctacatgtgcagacacggcagcaccgccgagggccccctgggccacagaggctggggcctgcccaaggcccagagcggcagcgtgctgagcgtgcacagccagcccgccgacaccagctacatcctgcagctgcccaaggacgccccccacctgctgcagccccacagcgcccccacctggggcaccatccccaagctgcccccccccggcagaagccccctggcccagagacccctgagaagacaggccgccatcagaaccgacagcctggacgtgcagggcctgggcagcagagaggacctgctggccgaggtgagcggccccagcccccccctggccagagcctacagcttctggggccagagcagcacccaggcccagcagcacagcagaagccacagcaagatcagcaagcacatgaccccccccgccccctgccccggccccgagcccaactggggcaagggcccccccgagaccagaagcagcctggagctggacaccgagctgagctggatcagcggcgacctgctgccccccggcggccaggaggagccccccagccccagagacctgaagaagtgctacagcgtggaggcccagagctgccagagaagacccaccagctggctggacgagcagagaagacacagcatcgccgtgagctgcctggacagcggcagccagccccacctgggcaccgaccccagcaacctgggcggccagcccctgggcggccccggcagcagacccaagaagaagctgagcccccccagcatcaccatcgacccccccgagagccagggccccagaaccccccccagccccggcatctgcctgagaagaagagcccccagcagcgacagcaaggaccccctggccagcggcccccccgacagcatggccgccagccccagccccaagaaggacgtgctgagcctgagcggcctgagcagcgaccccgccgacctggacccctag

SEQ ID NO: 90274 - DNA, 6864 bp, Artificial Sequence
  derived and/or modified sequence
atggatgaagaagaagacggcgcaggcgcggaggagtcagggcagccacgctctttcatgagactcaacgacttgtcaggagccggcgggcgacctggccctggatcagcagagaaagaccccggaagcgccgactccgaggcggagggtctcccctaccccgccctcgccccggtggtgttcttttacctctcccaggacagccgcccccgttcctggtgcctgcgcacagtttgcaatccttggttcgaacgcatctccatgctggtgattctgcttaactgtgtcactttaggcatgtttcgcccttgtgaagatatcgcatgtgactcccaaagatgtagaatactgcaggcctttgatgattttatcttcgcattcttcgctgttgagatggtcgttaaaatggtggccctcgggatctttggtaagaagtgttaccttggtgacacttggaaccggctggacttcttcatcgttatcgcaggtatgttagagtactctcttgacctacagaatgtgtccttcagcgccgttcgtaccgtgagagtgcttaggcctctccgcgccatcaatagagttccgagcatgcggatcctggtaaccctactgctggatactctcccaatgctgggcaacgtactgcttctgtgttttttcgtctttttcatcttcggcatcgttggagtgcagttgtgggccggtctgcttcgtaacaggtgttttctgcccgagaatttctctctaccactcagtgttgacctggagcggtactatcagacggagaacgaggacgagtctcctttcatctgcagtcagccccgagaaaatggaatgcgctcatgcagatcagtacctactttaagaggggacggcggcgggggacctccttgtgggctcgactacgaggcgtataactcctcgtcaaacacgacctgcgtgaattggaatcaatactataccaactgttctgctggtgaacacaaccctttcaagggagctataaatttcgacaatattgggtacgcctggattgctatcttccaggtgataactttggaaggatgggtggatatcatgtattttgtgatggacgcacattcattctataattttatttactttattcttctcatcatcgtggggtcttttttcatgatcaatctgtgcttagttgtcattgcaacccagtttagcgagaccaaacagagagaatcccaacttatgcgcgagcagagggtgaggtttttaagtaatgcgagtactctcgccagtttttcggagcctgggtcctgctacgaagagctgcttaaatatctggtgtacatactgcgcaaagcagctaggcggctggctcaggtgtcaagggcagcaggcgtgcgggtcgggctcctgtctagccctgccccactcgggggtcaggaaactcagccttcatcctcatgtagccggtcgcatcggcgactgtccgtgcaccaccttgtacaccaccaccatcaccaccaccatcactatcacttaggcaacggaaccctccgggctcctagagcctctcctgagatacaggatagagacgccaacggatcccgtagactgatgctgccgccacccagcacccccgctctgtctggtgctccacccggcggtgctgaatcagttcattctttctaccatgccgactgccacctggagcccgttcgctgccaagcaccgccccccaggagcccttccgaagcgagcggaagaaccgtgggtagtggtaaggtctaccctactgttcacacatctcccccacctgagactttgaaagaaaaagccctggtagaagttgcggcaagctccggccccccaactctgaccagcctcaacatccctcctggcccctacagtagcatgcataagttgcttgagactcagtctacaggggcttgtcaaagtagttgcaaaatctcttcgccatgtctgaaagcagactccggagcttgtggccccgattcctgtccctattgcgcacgggccggcgctggagaagtagagctcgccgaccgcgagatgcccgactccgattctgaagccgtgtatgagttcacacaggatgcccaacatagcgatttaagagaccctcacagtcggcgacagcggtccctgggaccggatgcagaaccatccagtgtactggctttctggcgcctcatctgcgacactttccgaaaaattgtggattcaaaatactttggaagaggaatcatgattgccatcctggtaaacacgctctcaatgggtatcgaatatcatgagcaaccggaggagctaacgaacgctctggagatatctaacatcgtctttactagcctctttgctctggagatgcttctcaagctgctcgtgtacggccctttcggatatattaaaaacccctacaacatctttgacggggtgatcgtcgtcattagcgtatgggagatcgttgggcagcagggcggaggcctgagcgtgctccgtactttcaggttgatgcgcgtgttaaagctggtgaggtttctcccagctttacagcgacaactggttgtgctgatgaagacaatggacaacgtggccactttttgcatgttgcttatgctgttcattttcatattttccattctggggatgcacctattcggctgtaaattcgcctcagaacgagacggggacacactgcctgacagaaagaattttgatagtctcctgtgggccatagtgaccgtgttccaaatattgacgcaagaagactggaataaggtgctctacaatggcatggcttcaacctcaagttgggcggccctttattttattgccctgatgacatttggcaactacgtacttttcaatctgctcgtagcaatcctcgttgagggctttcaggcagaagaaattagcaaaagagaagatgccagcggccagttgtcctgtattcagttaccagtggattcccagggcggagacgctaataaatcagagtcagagccagattttttcagtccaagccttgatggggacggggataggaaaaaatgcctggccctggtgagcctgggggagcaccccgaactacgcaagagcctgctgcccccacttatcattcacacagctgccaccccaatgtctctccctaaaagtaccagcacaggattaggagaggcactcggaccagcctcacgtcgaaccagctcctctggctccgcagagccaggggccgcgcatgaaatgaagagcccgccctccgcacggtcttcgccgcacagtccctggtctgctgctagcagctggacctcccgcagaagtagcagaaactctctgggcagggcacccagtctgaaacggcgatccccttccggtgagcgccgttcgcttctgtccggcgaagggcaggagtcacaagacgaggaggagtcctccgaggaagagagggcttcccctgccggaagtgatcacaggcatcgaggcagtcttgagcgtgaggctaaatcttcctttgatcttcctgacacactgcaggtacccggtttacacaggaccgcctctggaaggggaagcgcttcagagcatcaggattgcaacggcaagagcgcttcaggtaggctggcgcgcgccctgcgtcctgacgatcctcccctggatggtgacgacgccgacgacgaaggcaacctctctaagggggagcgcgtgagggcatggatcagagcacgccttccagcatgctgcctcgagcgcgattcctggtccgcatacatattccctccgcaaagtaggttccgacttctttgccatcggataataacacataagatgttcgatcatgtggtgctggtgattatcttccttaactgtattacaattgccatggaaaggcccaagatcgatccgcattccgcagaaaggatcttcctgacactctccaattatatcttcaccgctgtttttctcgcggagatgacagtgaaggtagtggccttggggtggtgcttcggcgagcaggcctatttgagatcttcatggaacgtcctggatgggctgttggttctaatctcagtaatcgacatactggttagcatggtgtcggactctggcactaaaatcctgggcatgctcagggtgctgcgcctcctccgcacgctgcgtcccctgagggttattagcagggcccaggggctaaaattagtggtcgaaacactcatgagcagcctgaaacctatcggtaacatagtggtgatctgttgcgccttttttatcattttcgggatactgggcgtgcagttgtttaaaggaaagttttttgtatgccagggcgaagacactcggaatataaccaataagagcgactgcgcggaggcctcatataggtgggttagacacaaatacaactttgataacctcggacaggcgttaatgtctcttttcgtgttggcgagtaaagatggctgggtggatataatgtacgacgggctggatgccgtaggagtggatcagcagaattttcataaatgtagacagcaccaagaagaggaagaggcccggcggcgggaggaaaagcggttgcgcagactcgaaaagaagcgaagatcgaaggaaaagcaaatggcagaggctcaatgcaagccatattattctgattatagtcgttttagactgttagtgcatcatctatgtaccagtcattacctagatttatttattacaggtgtgattggcctgaacgtcgtaactatggctatggagcactaccagcagcctcagatactcgacgaggccctcaaaatctgtaattacatctttactgtgatttttgtgttggaaagcgtatttaagctagtggcctttggctttagacgctttttccaggatcggtggaatcaactcgacctggctattgtattgttatccattatgggaatcacattggaggaaatcgaagtgaacgctagtttacccataaatccaacaattataagaataatgcgggtcctgcgaatcgccagagtgctgaagcttctgaaaatggcggtgggaatgcgggcccttctcgacacagtgatgcaggccctcccccaggttggcaacttgggcctactgtttatgctgctcttcttcatatttgctgctttaggagtggaactgttcggggaccttgaatgcgacgaaactcatccctgcgaaggcctggggcgacacgcgacttttaggaactttgggatggccttccttaccttgtttagagttagcaccggagataattggaacggaattatgaaagataccttgagagactgtgaccaggaaagcacgtgttacaataccgtgatttcccctatctatttcgtgtcattcgtgttgaccgcgcagtttgtactggtgaacgtggtgattgcagttctgatgaagcacttggaggaatcgaataaagaggcgaaggaggaagctgaactcgaagctgagctcgaactggagatgaaaaccctgagtccgcaaccccatagtcccttgggatccccattcctctggccaggggtggagggaccggattctcctgattccccaaagcctggggccttgcatccggcagctcatgccagatctgcctcacacttctcactggaacaccctaccgaccggcagttgttcgatactatttccttgctcattcagggtagcctggaatgggagcttaaactgatggacgagctggccggaccaggcggacagccttccgcattcccaagcgctccttccttgggcggctctgacccccagatgcaaccacatcctaccgaattgcccggcccagacctcctgactgtgaggaaaagtggcgtgtccagaactcattctctgcctaatgacagttatatgtgccgccacgggagcacagctgaagggcctctggggcaccgcggctggggactacctaaagcacaatcaggctctgtattgtccgtccacagccaacctgcagatacaagctatatcctgcagctccccaaagacgcccctcatctgctgcagccgcactccgcccccacctgggggacaattcccaaactgcctcctccaggtaggtcacccctcgctcagagacctctccgacggcaagcagctatcaggacagattccttagacgtccagggcctcgggtcccgcgaagatctcctggctgaggtcagcggcccttccccccccctggcaagggcgtatagcttttggggtcaatcatcaacacaagcccagcagcatagccgctctcattctaagatttctaagcatatgaccccacctgccccttgcccgggccccgagcccaactggggaaagggaccacctgagactcggagcagcctggagctggacacagaactctcctggatatccggtgatctcctgccaccgggcgggcaagaagagcctccaagcccaagggatctgaagaagtgctacagcgtcgaggcacagtcttgccagagaaggcccacttcttggctcgatgaacaacgtagacactccatcgccgtgagctgtttagactcgggctctcagcctcacctgggcacagatcctagtaacttggggggacagccgctggggggaccaggcagcagacccaagaagaagctaagtcccccgagcatcacaattgaccctcctgagtcccaaggcccccgaacccccccctcacccggcatttgtctaaggaggagagcgccttcctccgacagcaaagaccctcttgccagtgggcctccagacagcatggcagcctcaccttcacctaagaaggacgtcctatccctctccggtctgtctagtgatcccgcagatctggatccttag

SEQ ID NO: 90275 - DNA, 6864 bp, Artificial Sequence
  derived and/or modified sequence
atggatgaggaggaggatggagctggagctgaggagagcggccagcccaggagcttcatgaggctgaatgacctgagcggggccggcggccggcccggccctggcagcgctgagaaggaccccggcagcgctgacagcgaggccgagggcctgccctacccagccctggcccctgtggtgttcttctacctgagccaggacagccggcccaggtcctggtgcctgaggacagtgtgcaacccctggtttgagcgcatctccatgctggtgatcctgctgaactgtgtgaccctgggcatgttccggccctgtgaagatattgcctgtgacagccagcgctgccgcatcctgcaggcctttgatgacttcatctttgccttctttgctgtggagatggtggtgaagatggtggccctgggcatctttgggaagaagtgctacctgggggacacctggaaccggctggacttcttcatcgtgattgctggcatgctggagtacagcctggacctgcagaatgtgtccttctctgctgtgaggacagtgcgggtgctgcggcccctgcgggccatcaacagagtgcccagcatgaggatcctggtgaccctgctgctggacaccctgcccatgctgggcaatgtgctgctgctgtgcttctttgtgttcttcatctttggaattgtgggcgtgcagctgtgggccggcctgctgaggaaccgctgcttcctgcctgagaacttcagcctgcccctgtctgtggacctggagcgctactaccagacagaaaatgaagatgagagccccttcatctgcagccagccccgggagaatggcatgaggagctgccgctctgtgcccaccctgcggggagatggcggcggcggccccccctgtggcctggactatgaggcctacaacagcagcagcaacaccacctgtgtgaactggaaccagtactacaccaactgcagcgctggggagcacaaccccttcaagggggccatcaactttgacaacatcggctacgcctggatcgccatcttccaggtgatcaccctggagggctgggtggacatcatgtactttgtgatggatgcccacagcttctacaacttcatctacttcatcctgctgatcatcgtgggcagcttcttcatgatcaacctgtgcctggtggtgattgccacccagttcagcgagaccaagcagcgggagagccagctgatgagggagcagagggtgcgcttcctgagcaatgccagcaccctggccagcttcagcgagcccggcagctgctatgaggagctgctgaagtacctggtgtacatcctgaggaaggccgcccggcggctggcccaggtgtccagagctgctggggtgcgggtgggcctgctgagcagccctgcccccctgggcggccaggagacccagcccagcagcagctgcagccgcagccaccggcggctgtctgtgcaccacctggtgcaccaccaccaccaccaccaccaccactaccacctgggcaatggcaccctgcgggccccccgggccagccctgagatccaggacagagatgccaacggcagccggcggctgatgctgcccccacccagcaccccagccctgagcggggcccctcctggaggagctgagagcgtgcacagcttctaccacgccgactgccacctggagcctgtgcgctgccaggcccccccacccaggagccccagcgaggccagcggccgcacagtgggcagcggcaaggtgtaccccaccgtgcacaccagccccccacctgagaccctgaaggagaaggccctggtggaggtggccgccagcagcggcccccccaccctgaccagcctgaacatccccccaggcccctacagctccatgcacaagctgctggagacccagagcactggagcctgccagagcagctgcaagatcagcagcccctgcctgaaggctgacagcggggcctgtggccctgacagctgcccctactgtgcccgggccggggccggggaggtggagctggccgaccgggagatgccagacagcgacagcgaggccgtgtatgagttcacccaggatgcccagcacagcgacctgcgggacccccacagccggcggcagaggagcctgggcccagatgctgagcccagctctgtgctggccttctggaggctcatctgtgacaccttcaggaagatcgtggacagcaagtacttcggccggggcatcatgattgccatcctggtgaacaccctgtccatgggcatcgagtaccacgagcagcctgaggagctgaccaatgccctggagatcagcaacatcgtgttcaccagcctgtttgccctggagatgctgctgaagctgctggtgtatggccccttcggctacatcaagaacccctacaacatctttgatggagtcatcgtggtgatctctgtgtgggagatcgtgggccagcagggcggcggcctgtctgtgctgcggaccttccggctgatgagggtgctgaagctggtgcgcttcctgcctgccctgcagaggcagctggtggtgctgatgaagaccatggacaacgtggccaccttctgcatgctgctgatgctgttcatcttcatcttcagcatcctgggcatgcacctgtttggctgcaagtttgccagcgagagagatggagacaccctgcctgacaggaagaactttgacagcctgctgtgggccatcgtgacagtgttccagatcctgacccaggaggactggaacaaggtgctgtacaacggcatggccagcaccagctcctgggccgccctgtacttcatcgccctgatgaccttcggcaactacgtgctcttcaacctgctggtggccatcctggtggagggcttccaggccgaggagatcagcaagcgggaggatgccagcggccagctgagctgcatccagctgcctgtggacagccagggcggagatgccaacaagtctgagagcgagccagacttcttcagccccagcctggatggagatggagacaggaagaagtgcctggccctggtgtccctgggggagcaccctgagctgaggaagagcctgctgcccccactcatcatccacacagctgccacccccatgagcctgcccaagagcaccagcacaggcctgggggaggccctgggccctgccagcaggaggaccagcagcagcggcagcgctgagcctggagctgcccacgagatgaagagcccccccagcgcccggagcagcccccacagcccctggagcgctgccagctcctggaccagccgccgcagcagcaggaacagcctgggccgggcccccagcctgaagagaagaagccccagcggggagcggcgcagcctgctgtctggagagggccaggagagccaggatgaggaggagagcagcgaggaggagcgggccagccctgctggcagtgaccaccgccaccggggcagcctggagcgggaggccaagagcagctttgacctgcctgacaccctgcaggtgcccggcctgcacaggacagccagcggccggggcagcgccagcgagcaccaggactgcaatggcaagagcgccagcggccgcctggcccgggccctgcggccagatgatcctcccctggatggagatgatgctgatgatgagggcaacctgagcaagggggagcgggtgcgggcctggatccgggcccggctgcctgcctgctgcctggagcgggacagctggagcgcctacatcttccccccccagagccgcttccggctgctgtgccaccgcatcatcacccacaagatgtttgaccacgtggtgctggtgatcatcttcctgaactgcatcaccatcgccatggagcggcccaagattgacccccacagcgctgagcgcatcttcctgaccctgagcaactacatcttcaccgctgtgttcctggccgagatgacagtgaaggtggtggccctgggctggtgcttcggggagcaggcctacctgcggagctcctggaatgtgctggatggcctgctggtgctgatctctgtgattgacatcctggtgtccatggtgtctgattctggcaccaagatcctgggcatgctgcgggtgctgcggctgctgcggaccctgcggcccctgcgggtcatcagccgggcccagggcctgaagctggtggtggagaccctgatgagcagcctgaagcccatcggcaacatcgtggtgatctgctgtgccttcttcatcatcttcggcatcctgggcgtgcagctgttcaagggcaagttctttgtgtgccagggcgaggacaccaggaacatcaccaacaagagtgactgtgccgaggccagctaccgctgggtgcgccacaagtacaactttgacaacctgggccaggccctgatgagcctgtttgtgctggccagcaaggatggctgggtggacatcatgtatgatggcctggatgctgtgggcgtggaccagcagaacttccacaagtgccggcagcaccaggaggaggaggaggcccggcggcgggaggagaagaggctgcggcggctggagaagaagagaagaagcaaggagaagcagatggccgaggcccagtgcaagccctactacagcgactacagccgcttccggctgctggtgcaccacctgtgcaccagccactacctggacctcttcatcactggagtcatcggcctgaatgtggtgaccatggccatggagcactaccagcagccccagatcctggatgaggccctgaagatctgcaactacatcttcaccgtcatctttgtgctggagagcgtcttcaagctggtggccttcggcttccgccgcttcttccaggaccgctggaaccagctggacctggccatcgtgctgctgagcatcatgggcatcaccctggaggagattgaggtgaatgccagcctgcccatcaaccccaccatcatccgcatcatgagggtgctgagaattgcccgggtgctgaagctgctgaagatggctgtgggcatgagggccctgctggacacagtgatgcaggccctgccccaggtgggcaacctgggcctgctcttcatgctgctcttcttcatctttgctgccctgggcgtggagctgtttggagacctggagtgtgatgagacccacccctgtgagggcctgggcagacatgccaccttcaggaactttggcatggccttcctgaccctcttccgggtgtccactggagacaactggaatggcatcatgaaggacaccctgcgggactgtgaccaggagagcacctgctacaacacagtcatcagccccatctactttgtgtcctttgtgctgacagcccagtttgtgctggtgaatgtggtgattgctgtgctgatgaagcacctggaggagagcaacaaggaggccaaggaggaggccgagctggaggccgagctggagctggagatgaagaccctgagcccccagccccacagccccctgggcagccccttcctgtggccaggagtggagggccctgacagcccagacagccccaagccaggggccctgcaccctgctgcccacgcccggagcgccagccacttcagcctggagcaccccacagaccggcagctgtttgacaccatcagcctgctgatccagggcagcctggagtgggagctgaagctgatggatgagctggccggccctgggggccagcccagcgccttccccagcgcccccagcctgggcggcagtgacccccagatgcagccccaccccacagagctgcccggccctgacctgctgactgtgaggaagtctggagtgtccaggacccacagcctgcccaatgacagctacatgtgccgccacggcagcacagctgagggccccctgggccaccggggctggggcctgcccaaggcccagagcggctctgtgctgtctgtgcacagccagcctgctgacaccagctacatcctgcagctgcccaaggatgccccccacctgctgcagccccacagcgcccccacctggggcaccatccccaagctgcccccacctggccgcagccccctggcccagaggcccctgcggcggcaggccgccatcagaacagacagcctggatgtgcagggcctgggcagccgggaggacctgctggccgaggtgtctggccccagcccccccctggcccgggcctacagcttctggggccagagcagcacccaggcccagcagcacagccgcagccacagcaagatcagcaagcacatgaccccaccagccccctgccccggccctgagcccaactggggcaagggccccccagagaccaggagcagcctggagctggacacagagctgtcctggatcagcggggacctgctgcccccaggcggccaggaggagccccccagcccccgggacctgaagaagtgctacagcgtggaggcccagagctgccagaggcggcccacctcctggctggatgagcagaggaggcacagcattgctgtgtcctgcctggacagcggcagccagccccacctgggcacagaccccagcaacctgggcggccagcccctgggcggccctggcagccggcccaagaagaagctgagcccccccagcatcaccattgatcctcctgagagccagggccccaggaccccacccagccctggcatctgcctgcggcggcgggcccccagcagtgacagcaaggaccccctggccagcggccccccagacagcatggccgccagccccagccccaagaaggatgtgctgagcctgagcggcctgagcagtgaccctgctgacctggacccctag

SEQ ID NO: 90276 - DNA, 6864 bp, Artificial Sequence
  derived and/or modified sequence
atggacgaggaggaggacggcgccggcgccgaggagagcggccagccgagatcattcatgcgcctcaacgacctgtccggcgccggaggccggcccgggcccgggtcagctgaaaaagatcctggttccgcggactcagaggccgaagggctgccgtaccccgccctggccccagtagtttttttttatctgtcccaggatagtcggccgcggtcttggtgcctgagaaccgtctgcaacccctggtttgaacggataagcatgttagttattctgcttaattgcgtgaccttgggtatgtttcgtccctgtgaggatatcgcttgcgacagccagcgctgccggatcctgcaggcctttgatgattttatattcgcattttttgcagtggaaatggtggttaagatggttgctcttgggattttcggtaaaaaatgttatctcggagacacctggaataggctcgacttcttcatcgtgattgctgggatgctcgagtatagcctggacctgcagaacgtgtccttctctgctgtgcggaccgtgagagtcctgcgaccgctccgggctattaatcgggtgccttccatgcgaatactggtgaccctgcttctggatacgttgccaatgctaggcaacgttctactactctgtttctttgtgttctttatctttggcattgtcggcgtgcagttatgggcggggctgttacggaaccgctgttttctgccggaaaacttttctttgcctctgtccgtggacttggagcggtactaccagaccgaaaacgaagacgagtcaccctttatctgtagtcaaccaagggagaatggtatgaggagctgtaggtctgtcccaaccctgcgcggcgatggagggggtggacccccttgcgggctagattacgaggcatacaattcctcatccaacaccacctgcgtgaattggaatcagtactatactaactgtagcgcaggcgagcataatccttttaagggcgccatcaattttgataatattgggtatgcctggatcgcaattttccaggtgataacccttgaaggatgggtggatatcatgtacttcgtgatggacgctcattcattctacaacttcatctacttcatcttactaatcatagtgggttctttttttatgattaacttgtgcttagtcgtgatcgccacccagtttagcgaaaccaagcagcgcgaatctcagctaatgagagagcagcgcgtgaggtttctgtccaacgcttcaactctcgcttctttcagcgagcccgggtcgtgttacgaagaactgctgaaatacctggtttatattctcagaaaggccgcacggagactggcccaggttagccgtgccgctggagtccgggtcggattacttagctcaccagcaccattgggcggacaggagacacaacctagctcttcatgtagtaggagtcataggcgcttgagcgtgcaccatttagtccatcaccaccaccaccaccatcatcattatcacttagggaatggtacattgcgggcccctcgcgcctccccagagattcaggatcgggacgcaaatggtagcaggagattgatgctgccgcctccttcgacacctgcccttagcggtgccccgcccggaggcgcagagtccgtgcacagcttctaccatgcagattgtcacctcgagccggttagatgtcaggctccaccaccacggtctccatcggaagcttcaggcagaactgtcggctcggggaaggtctatcccaccgttcacacctccccacccccagagactctcaaagagaaagccctcgtggaagtcgctgctagctcaggcccaccgactctaacatcactgaacattccgccaggcccctatagcagcatgcacaaactattagagacccagtcaacaggagcgtgccaatcctcttgcaagatctcctccccttgtctgaaggccgactctggcgcatgcggacccgacagttgcccctattgcgcgcgtgctggcgcgggggaggtggaattggctgaccgggagatgcctgatagtgatagcgaagctgtctatgaattcacccaagacgcacagcattccgaccttcgcgacccacactcccgtcgccaacggtctctcggtccggacgccgaacctagctcagtgcttgctttctggcgccttatatgcgacaccttcagaaaaatcgtggacagtaagtacttcggtaggggcattatgatcgcaatcctggtcaatactctaagcatggggatcgaatatcacgaacagcccgaagaattgaccaacgccttagaaatctcaaatatcgtcttcacctccttgttcgcactggaaatgctcctcaagctattagtctatgggccgtttggttatatcaagaatccatataacatttttgacggggttattgtggtgatcagcgtctgggaaattgtcggccagcagggcggagggctgtctgttttgaggaccttccgcttgatgcgagttctcaagctggtaagatttttaccagccctccagcgacagctggtggttcttatgaagacaatggataatgtcgcaacattctgcatgctgctcatgctgttcatcttcattttctctattctcggcatgcaccttttcggatgcaaattcgcttctgaaagagacggtgacacacttcccgacagaaagaactttgacagcctgttatgggcaattgtaactgtgtttcagattttaacacaggaggactggaacaaagtgttgtataacggcatggcctccacgagctcctgggctgccctctattttattgcacttatgacttttgggaactatgttttgttcaacctcttggttgccatcctggtggaggggttccaagctgaggagataagtaaaagagaagatgcgagcggacagcttagttgcatccaactgccagtggactcacaaggtggagacgcaaataagagcgagagtgaaccagattttttcagtcccagcttagacggcgatggggatcggaaaaagtgcctcgcgttggtgtcattgggcgagcacccagagctgcgtaagtcactgcttccacccctcattatccacaccgcggcaacccctatgtctctgccaaaaagcaccagcacgggtctaggggaggctctgggcccagctagcagaagaacatcatcctccggcagtgcagagccaggcgctgcccatgagatgaaatctccaccctcagctcgctcctctcctcactccccgtggtctgcagcctcatcatggacatcaagacgaagcagtcgcaactctctcgggagagccccatctttgaagcgcaggagtccgagtggagagagaaggtctcttctgtccggcgaagggcaggaaagtcaggatgaggaggagtcatcagaggaagagcgcgctagtcccgctgggtccgatcacaggcaccgaggctctcttgagcgggaggccaaaagtagtttcgacctgccagatacactccaagtgccggggctgcaccggacagccagcggacgggggtcagcttcagaacaccaagactgtaacggcaaatccgcctctggtaggcttgcacgagccctgcggccagatgaccccccactcgacggtgacgatgctgatgatgaagggaacctcagtaagggtgagagggtgcgcgcttggatcagggctagacttcctgcttgttgtctggagcgagatagctggtctgcctacatctttccaccacagtctagattccgcctgctctgccatagaatcatcacccacaagatgtttgaccacgtggtgttggtgattatctttttgaactgtattacaatagccatggaacgaccaaaaatcgacccccacagcgctgaaaggatcttccttacgctctctaattacatatttacagcagtgtttctggctgagatgacagtgaaagttgtggcactcgggtggtgtttcggggaacaggcctacctgcggtccagctggaacgtgttagacggccttcttgtgttaatctctgtgatcgatatcctcgtatccatggtctcggatagcggtactaaaatcctggggatgctacgggttctgagactcctgaggaccttaagacctctgcgagttatatcccgcgctcaggggctgaagctggtagtggagactttaatgtctagcctgaaacctataggaaatattgtggtcatatgctgcgccttctttatcatattcggtattctgggcgttcagctctttaaaggcaagtttttcgtgtgtcagggtgaggacacacgcaacattaccaacaaatcggactgtgctgaggcctcctacagatgggtgaggcataagtataattttgataacctcggacaggccttgatgagcctgttcgtgctcgcctccaaagacgggtgggtcgatattatgtacgacgggctagatgcagtgggagtggatcagcaaaactttcataaatgtaggcaacaccaggaagaagaagaggcgcggcggcgagaggagaaaagactcaggaggctggagaagaagagacgatctaaagaaaaacagatggctgaagcccagtgtaagccgtactattccgactacagccggtttcgtcttctggttcatcacctgtgcacctcccattatttggatctgttcatcacgggggtgattggcctgaacgtcgtaacgatggccatggaacactatcagcagccccagatattggacgaggctctgaaaatttgcaattatattttcactgtgattttcgtgctggaatccgtgttcaaattggtggcatttggatttagacgcttctttcaagatagatggaatcaactggatctggccatcgtgctactgtccattatgggtattacactggaagagatcgaggttaatgcctccttgcccatcaatcccacgattatcagaatcatgagggttttacgcattgcaagggtccttaagctgttgaagatggcagtggggatgcgggccctccttgatacagtgatgcaggccttgccccaggtaggaaacctgggacttctgtttatgctcttattctttatctttgccgccttgggggttgagctgtttggcgatctagagtgtgacgaaacccacccctgtgagggtctgggtcggcacgcgacctttagaaacttcggtatggcttttcttaccctcttcagggttagcactggtgacaactggaatggcattatgaaggatacactgcgggattgcgaccaggagagcacatgttacaacacagtgataagtcccatttacttcgtgagtttcgtgctgaccgcacagttcgtcctcgtgaacgtggtgattgcggtgcttatgaaacatcttgaagagtctaataaagaggccaaagaggaggcggaattagaggccgagctggagcttgaaatgaaaactctgagtcctcagccccacagtcccctaggatcgccgtttctttggccaggagtggagggaccggattcaccagactcacctaagccaggcgccctgcaccctgccgcccatgcacggtctgccagtcatttctcattggagcatcccaccgataggcagctattcgacacaattagcctgttgatccagggcagtcttgagtgggaacttaagttgatggacgagctagcaggcccaggaggacagcccagcgcattcccctcagctccttcattaggaggatcagaccctcagatgcagccacacccaactgagcttccaggaccagatctgctgactgttaggaaaagcggggtgagtcgaacccactccctcccaaacgattcttatatgtgccgacacggcagtactgccgaggggcctttagggcaccgagggtgggggctccctaaggctcaatccggatcggtgctatctgttcactctcagcccgccgacacgagttatatattgcaacttcctaaggatgctccacacttgttacagccccattccgccccaacttggggaacaatcccgaaactgcctcccccgggtaggagtcccctcgcacaacgccctctgaggcggcaagcagccattcgaacagattccttggacgtgcagggactcggatctcgggaggacctgcttgccgaggtgagcgggcctagcccgcccctagccagagcatatagcttttggggacagtcaagtactcaggctcagcaacactccaggtctcactctaaaatcagtaagcacatgacaccacccgccccttgcccggggcccgagccaaactggggtaaaggccctcccgagaccagatccagcctcgagctcgacacggagctgtcgtggatttccggggatcttctacctccaggcgggcaggaggagccgccatctcccagggacctcaaaaagtgctactcagtggaagcacagagctgtcagcgccggcccacatcatggcttgatgagcagaggcgacactccattgccgtgtcctgtctggactccggctcacaacctcatttgggtactgacccttccaacctaggagggcaacccctgggcgggcccggcagtcgtccaaaaaaaaaactaagccctcccagtataacaatcgatcctcccgaaagtcagggcccacggactcccccaagccccggcatctgcctccgccgaagggctccatcttccgacagcaaggatcctctcgctagtggacctcctgactctatggcggcaagcccctcccctaagaaggatgttttgtctctgtcggggctgtcttccgaccccgccgatctggacccctag

SEQ ID NO: 90277 - DNA, 6863 bp, Artificial Sequence
  derived and/or modified sequence
atggacgaggaagaagacggagccggtgccgaggaatccgggcagcccagaagttttatgaggttgaacgatttgtctggagctgggggtcgccctggccctgggtccgccgagaaggatccaggatccgcagactctgaggcagagggccttccttatcccgcactggctcctgtagtcttcttttatctgtcgcaggacagcagacctcgcagctggtgcctcagaacagtttgcaacccatggttcgaaagaatttccatgttggtaatactgcttaactgcgtgactctggggatgttcaggccttgtgaggacattgcttgcgattctcagaggtgcagaattctgcaggccttcgacgactttattttcgcctttttcgccgtggagatggtggtgaagatggtcgccctggggatttttggcaagaagtgctatctgggtgatacatggaataggctggatttctttattgttatagcgggtatgttggaatactcactcgacctccagaacgtgtccttttctgccgtgcggactgtgcgagttctgcgacctctgagagccatcaacagggttccgtctatgcgtatcctcgtgacactgctccttgatacactccccatgctgggcaatgtgctgctgctgtgttttttcgttttcttcatcttcggaatagttggggtgcagctatgggccggtcttttgcgcaatcggtgctttttacctgagaacttctctcttcccctgagcgttgatctagaaaggtattaccagacagagaacgaggatgagtcccctttcatatgttcccagcctcgggagaacggcatgagaagctgcaggtccgttccgacgttgaggggagacggcggtggcggacccccttgcgggcttgattatgaggcgtacaacagtagctctaatacaacatgtgtgaactggaaccagtattacacaaattgttcagctggagaacacaacccattcaaaggtgctattaacttcgacaacattggctatgcctggattgcaatcttccaggtcattaccctggaggggtgggttgacattatgtacttcgtcatggacgcccactcattctacaattttatttacttcattctgctcataatcgtcggaagtttctttatgattaatctgtgtctggtggtcatcgcaactcagttctctgaaactaagcagcgcgaatcacagctgatgagagaacagagagtgcgctttctttcaaatgctagtactctggcatcgttttctgaacccggaagttgctacgaggagctcttgaaatatctggtgtatatcttaagaaaggcagctcggagactcgcgcaggtatctcgtgccgctggggtgagggttgggctgctgtcatcaccagcccctctgggtggccaggagacccagccgagttcttcttgcagcagatctcacaggcgcctgtctgtccaccacctggtccatcaccaccaccaccatcatcaccactaccatctcggaaatggcaccctccgggcaccgcgagcatctcctgaaatccaggacagggacgcgaatggcagtcgaagactcatgctgccgccacccagcacccctgccctgtctggtgcccctccaggaggtgccgagtccgtgcacagtttctatcatgccgactgccacttagaacccgtacgttgccaagcacccccacctaggagcccaagcgaagcttctgggagaacagtgggcagcgggaaggtttacccaacagtgcacacctctccccctcctgagacccttaaagagaaagcattggtggaggtggcggctagttcagggcctcccaccctcacatctcttaacatcccgcctggaccctacagctcaatgcataagctcttggagacccagtcgactggagcatgccagagtagctgcaaaatctccagtccttgcctcaaggccgacagcggcgcttgcggtcctgattcatgtccatattgtgccagggcaggcgctggtgaagtggagttagccgatagagagatgcccgactccgattcagaggccgtatacgagtttactcaggatgctcagcattcagacctcagagatcctcacagccggcgacaaaggtctttgggccctgacgcagaaccatcttctgtcctagccttctggagattaatttgtgacacatttagaaaaatcgtggactcaaaatacttcgggcgtggtatcatgatcgcaattttggtgaatactctctcaatgggtatcgagtaccatgagcagcccgaagaactgaccaatgctctcgagatttcgaacatcgtatttaccagcctgttcgcgttggagatgctcttgaagctcctggtgtacggtcctttcgggtacattaagaacccctataacatctttgatggtgtgatagttgtcatctctgtgtgggagattgtgggacagcagggcggtggactatcagtgctccgcacctttcgcctgatgagagttctgaagcttgttagatttctcccagctttgcagcggcagttagttgtccttatgaagaccatggacaatgttgcgaccttctgcatgctgcttatgctgttcatattcatcttttcaatcctgggtatgcaccttttcggatgcaagtttgcttctgaaagagacggggacaccctaccagacagaaagaattttgactctttgttatgggcaatcgtgactgtctttcagattctaacacaagaggactggaataaagtgttgtacaacggtatggctagcacctctagctgggccgcactctatttcatcgccctcatgacattcgggaattatgtcctgttcaatctgcttgttgctatactggtggaaggttttcaggcagaagaaatctccaagcgtgaagatgctagtgggcagctcagctgcatacagcttcccgtggactctcagggcggagatgcaaataagagtgaatccgaacccgatttctttagcccttcactcgacggtgatggagatagaaagaaatgtctggccctggtaagtctcggcgaacatccagagctgcgcaagagtctcttgccacccctcataattcatactgccgctacccccatgagccttccaaaatccacctcaacgggtcttggcgaggcgctcgggccagccagtcgtcgcacgagttcctccggatcggctgagcccggagcagcacacgagatgaaaagcccacctagcgccaggtcttcacctcatagtccgtggtcggctgcttcttcctggacatccagacggtcctccaggaactctctcggacgggctccatcattgaagagaagaagcccatctggcgaacggagatcactcctttcgggtgaagggcaggaatcccaggacgaggaagagtcgtccgaagaggagagagcctctcccgctgggtcagaccacaggcaccggggttcccttgagagggaggccaagtccagcttcgacttgccagataccctgcaggttccaggcctgcacaggacggcgagtggtcggggtagcgcttccgaacaccaggattgtaatggaaagtccgccagcggccgtctcgcacgcgcactgcgtcctgacgacccaccactcgacggggacgacgctgatgatgaaggcaacctctcaaagggagaacgggtaagagcttggataagggctagacttcctgcctgttgcctcgagagggattcatggtccgcctatatctttcccccacagagtcgcttcaggcttctgtgtcaccggataatcacccataagatgtttgatcatgtagttcttgtgatcattttcttgaattgtatcaccatcgcaatggaaaggcctaagatcgatccccatagcgccgagcggatatttctcaccctcagtaattacatcttcacagcggtctttcttgcagagatgactgtcaaggtggttgcactggggtggtgttttggggaacaagcctacctgcgcagctcttggaatgtgctggacgggcttctcgtgctaatcagcgttatagatatcctagtatccatggtgagtgatagtggcacgaagatcctcggaatgcttcgtgtcctgcggctgctccggacccttcggccattgcgggtgatttcgagggcacaaggtctgaagctggtggtcgagacactaatgagttccctgaagcctataggtaatatcgtggtgatctgctgcgctttctttataatctttgggatcctaggggtccagttgttcaaaggaaagtttttcgtttgccaaggggaagatacacgcaatatcactaataagagtgattgcgcagaggctagctatcgttgggtgcggcataagtataactttgataatctcggacaggccctgatgagcctgttcgtccttgcctcaaaagatggctgggtggatatcatgtatgacggattagacgcagtcggagtggaccagcagaacttccacaaatgtagacagcatcaggaggaggaggaggccagaaggcgagaggagaagagactgaggcgcttggagaagaaacgcagatccaaagaaaaacagatggccgaagctcagtgcaagccatactacagtgactacagccgcttccgattactggtgcatcacctgtgcacatcccactatctggacctttttatcacgggtgtcatcggacttaacgtcgtgactatggcaatggaacactaccagcagccacagattctagacgaggcactgaaaatttgtaactatatctttaccgtgatctttgtgctggaatcagtatttaaactggttgctttcggattccggcgattcttccaggatcgctggaatcaactggatctcgccattgtcctactgagcataatgggcatcactctggaagagatcgaggtgaacgcctctctgccaataaatcccaccataatacgcatcatgagagtcctgagaatagcgagagtactcaaactgctgaagatggccgtcggtatgagagccctgctagatacggtgatgcaggcccttccccaggtggggaacctcggactcttgttcatgctcctgttcttcatcttcgccgctttgggagttgaactcttcggggatctcgagtgtgacgaaacacacccctgtgaggggctggggaggcacgcaaccttcagaaatttcggaatggcatttctcacactttttcgtgtctctaccggcgataactggaatggtatcatgaaggacacactccgcgactgcgaccaggaaagcacctgctataatactgttattagccctatctatttcgtgagcttcgtcttaaccgctcagttcgtactcgttaatgtggtgattgcagttttaatgaaacatctcgaagagagcaacaaggaggctaaggaagaggcagagttagaagcagagctggaactggaaatgaaaactctctccccacagcctcactcaccactgggaagcccttttctatggcccggtgtggagggcccagattccccggactccccaaagccaggggctttacatccagcagcacatgctcggtctgcgtctcatttctccctggaacatccaacagataggcagcttttcgacacgattagtctcctgatacagggatccctggaatgggaattaaagcttatggacgagctcgctggcccaggaggacagccctccgccttcccctctgccccatctctgggcggatcggaccctcagatgcagccccacccaactgaactgcctggccctgacctgctgactgtcaggaaaagcggagtgagccggacacattcacttcccaacgactcttacatgtgccggcacggatcgacagctgaggggccattgggacacaggggatggggactacccaaggcccagtcaggtagcgttctgtcggtgcactctcaacccgctgataccagctatatactacagcttcctaaggatgccccacacttactgcagccccactctgcgccaacgtggggaacaatccctaaactacctccgcctgggagatcccccctggcccagaggcctctacggaggcaggcggctataagaactgacagcctcgacgttcagggattgggttcaagggaagacctgttagctgaagtgtcgggcccatcaccgccactggctcgcgcatactctttctggggccagtcatccacacaggctcagcagcacagtagatctcattcaaaaatttcaaaacacatgaccccccctgccccttgtccaggacccgaaccgaactggggcaaaggcccacctgaaacccggtcttccctggagcttgatactgaactgtcctggatttcgggagacctattgcctcctggtgggcaggaggagccgccaagtccacgggatctcaaaaaatgttattcggtagaagcacagagttgtcagcgaaggcctactagctggctggacgagcagcgacgtcatagcatagccgtgtcttgtttagatagcgggtctcagcctcatttaggcactgatccatccaatttaggtggacagcctcttggagggcctggctcccgccctaagaagaagctgtcccctccttccataaccattgaccccccagaatcccaggggcctcgcacacccccatcccccggtatctgtctgcgacgacgcgcaccatccagcgatagcaaagaccctctggctagcggtcctcccgattccatggccgcttccccttccccgaagaaagacgtgttaagcctctctggactgagtagtgaccctgcagacctggaccccta

SEQ ID NO: 90278 - DNA, 6879 bp, Artificial Sequence
  derived and/or modified sequence
atggacgaggaggaggatggagcgggcgccgaggagtcgggacagccccggagcttcatgcggctcaacgacctgtcgggggccgggggccggccggggccggggtcagcagaaaaggacccgggcagcgcggactccgaggcggaggggctgccgtacccggcgctggccccggtggttttcttctacttgagccaggacagccgcccgcggagctggtgtctccgcacggtctgtaacccctggtttgagcgcatcagcatgttggtcatccttctcaactgcgtgaccctgggcatgttccggccatgcgaggacatcgcctgtgactcccagcgctgccggatcctgcaggcctttgatgacttcatctttgccttctttgccgtggagatggtggtgaagatggtggccttgggcatctttgggaaaaagtgttacctgggagacacttggaaccggcttgactttttcatcgtcatcgcagggatgctggagtactcgctggacctgcagaacgtcagcttctcagctgtcaggacagtccgtgtgctgcgaccgctcagggccattaaccgggtgcccagcatgcgcatccttgtcacgttgctgctggatacgctgcccatgctgggcaacgtcctgctgctctgcttcttcgtcttcttcatcttcggcatcgtcggcgtccagctgtgggcagggctgcttcggaaccgatgcttcctacctgagaatttcagcctccccctgagcgtggacctggagcgctattaccagacagagaacgaggatgagagccccttcatctgctcccagccacgcgagaacggcatgcggtcctgcagaagcgtgcccacgctgcgcggggacgggggcggtggcccaccttgcggtctggactatgaggcctacaacagctccagcaacaccacctgtgtcaactggaaccagtactacaccaactgctcagcgggggagcacaaccccttcaagggcgccatcaactttgacaacattggctatgcctggatcgccatcttccaggtcatcacgctggagggctgggtcgacatcatgtactttgtgatggatgctcattccttctacaatttcatctacttcatcctcctcatcatcgtgggctccttcttcatgatcaacctgtgcctggtggtgattgccacgcagttctcagagaccaagcagcgggaaagccagctgatgcgggagcagcgtgtgcggttcctgtccaacgccagcaccctggctagcttctctgagcccggcagctgctatgaggagctgctcaagtacctggtgtacatccttcgtaaggcagcccgcaggctggctcaggtctctcgggcagcaggtgtgcgggttgggctgctcagcagcccagcacccctcgggggccaggagacccagcccagcagcagctgctctcgctcccaccgccgcctatccgtccaccacctggtgcaccaccaccaccaccatcaccaccactaccacctgggcaatgggacgctcagggccccccgggccagcccggagatccaggacagggatgccaatgggtcccgccggctcatgctgccaccaccctcgacgcctgccctctccggggccccccctggtggcgcagagtctgtgcacagcttctaccatgccgactgccacttagagccagtccgctgccaggcgccccctcccaggtccccatctgaggcatccggcaggactgtgggcagcgggaaggtgtatcccaccgtgcacaccagccctccaccggagacgctgaaggagaaggcactagtagaggtggctgccagctctgggcccccaaccctcaccagcctcaacatcccacccgggccctacagctccatgcacaagctgctggagacacagagtacaggtgcctgccaaagctcttgcaagatctccagcccttgcttgaaagcagacagtggagcctgtggtccagacagctgcccctactgtgcccgggccggggcaggggaggtggagctcgccgaccgtgaaatgcctgactcagacagcgaggcagtttatgagttcacacaggatgcccagcacagcgacctccgggacccccacagccggcggcaacggagcctgggcccagatgcagagcccagctctgtgctggccttctggaggctaatctgtgacaccttccgaaagattgtggacagcaagtactttggccggggaatcatgatcgccatcctggtcaacacactcagcatgggcatcgaataccacgagcagcccgaggagcttaccaacgccctagaaatcagcaacatcgtcttcaccagcctctttgccctggagatgctgctgaagctgcttgtgtatggtccctttggctacatcaagaatccctacaacatcttcgatggtgtcattgtggtcatcagcgtgtgggagatcgtgggccagcaggggggcggcctgtcggtgctgcggaccttccgcctgatgcgtgtgctgaagctggtgcgcttcctgccggcgctgcagcggcagctggtggtgctcatgaagaccatggacaacgtggccaccttctgcatgctgcttatgctcttcatcttcatcttcagcatcctgggcatgcatctcttcggctgcaagtttgcctctgagcgggatggggacaccctgccagaccggaagaattttgactccttgctctgggccatcgtcactgtctttcagatcctgacccaggaggactggaacaaagtcctctacaatggtatggcctccacgtcgtcctgggcggccctttatttcattgccctcatgaccttcggcaactacgtgctcttcaatttgctggtcgccattctggtggagggcttccaggcggaggaaatcagcaaacgggaagatgcgagtggacagttaagctgtattcagctgcctgtcgactcccaggggggagatgccaacaagtccgaatcagagcccgatttcttctcacccagcctggatggtgatggggacaggaagaagtgcttggccttggtgtccctgggagagcacccggagctgcggaagagcctgctgccgcctctcatcatccacacggccgccacacccatgtcgctgcccaagagcaccagcacgggcctgggcgaggcgctgggccctgcgtcgcgccgcaccagcagcagcgggtcggcagagcctggggcggcccacgagatgaagtcaccgcccagcgcccgcagctctccgcacagcccctggagcgctgcaagcagctggaccagcaggcgctccagccggaacagcctcggccgtgcacccagcctgaagcggagaagcccaagtggagagcggcggtccctgttgtcgggagaaggccaggagagccaggatgaagaggagagctcagaagaggagcgggccagccctgcgggcagtgaccatcgccacagggggtccctggagcgggaggccaagagttcctttgacctgccagacacactgcaggtgccagggctgcatcgcactgccagtggccgagggtctgcttctgagcaccaggactgcaatggcaagtcggcttcagggcgcctggcccgggccctgcggcctgatgaccccccactggatggggatgacgccgatgacgagggcaacctgagcaaaggggaacgggtccgcgcgtggatccgagcccgactccctgcctgctgcctcgagcgagactcctggtcagcctacatcttccctcctcagtccaggttccgcctcctgtgtcaccggatcatcacccacaagatgttcgaccacgtggtccttgtcatcatcttccttaactgcatcaccatcgccatggagcgccccaaaattgacccccacagcgctgaacgcatcttcctgaccctctccaattacatcttcaccgcagtctttctggctgaaatgacagtgaaggtggtggcactgggctggtgcttcggggagcaggcgtacctgcggagcagttggaacgtgctggacgggctgttggtgctcatctccgtcatcgacattctggtgtccatggtctctgacagcggcaccaagatcctgggcatgctgagggtgctgcggctgctgcggaccctgcgcccgctcagggtgatcagccgggcgcaggggctgaagctggtggtggagacgctgatgtcctcactgaaacccatcggcaacattgtagtcatctgctgtgccttcttcatcattttcggcatcttgggggtgcagctcttcaaagggaagtttttcgtgtgccagggcgaggataccaggaacatcaccaataaatcggactgtgccgaggccagttaccggtgggtccggcacaagtacaactttgacaaccttggccaggccctgatgtccctgttcgttttggcctccaaggatggttgggtggacatcatgtacgatgggctggatgctgtgggcgtggaccagcagaacttccacaagtgtcggcagcaccaggaggaagaggaggcccggcggcgggaggagaagcgcctacgaagactggagaaaaagagaaggagtaaggagaagcagatggctgaagcccagtgcaaaccttactactccgactactcccgcttccggctcctcgtccaccacttgtgcaccagccactacctggacctcttcatcacaggtgtcatcgggctgaacgtggtcaccatggccatggagcactaccagcagccccagattctggatgaggctctgaagatctgcaactacatcttcactgtcatctttgtcttggagtcagttttcaaacttgtggcctttggtttccgtcggttcttccaggacaggtggaaccagctggacctggccattgtgctgctgtccatcatgggcatcacgctggaggaaatcgaggtcaacgcctcgctgcccatcaaccccaccatcatccgcatcatgagggtgctgcgcattgcccgagtgctgaagctgctgaagatggctgtgggcatgcgggcgctgctggacacggtgatgcaggccctgccccaggtggggaacctgggacttctcttcatgttgttgtttttcatctttgcagctctgggcgtggagctctttggagacctggagtgtgacgagacacacccctgtgagggcctgggccgtcatgccacctttcggaactttggcatggccttcctaaccctcttccgagtctccacaggtgacaattggaatggcattatgaaggacaccctccgggactgtgaccaggagtccacctgctacaacacggtcatctcgcctatctactttgtgtccttcgtgctgacggcccagttcgtgctagtcaacgtggtgatcgccgtgctgatgaagcacctggaggagagcaacaaggaggccaaggaggaggccgagctagaggctgagctggagctggagatgaagaccctcagcccccagccccactcgccactgggcagccccttcctctggcctggggtcgagggccccgacagccccgacagccccaagcctggggctctgcacccagcggcccacgcgagatcagcctcccacttttccctggagcaccccacggacaggcagctgtttgacaccatatccctgctgatccagggctccctggagtgggagctgaagctgatggacgagctggcaggcccagggggccagccctctgccttcccttctgcccccagcctgggaggctccgacccacagatgcagccccaccccacggagctgccaggaccagacttactgactgtgcggaagtctggggtcagccgaacgcactctctgcccaatgacagctacatgtgtcggcatgggagcactgccgaggggcccctgggacacaggggctgggggctccccaaagctcagtcaggctccgtcttgtccgttcactcccagccagcagataccagctacatcctgcagcttcccaaagatgcacctcatctgctccagccccacagcgccccaacctggggcaccatccccaaactgcccccaccaggacgctcccctttggctcagaggccactcaggcgccaggcagcaataaggactgactccttggacgttcagggtctgggcagccgggaagacctgctggcagaggtgagtgggccctccccgcccctggcccgggcctactctttctggggccagtcaagtacccaggcacagcagcactcccgcagccacagcaagatctccaagcacatgaccccgccagccccttgcccaggcccagaacccaactggggcaagggccctccagagaccagaagcagcttagagttggacacggagctgagctggatttcaggagacctcctgccccctggcggccaggaggagcccccatccccacgggacctgaagaagtgctacagcgtggaggcccagagctgccagcgccggcctacgtcctggctggatgagcagaggagacactctatcgccgtcagctgcctggacagcggctcccaaccccacctgggcacagacccctctaaccttgggggccagcctcttggggggcctgggagccggcccaagaaaaaactcagcccgcctagtatcaccatagacccccccgagagccaaggtcctcggaccccgcccagccctggtatctgcctccggaggagggctccgtccagcgactccaaggatcccttggcctctggcccccctgacagcatggctgcctcgccctccccaaagaaagatgtgctgagtctctccggtttatcctctgacccagcagacctggacccctgagtcctgccccacttt

SEQ ID NO: 90279 - protein, 2277 aa, Artificial Sequence
  derived and/or modified sequence
MDEEEDGAGAEESGQPRSFMRLNDLSGAGGRPGPGSAEKDPGSADSEAEGLPYPALAPVVFFYLSQDSRPRSWCLRTVCNPWFERISMLVILLNCVTLGMFRPCEDIACDSQRCRILQAFDDFIFAFFAVEMVVKMVALGIFGKKCYLGDTWNRLDFFIVIAGMLEYSLDLQNVSFSAVRTVRVLRPLRAINRVPSMRILVTLLLDTLPMLGNVLLLCFFVFFIFGIVGVQLWAGLLRNRCFLPENFSLPLSVDLERYYQTENEDESPFICSQPRENGMRSCRSVPTLRGDGGGGPPCGLDYEAYNSSSNTTCVNWNQYYTNCSAGEHNPFKGAINFDNIGYAWIAIFQVITLEGWVDIMYFVMDAHSFYNFIYFILLIIVGSFFMINLCLVVIATQFSETKQRESQLMREQRVRFLSNASTLASFSEPGSCYEELLKYLVYILRKAARRLAQVSRAAGVRVGLLSSPAPLGGQETQPSSSCSRSHRRLSVHHLVHHHHHHHHHYHLGNGTLRAPRASPEIQDRDANGSRRLMLPPPSTPALSGAPPGGAESVHSFYHADCHLEPVRCQAPPPRSPSEASGRTVGSGKVYPTVHTSPPPETLKEKALVEVAASSGPPTLTSLNIPPGPYSSMHKLLETQSTGACQSSCKISSPCLKADSGACGPDSCPYCARAGAGEVELADREMPDSDSEAVYEFTQDAQHSDLRDPHSRRQRSLGPDAEPSSVLAFWRLICDTFRKIVDSKYFGRGIMIAILVNTLSMGIEYHEQPEELTNALEISNIVFTSLFALEMLLKLLVYGPFGYIKNPYNIFDGVIVVISVWEIVGQQGGGLSVLRTFRLMRVLKLVRFLPALQRQLVVLMKTMDNVATFCMLLMLFIFIFSILGMHLFGCKFASERDGDTLPDRKNFDSLLWAIVTVFQILTQEDWNKVLYNGMASTSSWAALYFIALMTFGNYVLFNLLVAILVEGFQAEEISKREDASGQLSCIQLPVDSQGGDANKSESEPDFFSPSLDGDGDRKKCLALVSLGEHPELRKSLLPPLIIHTAATPMSLPKSTSTGLGEALGPASRRTSSSGSAEPGAAHEMKSPPSARSSPHSPWSAASSWTSRRSSRNSLGRAPSLKRRSPSGERRSLLSGEGQESQDEEESSEEERASPAGSDHRHRGSLEREAKSSFDLPDTLQVPGLHRTASGRGSASEHQDCNGKSASGRLARALRPDDPPLDGDDADDEGNLSKGERVRAWIRARLPACCLERDSWSAYIFPPQSRFRLLCHRIITHKMFDHVVLVIIFLNCITIAMERPKIDPHSAERIFLTLSNYIFTAVFLAEMTVKVVALGWCFGEQAYLRSSWNVLDGLLVLISVIDILVSMVSDSGTKILGMLRVLRLLRTLRPLRVISRAQGLKLVVETLMSSLKPIGNIVVICCAFFIIFGILGVQLFKGKFFVCQGEDTRNITNKSDCAEASYRWVRHKYNFDNLGQALMSLFVLASKDGWVDIMYDGLDAVGVDQQPIMNHNPWMLLYFISFLLIVAFFVLNMFVGVVVENFHKCRQHQEEEEARRREEKRLRRLEKKRRNLMLDDVIASGSSASAASEAQCKPYYSDYSRFRLLVHHLCTSHYLDLFITGVIGLNVVTMAMEHYQQPQILDEALKICNYIFTVIFVLESVFKLVAFGFRRFFQDRWNQLDLAIVLLSIMGITLEEIEVNASLPINPTIIRIMRVLRIARVLKLLKMAVGMRALLDTVGNLGLLFMLLFFIFAALGVELFGDLECDETHPCEGLGRHATFRNFGMAFLTLFRVSTGDNWNGIMKDTLRDCDQESTCYNTVISPIYFVSFVLTAQFVLVNVVIAVLMKHLEESNKEAKEEAELEAELELEMKTLSPQPHSPLGSPFLWPGVEGPDSPDSPKPGALHPAAHARSASHFSLEHPTMQPHPTELPGPDLLTVRKSGVSRTHSLPNDSYMCRHGSTAEGPLGHRGWGLPKAQSGSVLSVHSQPADTSYILQLPKDAPHLLQPHSAPTWGTIPKLPPPGRSPLAQRPLRRQAAIRTDSLDVQGLGSREDLLAEVSGPSPPLARAYSFWGQSSTQAQQHSRSHSKISKHMTPPAPCPGPEPNWGKGPPETRSSLELDTELSWISGDLLPPGGQEEPPSPRDLKKCYSVEAQSCQRRPTSWLDEQRRHSIAVSCLDSGSQPHLGTDPSNLGGQPLGGPGSRPKKKLSPPSITIDPPESQGPRTPPSPGICLRRRAPSSDSKDPLASGPPDSMAASPSPKKDVLSLSGLSSDPADLDP

SEQ ID NO: 90280 - DNA, 6834 bp, Artificial Sequence
  derived and/or modified sequence
atggacgaggaggaggacggcgccggcgccgaggagagcggccagcccagaagcttcatgagactgaacgacctgagcggcgccggcggcagacccggccccggcagcgccgagaaggaccccggcagcgccgacagcgaggccgagggcctgccctaccccgccctggcccccgtggtgttcttctacctgagccaggacagcagacccagaagctggtgcctgagaaccgtgtgcaacccctggttcgagagaatcagcatgctggtgatcctgctgaactgcgtgaccctgggcatgttcagaccctgcgaggacatcgcctgcgacagccagagatgcagaatcctgcaggccttcgacgacttcatcttcgccttcttcgccgtggagatggtggtgaagatggtggccctgggcatcttcggcaagaagtgctacctgggcgacacctggaacagactggacttcttcatcgtgatcgccggcatgctggagtacagcctggacctgcagaacgtgagcttcagcgccgtgagaaccgtgagagtgctgagacccctgagagccatcaacagagtgcccagcatgagaatcctggtgaccctgctgctggacaccctgcccatgctgggcaacgtgctgctgctgtgcttcttcgtgttcttcatcttcggcatcgtgggcgtgcagctgtgggccggcctgctgagaaacagatgcttcctgcccgagaacttcagcctgcccctgagcgtggacctggagagatactaccagaccgagaacgaggacgagagccccttcatctgcagccagcccagagagaacggcatgagaagctgcagaagcgtgcccaccctgagaggcgacggcggcggcggccccccctgcggcctggactacgaggcctacaacagcagcagcaacaccacctgcgtgaactggaaccagtactacaccaactgcagcgccggcgagcacaaccccttcaagggcgccatcaacttcgacaacatcggctacgcctggatcgccatcttccaggtgatcaccctggagggctgggtggacatcatgtacttcgtgatggacgcccacagcttctacaacttcatctacttcatcctgctgatcatcgtgggcagcttcttcatgatcaacctgtgcctggtggtgatcgccacccagttcagcgagaccaagcagagagagagccagctgatgagagagcagagagtgagattcctgagcaacgccagcaccctggccagcttcagcgagcccggcagctgctacgaggagctgctgaagtacctggtgtacatcctgagaaaggccgccagaagactggcccaggtgagcagagccgccggcgtgagagtgggcctgctgagcagccccgcccccctgggcggccaggagacccagcccagcagcagctgcagcagaagccacagaagactgagcgtgcaccacctggtgcaccaccaccaccaccaccaccaccactaccacctgggcaacggcaccctgagagcccccagagccagccccgagatccaggacagagacgccaacggcagcagaagactgatgctgcccccccccagcacccccgccctgagcggcgccccccccggcggcgccgagagcgtgcacagcttctaccacgccgactgccacctggagcccgtgagatgccaggcccccccccccagaagccccagcgaggccagcggcagaaccgtgggcagcggcaaggtgtaccccaccgtgcacaccagccccccccccgagaccctgaaggagaaggccctggtggaggtggccgccagcagcggcccccccaccctgaccagcctgaacatcccccccggcccctacagcagcatgcacaagctgctggagacccagagcaccggcgcctgccagagcagctgcaagatcagcagcccctgcctgaaggccgacagcggcgcctgcggccccgacagctgcccctactgcgccagagccggcgccggcgaggtggagctggccgacagagagatgcccgacagcgacagcgaggccgtgtacgagttcacccaggacgcccagcacagcgacctgagagacccccacagcagaagacagagaagcctgggccccgacgccgagcccagcagcgtgctggccttctggagactgatctgcgacaccttcagaaagatcgtggacagcaagtacttcggcagaggcatcatgatcgccatcctggtgaacaccctgagcatgggcatcgagtaccacgagcagcccgaggagctgaccaacgccctggagatcagcaacatcgtgttcaccagcctgttcgccctggagatgctgctgaagctgctggtgtacggccccttcggctacatcaagaacccctacaacatcttcgacggcgtgatcgtggtgatcagcgtgtgggagatcgtgggccagcagggcggcggcctgagcgtgctgagaaccttcagactgatgagagtgctgaagctggtgagattcctgcccgccctgcagagacagctggtggtgctgatgaagaccatggacaacgtggccaccttctgcatgctgctgatgctgttcatcttcatcttcagcatcctgggcatgcacctgttcggctgcaagttcgccagcgagagagacggcgacaccctgcccgacagaaagaacttcgacagcctgctgtgggccatcgtgaccgtgttccagatcctgacccaggaggactggaacaaggtgctgtacaacggcatggccagcaccagcagctgggccgccctgtacttcatcgccctgatgaccttcggcaactacgtgctgttcaacctgctggtggccatcctggtggagggcttccaggccgaggagatcagcaagagagaggacgccagcggccagctgagctgcatccagctgcccgtggacagccagggcggcgacgccaacaagagcgagagcgagcccgacttcttcagccccagcctggacggcgacggcgacagaaagaagtgcctggccctggtgagcctgggcgagcaccccgagctgagaaagagcctgctgccccccctgatcatccacaccgccgccacccccatgagcctgcccaagagcaccagcaccggcctgggcgaggccctgggccccgccagcagaagaaccagcagcagcggcagcgccgagcccggcgccgcccacgagatgaagagcccccccagcgccagaagcagcccccacagcccctggagcgccgccagcagctggaccagcagaagaagcagcagaaacagcctgggcagagcccccagcctgaagagaagaagccccagcggcgagagaagaagcctgctgagcggcgagggccaggagagccaggacgaggaggagagcagcgaggaggagagagccagccccgccggcagcgaccacagacacagaggcagcctggagagagaggccaagagcagcttcgacctgcccgacaccctgcaggtgcccggcctgcacagaaccgccagcggcagaggcagcgccagcgagcaccaggactgcaacggcaagagcgccagcggcagactggccagagccctgagacccgacgacccccccctggacggcgacgacgccgacgacgagggcaacctgagcaagggcgagagagtgagagcctggatcagagccagactgcccgcctgctgcctggagagagacagctggagcgcctacatcttccccccccagagcagattcagactgctgtgccacagaatcatcacccacaagatgttcgaccacgtggtgctggtgatcatcttcctgaactgcatcaccatcgccatggagagacccaagatcgacccccacagcgccgagagaatcttcctgaccctgagcaactacatcttcaccgccgtgttcctggccgagatgaccgtgaaggtggtggccctgggctggtgcttcggcgagcaggcctacctgagaagcagctggaacgtgctggacggcctgctggtgctgatcagcgtgatcgacatcctggtgagcatggtgagcgacagcggcaccaagatcctgggcatgctgagagtgctgagactgctgagaaccctgagacccctgagagtgatcagcagagcccagggcctgaagctggtggtggagaccctgatgagcagcctgaagcccatcggcaacatcgtggtgatctgctgcgccttcttcatcatcttcggcatcctgggcgtgcagctgttcaagggcaagttcttcgtgtgccagggcgaggacaccagaaacatcaccaacaagagcgactgcgccgaggccagctacagatgggtgagacacaagtacaacttcgacaacctgggccaggccctgatgagcctgttcgtgctggccagcaaggacggctgggtggacatcatgtacgacggcctggacgccgtgggcgtggaccagcagcccatcatgaaccacaacccctggatgctgctgtacttcatcagcttcctgctgatcgtggccttcttcgtgctgaacatgttcgtgggcgtggtggtggagaacttccacaagtgcagacagcaccaggaggaggaggaggccagaagaagagaggagaagagactgagaagactggagaagaagagaagaaacctgatgctggacgacgtgatcgccagcggcagcagcgccagcgccgccagcgaggcccagtgcaagccctactacagcgactacagcagattcagactgctggtgcaccacctgtgcaccagccactacctggacctgttcatcaccggcgtgatcggcctgaacgtggtgaccatggccatggagcactaccagcagccccagatcctggacgaggccctgaagatctgcaactacatcttcaccgtgatcttcgtgctggagagcgtgttcaagctggtggccttcggcttcagaagattcttccaggacagatggaaccagctggacctggccatcgtgctgctgagcatcatgggcatcaccctggaggagatcgaggtgaacgccagcctgcccatcaaccccaccatcatcagaatcatgagagtgctgagaatcgccagagtgctgaagctgctgaagatggccgtgggcatgagagccctgctggacaccgtgggcaacctgggcctgctgttcatgctgctgttcttcatcttcgccgccctgggcgtggagctgttcggcgacctggagtgcgacgagacccacccctgcgagggcctgggcagacacgccaccttcagaaacttcggcatggccttcctgaccctgttcagagtgagcaccggcgacaactggaacggcatcatgaaggacaccctgagagactgcgaccaggagagcacctgctacaacaccgtgatcagccccatctacttcgtgagcttcgtgctgaccgcccagttcgtgctggtgaacgtggtgatcgccgtgctgatgaagcacctggaggagagcaacaaggaggccaaggaggaggccgagctggaggccgagctggagctggagatgaagaccctgagcccccagccccacagccccctgggcagccccttcctgtggcccggcgtggagggccccgacagccccgacagccccaagcccggcgccctgcaccccgccgcccacgccagaagcgccagccacttcagcctggagcaccccaccatgcagccccaccccaccgagctgcccggccccgacctgctgaccgtgagaaagagcggcgtgagcagaacccacagcctgcccaacgacagctacatgtgcagacacggcagcaccgccgagggccccctgggccacagaggctggggcctgcccaaggcccagagcggcagcgtgctgagcgtgcacagccagcccgccgacaccagctacatcctgcagctgcccaaggacgccccccacctgctgcagccccacagcgcccccacctggggcaccatccccaagctgcccccccccggcagaagccccctggcccagagacccctgagaagacaggccgccatcagaaccgacagcctggacgtgcagggcctgggcagcagagaggacctgctggccgaggtgagcggccccagcccccccctggccagagcctacagcttctggggccagagcagcacccaggcccagcagcacagcagaagccacagcaagatcagcaagcacatgaccccccccgccccctgccccggccccgagcccaactggggcaagggcccccccgagaccagaagcagcctggagctggacaccgagctgagctggatcagcggcgacctgctgccccccggcggccaggaggagccccccagccccagagacctgaagaagtgctacagcgtggaggcccagagctgccagagaagacccaccagctggctggacgagcagagaagacacagcatcgccgtgagctgcctggacagcggcagccagccccacctgggcaccgaccccagcaacctgggcggccagcccctgggcggccccggcagcagacccaagaagaagctgagcccccccagcatcaccatcgacccccccgagagccagggccccagaaccccccccagccccggcatctgcctgagaagaagagcccccagcagcgacagcaaggaccccctggccagcggcccccccgacagcatggccgccagccccagccccaagaaggacgtgctgagcctgagcggcctgagcagcgaccccgccgacctggacccctag

SEQ ID NO: 90281 - DNA, 6834 bp, Artificial Sequence
  derived and/or modified sequence
atggatgaggaagaagatggagccggagcagaagagtctgggcaaccaaggtccttcatgcgactgaatgacctgagcggcgccgggggcagacccggccctggctccgctgagaaggatcccggcagtgctgactccgaagccgaaggactcccgtacccagccctggcaccagtcgtatttttttacctttctcaagatagcagacctcggtcttggtgtttgcggaccgtatgtaatccgtggttcgagcggatttcaatgttggtgattctgcttaattgtgtgaccctggggatgtttcgtccatgcgaagacattgcgtgcgactctcagcggtgccgaattctgcaagcatttgatgatttcatcttcgcgtttttcgctgtggaaatggtagttaagatggtggccctggggattttcggcaaaaaatgttatctgggtgatacttggaatcgcctcgacttttttatagtgattgccgggatgttagagtatagtcttgacctacaaaacgtgtctttttctgccgttcgtactgttagggtgttacgcccccttcgcgccatcaatcgagtcccctccatgagaatcctggtgacactgttgttagataccctccctatgctgggaaatgtgttactgctgtgtttcttcgtgttcttcatctttggaattgtgggggtacagttgtgggccggattgctcaggaatcggtgtttcctccccgagaacttctcactgcccttgtctgtcgatctcgagcgctactatcagacagagaatgaggacgaaagtcccttcatctgctctcaaccaagggaaaatgggatgcgcagctgccggtctgtacccacactgcgaggtgacggcggcggtggccctccatgcggcctcgattatgaagcgtacaactcaagcagcaacacgacctgcgttaattggaaccagtattatacaaattgttccgcaggagaacataacccatttaaaggggcaatcaactttgacaacattggctacgcctggattgccatttttcaagtgatcaccctcgaaggctgggtcgacataatgtactttgttatggacgcccactcattctacaacttcatttactttatacttttgattatcgtgggatcgttttttatgattaacctgtgcttggttgtgatagccacccagttttcagaaaccaagcagagagaatcccaattaatgcgagagcaaagagttagatttctgagcaacgcatctacactagcctctttttcagagccaggatcttgctatgaggaactgctgaaataccttgtgtacattctcaggaaagctgcacgccgactggcacaggtttcacgggctgccggcgttcgggtggggcttctttcgagccctgcccccctgggcgggcaggagactcagcctagcagtagctgtagccgtagccaccgcagactgtccgtgcaccatctcgtccaccaccatcaccatcaccatcaccactatcacctgggcaacgggacactgcgggctccccgagcaagtcccgagatccaggaccgtgacgcaaacggcagtcgtaggctgatgttgcccccacccagcactccagcactctccggggccccccccggaggagccgagagcgtgcatagcttttatcacgctgactgtcacttggagcccgtgagatgccaggccccacccccccgaagtccatctgaagcctctggtcgtactgttgggagcggaaaagtgtatcccactgtccacacctctcctccgcccgaaaccttgaaagagaaagccctcgtagaagttgctgcatcttccggcccgcctacactgaccagtttaaacatcccccccgggccatatagcagcatgcacaaactgctggaaacccagagtactggagcttgccagtccagctgcaagatctctagcccttgtctcaaggctgactccggcgcatgcggtccggactcttgcccttattgcgcccgcgcaggagcgggggaagtcgagttggcggaccgggaaatgccagattctgactccgaggcagtgtacgaatttacacaggacgctcaacatagcgatttacgcgatccccattctaggagacagaggtctctcggccctgacgctgaacccagcagcgtgctggccttttggcgcctcatttgtgacacatttcggaaaatcgtagatagcaaatactttggacgcgggataatgatcgccatactcgtgaataccctgtctatgggaatcgaatatcatgaacagccagaggagctcactaacgccctggagattagcaacattgtgtttacaagtctgtttgccttggagatgctcctgaaattgttggtttacggacctttcggctacattaagaatccatataacatctttgacggtgtaatagtcgtcatctcagtgtgggaaatagtgggacaacaaggtggaggattgtccgttctcagaaccttccgcctgatgagggtcctcaagttagtgcggttcctccccgccctgcagagacagctagtcgtgctgatgaagaccatggacaacgtcgccactttttgtatgttgttgatgctgtttatttttattttttctatcctggggatgcacctctttgggtgcaaattcgcctctgagagagatggcgacacattgccggatcgcaaaaattttgattccctcctgtgggctattgttacagtcttccaaatcctgactcaggaggattggaataaggtcctgtacaacggcatggcaagcacaagttcttgggccgctttgtactttatcgctctgatgactttcggcaactacgtcttgttcaatttgctagtggccatactcgtggagggtttccaggcagaggagatatctaagagggaggacgctagtggacagctttcctgtatccagctcccggtcgatagtcagggaggagacgcaaataagagcgagtccgagcctgactttttttccccaagtctggatggagatggggatcgcaagaaatgtctggcgctggtctccctgggggagcaccccgaattaaggaagagcctcctccctcccttgattatacatactgctgcaactccaatgtcattgccaaagagtactagcacaggcttgggagaggccctcggacctgcttcccggcgtacctcatcttccggctccgcagaacctggtgccgcacacgaaatgaaatcaccccccagcgcccgttccagcccccactctccatggtcggccgcgtctagctggaccagtagacgcagtagccgcaactctctgggccgcgcaccatccttaaaacgacgttctccgtccggcgaacgacgcagtctgttaagtggtgagggtcaagaaagtcaagacgaggaggagtccagcgaggaagagagggcgtctcctgcggggtcggaccacagacacagaggcagcctggagagggaggctaagtcctcctttgacctacccgatacactccaagtacccgggttgcatagaacagcatctgggaggggttctgctagtgagcatcaggattgcaatggtaaaagcgctagtggtcggctcgcccgtgccctgcggcccgacgatcctcctctggacggcgacgacgctgacgatgagggcaatctgagtaaaggggagagagttagggcttggatccgcgcgcgattgcccgcctgttgtctggaacgcgacagctggagcgcctacatttttcccccccagtcaaggttcagactactctgtcacagaatcatcacccacaaaatgttcgaccacgtggtcctagtgattatctttctcaattgcatcaccatcgctatggagaggcccaagatcgatccacactcagccgaaagaatctttctcactctgtcgaactatatttttactgcagtttttttggcagagatgacagttaaagtcgtggctttaggatggtgcttcggggagcaggcttatcttagaagctcatggaacgtcctagacgggttgttggtactcatttctgttattgatattttggtgtctatggtgtcagactctggaaccaaaatactgggaatgcttagagttctccgtttgcttcgcactttgcgaccactacgggttatttcacgggcacaggggctgaaactggtggtggaaactctcatgtccagtctgaagccaatcggaaatatcgtcgtgatctgttgtgcgtttttcatcatcttcggcattttgggtgtacagctgttcaagggaaaattttttgtatgccaaggagaggatacaaggaatattacaaacaagagtgattgcgccgaggcctcctatagatgggtgcggcataaatacaattttgacaacctcggccaggccctcatgagtctgtttgtcctcgcatccaaagacggatgggttgacatcatgtatgatggactggatgccgtgggggttgaccagcaaccaattatgaatcacaacccttggatgctcctgtacttcatctcatttttattgatcgtggcattcttcgtcctcaatatgttcgtgggcgtcgtagtcgagaacttccacaaatgtcggcagcaccaggaagaggaggaggccagacgtcgagaggaaaagcgactgcggcgtctggagaagaagcgtcgaaacctcatgctcgatgatgtgattgcgtctgggagtagcgcatctgccgcgtcggaagcgcaatgtaagccctattactctgattactcccgctttcgtctcttggtgcatcatctgtgcacgagccattatctcgatctctttattacgggcgtgattgggctgaatgtcgtcacgatggcaatggaacattatcagcagccgcagatcttagatgaggctctgaagatttgtaattacatcttcacagtgattttcgtactggagagcgtatttaaactggtagccttcggatttcgaaggttctttcaggacagatggaaccagctggaccttgctatagtactgctgagcattatggggataaccttggaagagatcgaagtgaatgcttctctaccaataaaccctacaattatacgtattatgagagtgttgagaattgcgcgggtcttgaagttgctgaagatggccgttgggatgcgtgcccttctggacacagtgggaaacctgggactgctgtttatgctgctgttcttcatcttcgccgccctgggcgtggaattgttcggagatttagaatgtgatgaaacccacccctgcgagggcctggggaggcatgctaccttccggaactttggtatggcattcctgaccctgtttagagtgtccacgggggataattggaacgggataatgaaggacactctccgtgactgtgatcaggaatccacctgttacaatactgtgatctcccccatctactttgtctcttttgtgttaacagcacagtttgtgcttgtgaacgtggtcatagcggttctcatgaaacatctggaggagtctaacaaagaagccaaggaggaagccgagctcgaagccgagcttgagctggagatgaagaccctatccccacagcctcattcccctctcggctcaccttttctgtggcccggcgtagaaggtccagactcacctgattcaccgaagcctggcgctctgcatccagctgctcacgccaggtctgcctcccatttctctctggagcaccctacaatgcagcctcaccccactgaacttcccggaccagacttgcttacagttcgcaaaagcggcgtgtctcgcactcactccctgcccaacgactcctacatgtgcaggcatggaagcacggccgagggcccactggggcaccggggatggggcctccccaaggcacagtccggttcagtgttgtctgttcacagccaaccagcggacacctcttacattctacagctcccaaaggatgcccctcatctgctccagccacactccgcaccgacttggggcacgatcccaaaattgccccctcctggtcgaagtccgcttgctcaacggcccctccggcgacaggcggccattagaacagactcccttgatgtgcagggcttgggatccagagaggatctgctggccgaggtgtcgggcccctcccccccactggcaagagcatatagtttttggggccaaagctctacccaagctcaacagcactcccgttcccattctaaaatatctaagcatatgacccctcccgcaccctgccccggccctgaacccaactgggggaagggaccgcccgaaacacggagctccctcgagctggacaccgagctgtcatggatatctggcgatcttcttcctccagggggccaagaggaacccccttcaccccgggacctgaaaaagtgttatagcgtggaagcccaatcgtgtcagagaaggccaacctcatggctggacgaacaacgaaggcatagtatcgccgtgagttgcttggactctgggagtcagccgcatcttggtacagatcccagcaaccttgggggccagcccttaggggggccagggtctcgccctaagaagaagttatcgccgcccagtatcactattgacccgcctgaaagtcagggcccccgcacacccccatctcccgggatctgtctgcggcgccgtgccccttcaagcgacagtaaagaccccctcgcctccgggccacccgactccatggctgcctcaccctcccctaagaaggatgtcctcagcctgagcggtctgtcttccgatcctgcggatctcgacccatag

SEQ ID NO: 90282 - DNA, 6834 bp, Artificial Sequence
  derived and/or modified sequence
atggatgaggaggaggatggagctggagctgaggagagcggccagcccaggagcttcatgaggctgaatgacctgagcggggccggcggccggcccggccctggcagcgctgagaaggaccccggcagcgctgacagcgaggccgagggcctgccctacccagccctggcccctgtggtgttcttctacctgagccaggacagccggcccaggtcctggtgcctgaggacagtgtgcaacccctggtttgagcgcatctccatgctggtgatcctgctgaactgtgtgaccctgggcatgttccggccctgtgaagatattgcctgtgacagccagcgctgccgcatcctgcaggcctttgatgacttcatctttgccttctttgctgtggagatggtggtgaagatggtggccctgggcatctttgggaagaagtgctacctgggggacacctggaaccggctggacttcttcatcgtgattgctggcatgctggagtacagcctggacctgcagaatgtgtccttctctgctgtgaggacagtgcgggtgctgcggcccctgcgggccatcaacagagtgcccagcatgaggatcctggtgaccctgctgctggacaccctgcccatgctgggcaatgtgctgctgctgtgcttctttgtgttcttcatctttggaattgtgggcgtgcagctgtgggccggcctgctgaggaaccgctgcttcctgcctgagaacttcagcctgcccctgtctgtggacctggagcgctactaccagacagaaaatgaagatgagagccccttcatctgcagccagccccgggagaatggcatgaggagctgccgctctgtgcccaccctgcggggagatggcggcggcggccccccctgtggcctggactatgaggcctacaacagcagcagcaacaccacctgtgtgaactggaaccagtactacaccaactgcagcgctggggagcacaaccccttcaagggggccatcaactttgacaacatcggctacgcctggatcgccatcttccaggtgatcaccctggagggctgggtggacatcatgtactttgtgatggatgcccacagcttctacaacttcatctacttcatcctgctgatcatcgtgggcagcttcttcatgatcaacctgtgcctggtggtgattgccacccagttcagcgagaccaagcagcgggagagccagctgatgagggagcagagggtgcgcttcctgagcaatgccagcaccctggccagcttcagcgagcccggcagctgctatgaggagctgctgaagtacctggtgtacatcctgaggaaggccgcccggcggctggcccaggtgtccagagctgctggggtgcgggtgggcctgctgagcagccctgcccccctgggcggccaggagacccagcccagcagcagctgcagccgcagccaccggcggctgtctgtgcaccacctggtgcaccaccaccaccaccaccaccaccactaccacctgggcaatggcaccctgcgggccccccgggccagccctgagatccaggacagagatgccaacggcagccggcggctgatgctgcccccacccagcaccccagccctgagcggggcccctcctggaggagctgagagcgtgcacagcttctaccacgccgactgccacctggagcctgtgcgctgccaggcccccccacccaggagccccagcgaggccagcggccgcacagtgggcagcggcaaggtgtaccccaccgtgcacaccagccccccacctgagaccctgaaggagaaggccctggtggaggtggccgccagcagcggcccccccaccctgaccagcctgaacatccccccaggcccctacagctccatgcacaagctgctggagacccagagcactggagcctgccagagcagctgcaagatcagcagcccctgcctgaaggctgacagcggggcctgtggccctgacagctgcccctactgtgcccgggccggggccggggaggtggagctggccgaccgggagatgccagacagcgacagcgaggccgtgtatgagttcacccaggatgcccagcacagcgacctgcgggacccccacagccggcggcagaggagcctgggcccagatgctgagcccagctctgtgctggccttctggaggctcatctgtgacaccttcaggaagatcgtggacagcaagtacttcggccggggcatcatgattgccatcctggtgaacaccctgtccatgggcatcgagtaccacgagcagcctgaggagctgaccaatgccctggagatcagcaacatcgtgttcaccagcctgtttgccctggagatgctgctgaagctgctggtgtatggccccttcggctacatcaagaacccctacaacatctttgatggagtcatcgtggtgatctctgtgtgggagatcgtgggccagcagggcggcggcctgtctgtgctgcggaccttccggctgatgagggtgctgaagctggtgcgcttcctgcctgccctgcagaggcagctggtggtgctgatgaagaccatggacaacgtggccaccttctgcatgctgctgatgctgttcatcttcatcttcagcatcctgggcatgcacctgtttggctgcaagtttgccagcgagagagatggagacaccctgcctgacaggaagaactttgacagcctgctgtgggccatcgtgacagtgttccagatcctgacccaggaggactggaacaaggtgctgtacaacggcatggccagcaccagctcctgggccgccctgtacttcatcgccctgatgaccttcggcaactacgtgctcttcaacctgctggtggccatcctggtggagggcttccaggccgaggagatcagcaagcgggaggatgccagcggccagctgagctgcatccagctgcctgtggacagccagggcggagatgccaacaagtctgagagcgagccagacttcttcagccccagcctggatggagatggagacaggaagaagtgcctggccctggtgtccctgggggagcaccctgagctgaggaagagcctgctgcccccactcatcatccacacagctgccacccccatgagcctgcccaagagcaccagcacaggcctgggggaggccctgggccctgccagcaggaggaccagcagcagcggcagcgctgagcctggagctgcccacgagatgaagagcccccccagcgcccggagcagcccccacagcccctggagcgctgccagctcctggaccagccgccgcagcagcaggaacagcctgggccgggcccccagcctgaagagaagaagccccagcggggagcggcgcagcctgctgtctggagagggccaggagagccaggatgaggaggagagcagcgaggaggagcgggccagccctgctggcagtgaccaccgccaccggggcagcctggagcgggaggccaagagcagctttgacctgcctgacaccctgcaggtgcccggcctgcacaggacagccagcggccggggcagcgccagcgagcaccaggactgcaatggcaagagcgccagcggccgcctggcccgggccctgcggccagatgatcctcccctggatggagatgatgctgatgatgagggcaacctgagcaagggggagcgggtgcgggcctggatccgggcccggctgcctgcctgctgcctggagcgggacagctggagcgcctacatcttccccccccagagccgcttccggctgctgtgccaccgcatcatcacccacaagatgtttgaccacgtggtgctggtgatcatcttcctgaactgcatcaccatcgccatggagcggcccaagattgacccccacagcgctgagcgcatcttcctgaccctgagcaactacatcttcaccgctgtgttcctggccgagatgacagtgaaggtggtggccctgggctggtgcttcggggagcaggcctacctgcggagctcctggaatgtgctggatggcctgctggtgctgatctctgtgattgacatcctggtgtccatggtgtctgattctggcaccaagatcctgggcatgctgcgggtgctgcggctgctgcggaccctgcggcccctgcgggtcatcagccgggcccagggcctgaagctggtggtggagaccctgatgagcagcctgaagcccatcggcaacatcgtggtgatctgctgtgccttcttcatcatcttcggcatcctgggcgtgcagctgttcaagggcaagttctttgtgtgccagggcgaggacaccaggaacatcaccaacaagagtgactgtgccgaggccagctaccgctgggtgcgccacaagtacaactttgacaacctgggccaggccctgatgagcctgtttgtgctggccagcaaggatggctgggtggacatcatgtatgatggcctggatgctgtgggcgtggaccagcagcccatcatgaaccacaacccctggatgctgctgtacttcatctccttcctgctgattgtggccttctttgtgctgaacatgtttgtgggcgtggtggtggagaacttccacaagtgccggcagcaccaggaggaggaggaggcccggcggcgggaggagaagaggctgcggcggctggagaagaagagaagaaacctgatgctggatgatgtgattgccagcggcagcagcgccagcgctgccagcgaggcccagtgcaagccctactacagcgactacagccgcttccggctgctggtgcaccacctgtgcaccagccactacctggacctcttcatcaccggggtgattggcctgaatgtggtgaccatggccatggagcactaccagcagccccagatcctggatgaggccctgaagatctgcaactacatcttcaccgtcatctttgtgctggagagcgtcttcaagctggtggccttcggcttccgccgcttcttccaggaccgctggaaccagctggacctggccatcgtgctgctgagcatcatgggcatcaccctggaggagattgaggtgaatgccagcctgcccatcaaccccaccatcatccgcatcatgagggtgctgcgcatcgcccgggtgctgaagctgctgaagatggctgtgggcatgagggccctgctggacacagtgggcaacctgggcctgctcttcatgctgctcttcttcatctttgctgccctgggcgtggagctgtttggagacctggagtgtgatgagacccacccctgtgagggcctgggcagacatgccaccttcaggaactttggcatggccttcctgaccctcttccgggtgtccactggagacaactggaatggcatcatgaaggacaccctgcgggactgtgaccaggagagcacctgctacaacacagtcatcagccccatctactttgtgtcctttgtgctgacagcccagtttgtgctggtgaatgtggtgattgctgtgctgatgaagcacctggaggagagcaacaaggaggccaaggaggaggccgagctggaggccgagctggagctggagatgaagaccctgagcccccagccccacagccccctgggcagccccttcctgtggccaggagtggagggccctgacagcccagacagccccaagccaggggccctgcaccctgctgcccacgcccggagcgccagccacttcagcctggagcaccccaccatgcagccccaccccacagagctgcccggccctgacctgctgactgtgaggaagtctggagtgtccaggacccacagcctgcccaatgacagctacatgtgccgccacggcagcacagctgagggccccctgggccaccggggctggggcctgcccaaggcccagagcggctctgtgctgtctgtgcacagccagcctgctgacaccagctacatcctgcagctgcccaaggatgccccccacctgctgcagccccacagcgcccccacctggggcaccatccccaagctgcccccacctggccgcagccccctggcccagaggcccctgcggcggcaggccgccatcagaacagacagcctggatgtgcagggcctgggcagccgggaggacctgctggccgaggtgtctggccccagcccccccctggcccgggcctacagcttctggggccagagcagcacccaggcccagcagcacagccgcagccacagcaagatcagcaagcacatgaccccaccagccccctgccccggccctgagcccaactggggcaagggccccccagagaccaggagcagcctggagctggacacagagctgtcctggatcagcggggacctgctgcccccaggcggccaggaggagccccccagcccccgggacctgaagaagtgctacagcgtggaggcccagagctgccagaggcggcccacctcctggctggatgagcagaggaggcacagcattgctgtgtcctgcctggacagcggcagccagccccacctgggcacagaccccagcaacctgggcggccagcccctgggcggccctggcagccggcccaagaagaagctgagcccccccagcatcaccattgatcctcctgagagccagggccccaggaccccacccagccctggcatctgcctgcggcggcgggcccccagcagtgacagcaaggaccccctggccagcggccccccagacagcatggccgccagccccagccccaagaaggatgtgctgagcctgagcggcctgagcagtgaccctgctgacctggacccctag

SEQ ID NO: 90283 - DNA, 6834 bp, Artificial Sequence
  derived and/or modified sequence
atggacgaggaggaggacggcgccggcgccgaggagagcggccagcctcgcagctttatgcgccttaacgatttgagcggcgccggaggccggccggggcctggatcagctgaaaaagaccctggaagtgcagatagtgaggccgaaggacttccatacccagccttggcccctgttgtgtttttctatctgtctcaggacagcaggcctaggagctggtgtctgaggacagtgtgtaatccgtggttcgaaagaatttccatgttggttattctgctgaactgtgtgactctgggaatgttccggccctgcgaagatattgcttgtgattcacagcgctgcaggatccttcaagcgtttgacgactttatttttgcatttttcgccgtggagatggttgttaagatggtggctctgggcatcttcggaaagaagtgttacctgggggacacgtggaataggctggacttcttcatcgtcatagctggaatgctggagtacagcctggacttacagaacgtgtcctttagtgccgtgcggaccgtcagggtcttgcgtccactcagagccataaatcgagtgccatctatgcgcattctggtcaccctgctgcttgacacactccctatgttgggcaacgtgcttctgctctgtttcttcgtctttttcatcttcggtattgttggtgtgcagctatgggccggcctgctgagaaatcggtgtttcctgccggagaactttagcttgccactttccgttgacctggagcggtattaccagacagaaaacgaggacgaatcccccttcatttgcagccagccacgtgagaatggcatgcgaagttgtagaagcgttcccacgctgagaggggatggggggggaggcccaccctgtggtctggactacgaggcttataacagctcttccaacacaacatgtgtcaattggaatcagtattataccaactgttccgcgggcgagcacaacccctttaaaggggccatcaacttcgataatatcggttatgcctggatagcgattttccaggtgatcactctggaaggatgggtagacatcatgtatttcgtgatggatgcccacagtttctacaatttcatctacttcattctgttgatcattgttggcagttttttcatgatcaacctctgcctggtcgttattgccacccagttcagcgaaacgaaacaacgcgaatctcagctgatgagggaacaacgagtgcgctttctctctaatgcaagcactctcgcgtctttctcggagcccgggtcatgttacgaggagctcttgaagtaccttgtgtatatcctgcggaaagcagctcgacgtctggcccaggtgtccagagctgcgggagtgagagtgggactgctcagctcccccgcccccttaggcggccaggagacgcagccatcctcatcatgttccaggtcacacaggaggcttagcgttcaccatcttgtgcatcaccatcaccaccaccaccatcactatcaccttggtaatgggacgttacgcgcgcctcgggctagtccggaaatccaggatagggatgcaaatggtagtagaagattaatgctgcccccccctagcacaccagccctgtccggggcacccccaggtggggctgagtcagtgcacagtttctaccatgccgactgtcatctcgaaccagtgaggtgtcaggctccacctcctagatcaccgtcagaagcttctgggaggactgtaggttctggcaaggtttaccccactgtgcacactagcccacccccggagacattgaaggagaaagcccttgttgaagtcgccgctagcagcggacctccgaccctgaccagcctaaacatccctccagggccctacagttctatgcacaaactactggaaacacaaagtacgggcgcttgtcagagctcctgtaagatctctagcccatgcctgaaagctgatagcggcgcctgtggtcctgatagttgtccgtattgcgccagagctggagctggtgaagtcgagctggctgacagggagatgcccgactccgacagcgaagccgtttatgagttcactcaagacgcgcagcactcagatctgcgagatccacacagcagacgacagcggagcctggggccagacgcagaaccatcgtccgtattagcgttttggcgactgatttgtgacacttttagaaagattgtggattctaagtactttggtagagggattatgatagccattttggtgaatactttgagtatgggcatcgagtaccacgagcagcccgaggagctcaccaacgccctggagattagtaatatcgttttcacctcgctgtttgccctggagatgcttctgaagctgcttgtgtatggacccttcggttacattaagaatccgtacaacatattcgacggggtgatcgtggttatctcagtgtgggagatcgtcggacaacaaggtggaggcctgagcgtcctcaggacattcaggctgatgagggtgttgaagttggtacggtttctgcccgcgctgcagagacagctcgtggtgcttatgaagaccatggacaacgtggctacattttgtatgctcctgatgctgtttatctttatcttttcaattctcggcatgcacctttttggctgcaagtttgcctcagagagggacggcgatactctccccgaccggaagaattttgatagcctgttgtgggccattgtcaccgtttttcagattctaacacaggaggactggaataaagtgctgtacaacgggatggcgtcaacctctagctgggccgcgctgtattttattgccctgatgacttttggaaactacgtgctgttcaatctgctggtggctattctcgtggaaggatttcaagcggaagagatctccaagagggaagacgcttcagggcagctctcctgcatccagctcccagtagactctcagggcggagacgccaacaaaagcgagtcagaacccgacttctttagcccaagtctcgatggggatggtgacagaaagaagtgcctcgcactggtcagtttaggggaacatcctgagttgcgcaaatccctgctgccacctctgattatccacaccgccgcgacccccatgagcttacccaagtctacatccacaggccttggggaggcactcgggccagctagccgacgaacatcttcgtcgggctcagctgaacccggcgccgctcatgaaatgaagagccccccttccgcacgctcgtcacctcacagcccctggtcagccgccagctcgtggacatcacgcaggtcatcacgaaatagcctgggacgggcgccctctttgaagcggcgcagcccttctggagaacggaggagcctcttaagcggtgagggtcaagagtcacaggacgaagaggagagctccgaggaggaaagggcttctcccgccggctccgaccatcgccacaggggttctttagagcgcgaagctaaatccagcttcgacttgcctgatacattgcaagtaccaggattgcatcgcacagcttcagggcgagggtctgccagcgagcatcaggattgtaatggcaagtccgcttctggcaggcttgccagggcactaagaccagacgacccacccctcgacggagatgatgcagacgacgagggaaatctgtccaagggagaacgcgtccgtgcttggattagagctcgtttacccgcgtgctgcctcgaaagggactcttggtccgcctatatcttcccgccgcaatctcgttttcgtttattatgtcataggataatcactcacaagatgttcgatcacgtggtgttagtcataatatttttgaattgtataaccattgccatggagcgaccgaaaatcgatccgcacagcgccgagaggatctttctcaccctcagcaactatatctttacagcggtctttctggccgagatgactgtaaaagtggtggccttgggctggtgtttcggggaacaggcataccttcgctccagctggaatgttctagacgggttgctggtgcttatttctgtgatcgatatacttgtatctatggtcagcgatagcggcactaaaattttgggtatgcttcgggtgcttcgactgctccggaccctccggcccctacgtgtcatctctagagctcagggcctcaagcttgtcgttgaaacactcatgtcgtctctgaaacctatcggaaatatcgttgtgatctgttgcgctttctttattatttttgggatcctcggcgtgcagttgttcaagggcaaatttttcgtgtgtcagggtgaggacacgcgcaatatcacgaacaagagtgactgcgctgaggcatcatacaggtgggtcagacataagtataactttgataatcttgggcaggcactgatgtctctgttcgtgctggcctctaaggacgggtgggtggatataatgtatgacggcctggacgctgtgggggtcgaccagcagccaatcatgaatcacaacccatggatgcttttgtactttattagcttcttgctgatcgtagctttcttcgtcctgaatatgttcgtgggtgtggttgtagagaacttccacaaatgccgccagcatcaggaggaggaagaggctagacgtcgagaagagaagcggctgcgccggttggaaaagaagcgccgtaacctgatgttggacgatgtgatcgcatcaggaagcagtgcctcagccgctagcgaggcccagtgtaagccctactattcggactatagtcggttccgacttttggttcaccatctttgtacctcacactacctagacctgttcattaccggcgttatcggactgaacgtagtcactatggctatggagcactatcaacagccacagatcctggacgaggctttgaagatttgcaattacatcttcaccgtaatttttgtcctggagtccgtgtttaagctggttgcctttgggtttcgacgattcttccaagatagatggaatcagctagatctggcaatagtcctgctgagtattatgggtatcaccctcgaggagattgaggtgaatgcaagtctgccaataaatccaacgattatccggatcatgcgggtcctgcgcatcgcccgcgttttgaagttgctgaagatggctgtcggtatgcgcgccctgctcgacacagtggggaatctgggattactctttatgctgctcttcttcatttttgctgccctcggcgtggagctgtttggggatcttgagtgtgacgagacccacccctgcgagggactcggcagacatgccacgtttcggaatttcgggatggctttcttgacactgtttcgcgtttctacgggcgataattggaatgggatcatgaaggatacactgagggactgcgaccaggaaagcacatgctacaatactgtcatctctcctatttattttgtgagcttcgtgctgacagcccagtttgttttagtcaatgtcgtgattgccgttctgatgaaacatctagaagaatctaataaggaggctaaggaagaggcagagttagaggcagagttggagctggagatgaagactctcagcccacagcctcacagccccctgggttcccccttcctgtggcccggagttgagggcccggactctcctgatagcccgaagcctggtgcactccaccccgctgctcacgctcgctctgcaagccacttttccctcgagcaccccaccatgcagcctcaccccaccgagttgccagggccagacctgctcaccgtacgcaaatctggggtgtcccggacccattcattgccgaacgactcttatatgtgccggcatgggtctaccgccgaaggcccacttggtcatagaggctgggggctgccgaaggcacagtccggcagcgtcctatcggtgcacagccagcccgctgacacatcatacattctgcaactgcctaaagacgcaccccacctactgcagccccattctgcacccacgtggggcactatcccgaagctcccccctcccggacgtagccctctggcgcaaaggccacttcgccgacaggctgcaataaggaccgatagcttggatgtccaaggcctgggctcacgcgaggatctgttggctgaggtatctggccccagtccacctcttgccagggcgtactccttctgggggcagagctcaacgcaggcacagcaacactcacgcagccacagcaagatttctaagcacatgacacctcccgccccctgtcccggtcccgagcccaactgggggaaggggcctccagaaacaagaagtagccttgagctcgacacggagctcagctggatttctggcgacttactgccacccggcggccaggaagagccccccagtccaagggacctgaaaaaatgctacagcgttgaggctcagagctgtcaacgccgcccaaccagttggctggacgaacagcgtcggcacagcatcgctgtctcctgcctggacagtggctctcagccacatctgggcactgatccctccaacttgggagggcaaccactggggggacctggctcacgacccaagaaaaagctgagtcctccatctatcacaatagacccccctgagtctcaaggcccaagaacaccacctagtcctggcatttgtctgaggcggagggctccaagttcagacagtaaagacccattggctagtggcccccccgattccatggccgcctccccaagccctaaaaaagatgtcctgtcgctttccgggctgtcgagtgatccagcggatcttgacccttag

SEQ ID NO: 90284 - DNA, 6833 bp, Artificial Sequence
  derived and/or modified sequence
atggatgaggaagaggatggggctggggctgaggagagtgggcaaccgagatctttcatgcgtctgaacgacctgagtggagctgggggacgacctggacctgggtcagctgaaaaggatcccggttcagccgattccgaagcggaaggtttgccgtatccagccctcgcgccagtagtgttcttctacctatctcaggacagtcgcccaagatcctggtgtctccgaactgtgtgtaatccctggttcgaaagaataagcatgcttgtcatacttctcaattgcgtgacccttggtatgtttaggccatgcgaggacattgcttgcgactcacaaagatgtcggatcctccaagccttcgacgatttcatctttgcattttttgccgtcgaaatggtggtgaaaatggttgcgctcggaattttcggcaaaaagtgttatctcggcgatacctggaacagattagacttcttcatcgtcattgctggcatgctggagtattcactggacctgcaaaacgtgtcattttcggccgtgcggaccgtgcgcgtcctgaggccattgcgagctataaatcgcgtcccgtctatgagaatactggttacattgctgctggacacattgccaatgttaggcaatgtgctgctgctgtgcttttttgtgttctttattttcggcattgtcggagtgcagctgtgggccggtttgcttcggaatcggtgctttcttcctgaaaatttttctttaccactctctgttgatctcgagagatactatcagacagagaacgaggacgaatccccttttatttgttctcagcctagggagaacggcatgcgttcctgcaggagcgtgccaaccctgagaggcgacgggggtggcggtcctccatgcggactggactacgaagcatacaattccagcagcaacactacctgcgtgaattggaaccagtattacacgaattgctcagccggagagcacaacccgtttaaaggagcaatcaactttgacaatatcgggtatgcatggattgcaatattccaggtcatcacgctggaaggctgggtagacatcatgtactttgtgatggacgcccattccttttacaatttcatttacttcatcctccttattatcgtgggatctttctttatgatcaacctctgcctggtagtaatagctacccagttctctgagacaaagcagagagagtcccagctgatgcgcgaacagcgtgtgcgttttctcagcaacgcatcaaccctggcctcctttagtgaacccggatcttgctacgaagaactgttaaagtacttggtgtatattctgcgcaaagccgctagacgactcgcccaggtgagtcgcgcagcgggagtgcgtgtaggcctgctatcttccccggcaccactggggggtcaggaaacacagcccagctccagttgcagcaggtcgcaccggagactatccgtccaccatcttgtgcaccaccatcaccatcatcatcaccactatcacctaggtaacggaacgctgcgcgcaccccgagcgtctcctgagattcaggatagggacgccaatggtagcagaagactcatgctccctccaccttccacacccgcactgtccggtgctccccctggtggcgctgaatccgtgcattctttctaccacgcagactgtcacttggagccggtgagatgccaagccccaccgcctcgttccccctctgaggcgagtggcagaacagtgggtagtggaaaggtttatcccacagtgcacacctcacctccacctgagaccctcaaagaaaaagcccttgttgaagtggccgctagctcaggtccacccactctcacatctttgaacattcctcccggtccttacagcagcatgcacaagcttctcgagacgcaaagcaccggggcttgtcagtcctcatgcaagatttctagcccttgcctgaaggctgattcgggcgcttgcgggccagattcttgtccctactgcgccagggcaggggcaggcgaagtagaactcgccgatcgggagatgccagatagcgacagcgaggcggtgtacgaattcactcaggatgcgcagcacagcgacctgcgggatccccacagccgcaggcaaagatcactgggccctgacgccgagccctcttcagtactggcattctggagattaatttgcgacaccttccgcaaaatcgtcgacagcaaatactttggtagaggtattatgattgcaattctcgtgaatacgctcagcatgggcattgagtatcatgagcagccggaggagctgactaacgccctcgaaatcagcaatattgtgtttacaagtctattcgctttggaaatgctgctgaagctccttgtctatgggcctttcgggtacatcaaaaacccttacaacatcttcgacggagtcatcgtagtgatatctgtgtgggaaatcgtgggacagcagggtggcggtctgagcgtcctgcgaacgttcaggctgatgagagtgttgaagcttgtgaggtttctcccggcactccagagacaactggttgtactgatgaagactatggataacgtcgccaccttttgcatgctccttatgttgtttatttttatattttcaatcctcgggatgcatctatttgggtgtaagttcgcgagcgagagagatggcgacactctgcccgatcgcaagaatttcgatagcctgctgtgggctattgttactgtgttccagatcctgactcaggaggactggaacaaagtgctttacaatggaatggcatccacctcctcctgggccgcattatatttcattgctctgatgacttttggaaactatgtcctgttcaacctgctggtggctattttagtggaagggttccaagcagaggaaatatctaaacgagaagatgcgtctggccaactgtcctgtatccaactgccagtggacagccagggaggggacgctaacaagagcgagtcagagcccgatttcttcagcccttccctggacggtgacggagacagaaagaagtgtctggccctggtgagcttaggtgaacaccctgagctgcgcaagagcctcttgcccccacttattatccatactgccgcaactcctatgtccctccctaaaagtacctcgaccggccttggggaagcccttggtccagccagccgaagaacctcttcctctgggtccgccgaaccgggagcagctcacgagatgaagagtccacccagcgccagatcgtctccccactctccctggagcgccgcatcgtcatggacatctcgccgtagcagcaggaactctttagggagagcacccagtctgaaacggagatcccccagcggggagaggcgctccttgttgtctggcgagggtcaggaaagccaggatgaggaagaatcttctgaagaggaacgtgctagccctgcaggaagtgaccaccggcaccgcggatccctggagcgggaggcaaagtcatcatttgacctacccgatacattgcaggtgccaggtctccatcgcaccgcgtcaggacgcggatccgcttccgagcaccaggattgtaacggtaaaagcgcttccggacggctagcacgggcactccggcctgacgacccccctctggatggggacgatgctgatgatgaagggaacctcagcaaaggcgaacgagtccgcgcttggatccgagctcgactgcccgcttgttgtctcgagagagacagttggtcagcttatatctttcctccacagtccagatttaggctcctgtgtcatcgcattattacccacaaaatgttcgaccacgtggtgttggtgattatttttctcaattgtataaccatcgcaatggaacggcctaagatagatccccattccgctgagaggattttcttgactctcagtaattacattttcacagcagttttcctggccgagatgaccgtgaaagtggttgccctgggatggtgttttggcgagcaggcctacctcagaagcagctggaacgtcctggacggcctcctggttcttataagcgtgattgatatcctggtaagcatggtgtccgattcaggtaccaaaattctgggtatgctgcgggtgctgaggctactgcgaaccctgcgcccattgagagtgattagtcgcgcacaagggctcaagctggtggtagaaactctcatgagctcactcaaacctatcgggaatattgtggtcatttgctgcgcctttttcatcatcttcgggatcctgggagtacagctgttcaaaggtaagtttttcgtctgtcagggcgaagatacacgcaacatcactaataagtccgactgcgcggaggcatcttatagatgggtgcgtcataagtacaatttcgacaacctcggccaggctctcatgtccctttttgtgcttgccagcaaggacggatgggtagatatcatgtacgacggattggacgctgttggcgtggaccaacagcccataatgaatcacaatccatggatgctcctatacttcatctccttcctcttgatcgtagcattcttcgtgttgaacatgttcgtgggtgtagtggttgaaaacttccacaagtgccggcagcatcaagaggaagaagaggcaagacggcgtgaagagaaacgactgcgacgactcgagaagaagaggcgcaacctaatgctagacgacgttattgcctcaggaagcagcgcctccgcggcatccgaggctcagtgcaagccatactattcggattattccagattccgcctgctggtccaccacctgtgcacttcacactaccttgatctgttcatcacaggggtaatcggcctgaatgtcgttactatggctatggagcattaccaacaaccgcagattctcgacgaggctttaaaaatctgtaactatatctttacagtgatctttgttctcgaatccgtgtttaaactcgtcgccttcgggttcaggcgctttttccaagatagatggaaccagttagaccttgccatagtactgctaagcataatggggattactttagaggagatcgaggtgaatgcctccctccccatcaatccaaccatcataagaatcatgcgagttctcagaattgcccgagtgctaaaactcctaaagatggccgttggaatgagagcactcctggacactgtcggcaatctcggtcttttgttcatgcttctgttctttatctttgccgctctgggcgtcgaactttttggagacctggagtgtgatgagacacacccatgcgaagggttgggcaggcacgccaccttccgcaactttggaatggcctttttgacactattcagagttagtacaggcgataattggaatggaatcatgaaggacactctccgagactgtgatcaggagtcgacctgttacaacacagttatttctcccatttattttgtctctttcgtgctcacagcgcagtttgttctcgtgaatgtcgtcatcgccgtactgatgaaacacctcgaggaatcaaacaaagaggccaaggaggaggcggagcttgaggccgagcttgaactagaaatgaagaccttatctccccagccacactctcctctcgggagcccctttctatggcccggtgtggaggggccagattcacccgatagtccaaagcctggggctcttcatcctgccgcacacgctcggtcagcgtctcacttttctctggaacatcctaccatgcagcctcacccgactgagctgccgggaccagatctgttgaccgtgcgcaagagtggggttagccgcactcattctttgcccaacgatagctatatgtgccgccatgggagcaccgcggaggggcctcttggccacaggggctggggactccctaaggctcaatccggttctgtcttgtcagttcatagccagcctgccgacacgagctatatcctacagttgcccaaagacgcccctcacctcctccagccgcacagtgcacccacatgggggacaatccccaagctgcctcctccgggacgctctccgctggcgcagcggccactgagacgccaggccgctattcgcaccgactcgctggatgtgcagggactggggagcagggaagacctgctagcagaggtatcaggtcccagcccccctctcgctagagcttacagtttctgggggcagagttccacccaagcccaacagcattcacgctcccactccaagatatcaaaacacatgaccccaccagcaccatgccctggtcctgagcccaattggggaaagggaccgcctgagacaagaagctctctggagcttgacaccgagttatcctggatatctggcgatctgcttccaccagggggacaagaagagcccccatcacctcgtgatctgaagaagtgttacagcgtcgaggcacaatcctgccagagaaggcctactagctggttagacgaacaacggaggcactcgatcgccgtctcttgcctggattccggctcacagcctcatcttgggaccgatccatccaatctgggaggacagcctctggggggaccgggatctagacccaagaaaaagttgagccctcccagtatcacaattgatccccctgaatctcaaggaccgaggaccccacccagtcctggaatttgtttaagaagaagggccccttccagcgattcaaaagatcccttagccagtggtccacccgactcaatggcagcgagcccatctcctaaaaaggacgtactgtctttaagcggcctttcctccgaccctgcagacctggacccata

SEQ ID NO: 90285 - DNA, 6849 bp, Artificial Sequence
  derived and/or modified sequence
atggacgaggaggaggatggagcgggcgccgaggagtcgggacagccccggagcttcatgcggctcaacgacctgtcgggggccgggggccggccggggccggggtcagcagaaaaggacccgggcagcgcggactccgaggcggaggggctgccgtacccggcgctggccccggtggttttcttctacttgagccaggacagccgcccgcggagctggtgtctccgcacggtctgtaacccctggtttgagcgcatcagcatgttggtcatccttctcaactgcgtgaccctgggcatgttccggccatgcgaggacatcgcctgtgactcccagcgctgccggatcctgcaggcctttgatgacttcatctttgccttctttgccgtggagatggtggtgaagatggtggccttgggcatctttgggaaaaagtgttacctgggagacacttggaaccggcttgactttttcatcgtcatcgcagggatgctggagtactcgctggacctgcagaacgtcagcttctcagctgtcaggacagtccgtgtgctgcgaccgctcagggccattaaccgggtgcccagcatgcgcatccttgtcacgttgctgctggatacgctgcccatgctgggcaacgtcctgctgctctgcttcttcgtcttcttcatcttcggcatcgtcggcgtccagctgtgggcagggctgcttcggaaccgatgcttcctacctgagaatttcagcctccccctgagcgtggacctggagcgctattaccagacagagaacgaggatgagagccccttcatctgctcccagccacgcgagaacggcatgcggtcctgcagaagcgtgcccacgctgcgcggggacgggggcggtggcccaccttgcggtctggactatgaggcctacaacagctccagcaacaccacctgtgtcaactggaaccagtactacaccaactgctcagcgggggagcacaaccccttcaagggcgccatcaactttgacaacattggctatgcctggatcgccatcttccaggtcatcacgctggagggctgggtcgacatcatgtactttgtgatggatgctcattccttctacaatttcatctacttcatcctcctcatcatcgtgggctccttcttcatgatcaacctgtgcctggtggtgattgccacgcagttctcagagaccaagcagcgggaaagccagctgatgcgggagcagcgtgtgcggttcctgtccaacgccagcaccctggctagcttctctgagcccggcagctgctatgaggagctgctcaagtacctggtgtacatccttcgtaaggcagcccgcaggctggctcaggtctctcgggcagcaggtgtgcgggttgggctgctcagcagcccagcacccctcgggggccaggagacccagcccagcagcagctgctctcgctcccaccgccgcctatccgtccaccacctggtgcaccaccaccaccaccatcaccaccactaccacctgggcaatgggacgctcagggccccccgggccagcccggagatccaggacagggatgccaatgggtcccgccggctcatgctgccaccaccctcgacgcctgccctctccggggccccccctggtggcgcagagtctgtgcacagcttctaccatgccgactgccacttagagccagtccgctgccaggcgccccctcccaggtccccatctgaggcatccggcaggactgtgggcagcgggaaggtgtatcccaccgtgcacaccagccctccaccggagacgctgaaggagaaggcactagtagaggtggctgccagctctgggcccccaaccctcaccagcctcaacatcccacccgggccctacagctccatgcacaagctgctggagacacagagtacaggtgcctgccaaagctcttgcaagatctccagcccttgcttgaaagcagacagtggagcctgtggtccagacagctgcccctactgtgcccgggccggggcaggggaggtggagctcgccgaccgtgaaatgcctgactcagacagcgaggcagtttatgagttcacacaggatgcccagcacagcgacctccgggacccccacagccggcggcaacggagcctgggcccagatgcagagcccagctctgtgctggccttctggaggctaatctgtgacaccttccgaaagattgtggacagcaagtactttggccggggaatcatgatcgccatcctggtcaacacactcagcatgggcatcgaataccacgagcagcccgaggagcttaccaacgccctagaaatcagcaacatcgtcttcaccagcctctttgccctggagatgctgctgaagctgcttgtgtatggtccctttggctacatcaagaatccctacaacatcttcgatggtgtcattgtggtcatcagcgtgtgggagatcgtgggccagcaggggggcggcctgtcggtgctgcggaccttccgcctgatgcgtgtgctgaagctggtgcgcttcctgccggcgctgcagcggcagctggtggtgctcatgaagaccatggacaacgtggccaccttctgcatgctgcttatgctcttcatcttcatcttcagcatcctgggcatgcatctcttcggctgcaagtttgcctctgagcgggatggggacaccctgccagaccggaagaattttgactccttgctctgggccatcgtcactgtctttcagatcctgacccaggaggactggaacaaagtcctctacaatggtatggcctccacgtcgtcctgggcggccctttatttcattgccctcatgaccttcggcaactacgtgctcttcaatttgctggtcgccattctggtggagggcttccaggcggaggaaatcagcaaacgggaagatgcgagtggacagttaagctgtattcagctgcctgtcgactcccaggggggagatgccaacaagtccgaatcagagcccgatttcttctcacccagcctggatggtgatggggacaggaagaagtgcttggccttggtgtccctgggagagcacccggagctgcggaagagcctgctgccgcctctcatcatccacacggccgccacacccatgtcgctgcccaagagcaccagcacgggcctgggcgaggcgctgggccctgcgtcgcgccgcaccagcagcagcgggtcggcagagcctggggcggcccacgagatgaagtcaccgcccagcgcccgcagctctccgcacagcccctggagcgctgcaagcagctggaccagcaggcgctccagccggaacagcctcggccgtgcacccagcctgaagcggagaagcccaagtggagagcggcggtccctgttgtcgggagaaggccaggagagccaggatgaagaggagagctcagaagaggagcgggccagccctgcgggcagtgaccatcgccacagggggtccctggagcgggaggccaagagttcctttgacctgccagacacactgcaggtgccagggctgcatcgcactgccagtggccgagggtctgcttctgagcaccaggactgcaatggcaagtcggcttcagggcgcctggcccgggccctgcggcctgatgaccccccactggatggggatgacgccgatgacgagggcaacctgagcaaaggggaacgggtccgcgcgtggatccgagcccgactccctgcctgctgcctcgagcgagactcctggtcagcctacatcttccctcctcagtccaggttccgcctcctgtgtcaccggatcatcacccacaagatgttcgaccacgtggtccttgtcatcatcttccttaactgcatcaccatcgccatggagcgccccaaaattgacccccacagcgctgaacgcatcttcctgaccctctccaattacatcttcaccgcagtctttctggctgaaatgacagtgaaggtggtggcactgggctggtgcttcggggagcaggcgtacctgcggagcagttggaacgtgctggacgggctgttggtgctcatctccgtcatcgacattctggtgtccatggtctctgacagcggcaccaagatcctgggcatgctgagggtgctgcggctgctgcggaccctgcgcccgctcagggtgatcagccgggcgcaggggctgaagctggtggtggagacgctgatgtcctcactgaaacccatcggcaacattgtagtcatctgctgtgccttcttcatcattttcggcatcttgggggtgcagctcttcaaagggaagtttttcgtgtgccagggcgaggataccaggaacatcaccaataaatcggactgtgccgaggccagttaccggtgggtccggcacaagtacaactttgacaaccttggccaggccctgatgtccctgttcgttttggcctccaaggatggttgggtggacatcatgtacgatgggctggatgctgtgggcgtggaccagcagcccatcatgaaccacaacccctggatgctgctgtacttcatctcgttcctgctcattgtggccttctttgtcctgaacatgtttgtgggtgtggtggtggagaacttccacaagtgtcggcagcaccaggaggaagaggaggcccggcggcgggaggagaagcgcctacgaagactggagaaaaagagaaggaatctaatgctggacgatgtaattgcttccggcagctcagccagcgctgcgtcagaagcccagtgcaaaccttactactccgactactcccgcttccggctcctcgtccaccacttgtgcaccagccactacctggacctcttcatcacaggtgtcatcgggctgaacgtggtcaccatggccatggagcactaccagcagccccagattctggatgaggctctgaagatctgcaactacatcttcactgtcatctttgtcttggagtcagttttcaaacttgtggcctttggtttccgtcggttcttccaggacaggtggaaccagctggacctggccattgtgctgctgtccatcatgggcatcacgctggaggaaatcgaggtcaacgcctcgctgcccatcaaccccaccatcatccgcatcatgagggtgctgcgcattgcccgagtgctgaagctgctgaagatggctgtgggcatgcgggcgctgctggacacggtggggaacctgggacttctcttcatgttgttgtttttcatctttgcagctctgggcgtggagctctttggagacctggagtgtgacgagacacacccctgtgagggcctgggccgtcatgccacctttcggaactttggcatggccttcctaaccctcttccgagtctccacaggtgacaattggaatggcattatgaaggacaccctccgggactgtgaccaggagtccacctgctacaacacggtcatctcgcctatctactttgtgtccttcgtgctgacggcccagttcgtgctagtcaacgtggtgatcgccgtgctgatgaagcacctggaggagagcaacaaggaggccaaggaggaggccgagctagaggctgagctggagctggagatgaagaccctcagcccccagccccactcgccactgggcagccccttcctctggcctggggtcgagggccccgacagccccgacagccccaagcctggggctctgcacccagcggcccacgcgagatcagcctcccacttttccctggagcaccccacgatgcagccccaccccacggagctgccaggaccagacttactgactgtgcggaagtctggggtcagccgaacgcactctctgcccaatgacagctacatgtgtcggcatgggagcactgccgaggggcccctgggacacaggggctgggggctccccaaagctcagtcaggctccgtcttgtccgttcactcccagccagcagataccagctacatcctgcagcttcccaaagatgcacctcatctgctccagccccacagcgccccaacctggggcaccatccccaaactgcccccaccaggacgctcccctttggctcagaggccactcaggcgccaggcagcaataaggactgactccttggacgttcagggtctgggcagccgggaagacctgctggcagaggtgagtgggccctccccgcccctggcccgggcctactctttctggggccagtcaagtacccaggcacagcagcactcccgcagccacagcaagatctccaagcacatgaccccgccagccccttgcccaggcccagaacccaactggggcaagggccctccagagaccagaagcagcttagagttggacacggagctgagctggatttcaggagacctcctgccccctggcggccaggaggagcccccatccccacgggacctgaagaagtgctacagcgtggaggcccagagctgccagcgccggcctacgtcctggctggatgagcagaggagacactctatcgccgtcagctgcctggacagcggctcccaaccccacctgggcacagacccctctaaccttgggggccagcctcttggggggcctgggagccggcccaagaaaaaactcagcccgcctagtatcaccatagacccccccgagagccaaggtcctcggaccccgcccagccctggtatctgcctccggaggagggctccgtccagcgactccaaggatcccttggcctctggcccccctgacagcatggctgcctcgccctccccaaagaaagatgtgctgagtctctccggtttatcctctgacccagcagacctggacccctgagtcctgccccacttt

SEQ ID NO: 90286 - protein, 2259 aa, Artificial Sequence
  derived and/or modified sequence
MDEEEDGAGAEESGQPRSFMRLNDLSGAGGRPGPGSAEKDPGSADSEAEGLPYPALAPVVFFYLSQDSRPRSWCLRTVCNPWFERISMLVILLNCVTLGMFRPCEDIACDSQRCRILQAFDDFIFAFFAVEMVVKMVALGIFGKKCYLGDTWNRLDFFIVIAGMLEYSLDLQNVSFSAVRTVRVLRPLRAINRVPSMRILVTLLLDTLPMLGNVLLLCFFVFFIFGIVGVQLWAGLLRNRCFLPENFSLPLSVDLERYYQTENEDESPFICSQPRENGMRSCRSVPTLRGDGGGGPPCGLDYEAYNSSSNTTCVNWNQYYTNCSAGEHNPFKGAINFDNIGYAWIAIFQVITLEGWVDIMYFVMDAHSFYNFIYFILLIIVGSFFMINLCLVVIATQFSETKQRESQLMREQRVRFLSNASTLASFSEPGSCYEELLKYLVYILRKAARRLAQVSRAAGVRVGLLSSPAPLGGQETQPSSSCSRSHRRLSVHHLVHHHHHHHHHYHLGNGTLRAPRASPEIQDRDANGSRRLMLPPPSTPALSGAPPGGAESVHSFYHADCHLEPVRCQAPPPRSPSEASGRTVGSGKVYPTVHTSPPPETLKEKALVEVAASSGPPTLTSLNIPPGPYSSMHKLLETQSTGACQSSCKISSPCLKADSGACGPDSCPYCARAGAGEVELADREMPDSDSEAVYEFTQDAQHSDLRDPHSRRQRSLGPDAEPSSVLAFWRLICDTFRKIVDSKYFGRGIMIAILVNTLSMGIEYHEQPEELTNALEISNIVFTSLFALEMLLKLLVYGPFGYIKNPYNIFDGVIVVISVWEIVGQQGGGLSVLRTFRLMRVLKLVRFLPALQRQLVVLMKTMDNVATFCMLLMLFIFIFSILGMHLFGCKFASERDGDTLPDRKNFDSLLWAIVTVFQILTQEDWNKVLYNGMASTSSWAALYFIALMTFGNYVLFNLLVAILVEGFQAEEISKREDASGQLSCIQLPVDSQGGDANKSESEPDFFSPSLDGDGDRKKCLALVSLGEHPELRKSLLPPLIIHTAATPMSLPKSTSTGLGEALGPASRRTSSSGSAEPGAAHEMKSPPSARSSPHSPWSAASSWTSRRSSRNSLGRAPSLKRRSPSGERRSLLSGEGQESQDEEESSEEERASPAGSDHRHRGSLEREAKSSFDLPDTLQVPGLHRTASGRGSASEHQDCNGKSASGRLARALRPDDPPLDGDDADDEGNLSKGERVRAWIRARLPACCLERDSWSAYIFPPQSRFRLLCHRIITHKMFDHVVLVIIFLNCITIAMERPKIDPHSAERIFLTLSNYIFTAVFLAEMTVKVVALGWCFGEQAYLRSSWNVLDGLLVLISVIDILVSMVSDSGTKILGMLRVLRLLRTLRPLRVISRAQGLKLVVETLMSSLKPIGNIVVICCAFFIIFGILGVQLFKGKFFVCQGEDTRNITNKSDCAEASYRWVRHKYNFDNLGQALMSLFVLASKDGWVDIMYDGLDAVGVDQQPIMNHNPWMLLYFISFLLIVAFFVLNMFVGVVVENFHKCRQHQEEEEARRREEKRLRRLEKKRRKAQCKPYYSDYSRFRLLVHHLCTSHYLDLFITGVIGLNVVTMAMEHYQQPQILDEALKICNYIFTVIFVLESVFKLVAFGFRRFFQDRWNQLDLAIVLLSIMGITLEEIEVNASLPINPTIIRIMRVLRIARVLKLLKMAVGMRALLDTVGNLGLLFMLLFFIFAALGVELFGDLECDETHPCEGLGRHATFRNFGMAFLTLFRVSTGDNWNGIMKDTLRDCDQESTCYNTVISPIYFVSFVLTAQFVLVNVVIAVLMKHLEESNKEAKEEAELEAELELEMKTLSPQPHSPLGSPFLWPGVEGPDSPDSPKPGALHPAAHARSASHFSLEHPTMQPHPTELPGPDLLTVRKSGVSRTHSLPNDSYMCRHGSTAEGPLGHRGWGLPKAQSGSVLSVHSQPADTSYILQLPKDAPHLLQPHSAPTWGTIPKLPPPGRSPLAQRPLRRQAAIRTDSLDVQGLGSREDLLAEVSGPSPPLARAYSFWGQSSTQAQQHSRSHSKISKHMTPPAPCPGPEPNWGKGPPETRSSLELDTELSWISGDLLPPGGQEEPPSPRDLKKCYSVEAQSCQRRPTSWLDEQRRHSIAVSCLDSGSQPHLGTDPSNLGGQPLGGPGSRPKKKLSPPSITIDPPESQGPRTPPSPGICLRRRAPSSDSKDPLASGPPDSMAASPSPKKDVLSLSGLSSDPADLDP

SEQ ID NO: 90287 - DNA, 6780 bp, Artificial Sequence
  derived and/or modified sequence
atggacgaggaggaggacggcgccggcgccgaggagagcggccagcccagaagcttcatgagactgaacgacctgagcggcgccggcggcagacccggccccggcagcgccgagaaggaccccggcagcgccgacagcgaggccgagggcctgccctaccccgccctggcccccgtggtgttcttctacctgagccaggacagcagacccagaagctggtgcctgagaaccgtgtgcaacccctggttcgagagaatcagcatgctggtgatcctgctgaactgcgtgaccctgggcatgttcagaccctgcgaggacatcgcctgcgacagccagagatgcagaatcctgcaggccttcgacgacttcatcttcgccttcttcgccgtggagatggtggtgaagatggtggccctgggcatcttcggcaagaagtgctacctgggcgacacctggaacagactggacttcttcatcgtgatcgccggcatgctggagtacagcctggacctgcagaacgtgagcttcagcgccgtgagaaccgtgagagtgctgagacccctgagagccatcaacagagtgcccagcatgagaatcctggtgaccctgctgctggacaccctgcccatgctgggcaacgtgctgctgctgtgcttcttcgtgttcttcatcttcggcatcgtgggcgtgcagctgtgggccggcctgctgagaaacagatgcttcctgcccgagaacttcagcctgcccctgagcgtggacctggagagatactaccagaccgagaacgaggacgagagccccttcatctgcagccagcccagagagaacggcatgagaagctgcagaagcgtgcccaccctgagaggcgacggcggcggcggccccccctgcggcctggactacgaggcctacaacagcagcagcaacaccacctgcgtgaactggaaccagtactacaccaactgcagcgccggcgagcacaaccccttcaagggcgccatcaacttcgacaacatcggctacgcctggatcgccatcttccaggtgatcaccctggagggctgggtggacatcatgtacttcgtgatggacgcccacagcttctacaacttcatctacttcatcctgctgatcatcgtgggcagcttcttcatgatcaacctgtgcctggtggtgatcgccacccagttcagcgagaccaagcagagagagagccagctgatgagagagcagagagtgagattcctgagcaacgccagcaccctggccagcttcagcgagcccggcagctgctacgaggagctgctgaagtacctggtgtacatcctgagaaaggccgccagaagactggcccaggtgagcagagccgccggcgtgagagtgggcctgctgagcagccccgcccccctgggcggccaggagacccagcccagcagcagctgcagcagaagccacagaagactgagcgtgcaccacctggtgcaccaccaccaccaccaccaccaccactaccacctgggcaacggcaccctgagagcccccagagccagccccgagatccaggacagagacgccaacggcagcagaagactgatgctgcccccccccagcacccccgccctgagcggcgccccccccggcggcgccgagagcgtgcacagcttctaccacgccgactgccacctggagcccgtgagatgccaggcccccccccccagaagccccagcgaggccagcggcagaaccgtgggcagcggcaaggtgtaccccaccgtgcacaccagccccccccccgagaccctgaaggagaaggccctggtggaggtggccgccagcagcggcccccccaccctgaccagcctgaacatcccccccggcccctacagcagcatgcacaagctgctggagacccagagcaccggcgcctgccagagcagctgcaagatcagcagcccctgcctgaaggccgacagcggcgcctgcggccccgacagctgcccctactgcgccagagccggcgccggcgaggtggagctggccgacagagagatgcccgacagcgacagcgaggccgtgtacgagttcacccaggacgcccagcacagcgacctgagagacccccacagcagaagacagagaagcctgggccccgacgccgagcccagcagcgtgctggccttctggagactgatctgcgacaccttcagaaagatcgtggacagcaagtacttcggcagaggcatcatgatcgccatcctggtgaacaccctgagcatgggcatcgagtaccacgagcagcccgaggagctgaccaacgccctggagatcagcaacatcgtgttcaccagcctgttcgccctggagatgctgctgaagctgctggtgtacggccccttcggctacatcaagaacccctacaacatcttcgacggcgtgatcgtggtgatcagcgtgtgggagatcgtgggccagcagggcggcggcctgagcgtgctgagaaccttcagactgatgagagtgctgaagctggtgagattcctgcccgccctgcagagacagctggtggtgctgatgaagaccatggacaacgtggccaccttctgcatgctgctgatgctgttcatcttcatcttcagcatcctgggcatgcacctgttcggctgcaagttcgccagcgagagagacggcgacaccctgcccgacagaaagaacttcgacagcctgctgtgggccatcgtgaccgtgttccagatcctgacccaggaggactggaacaaggtgctgtacaacggcatggccagcaccagcagctgggccgccctgtacttcatcgccctgatgaccttcggcaactacgtgctgttcaacctgctggtggccatcctggtggagggcttccaggccgaggagatcagcaagagagaggacgccagcggccagctgagctgcatccagctgcccgtggacagccagggcggcgacgccaacaagagcgagagcgagcccgacttcttcagccccagcctggacggcgacggcgacagaaagaagtgcctggccctggtgagcctgggcgagcaccccgagctgagaaagagcctgctgccccccctgatcatccacaccgccgccacccccatgagcctgcccaagagcaccagcaccggcctgggcgaggccctgggccccgccagcagaagaaccagcagcagcggcagcgccgagcccggcgccgcccacgagatgaagagcccccccagcgccagaagcagcccccacagcccctggagcgccgccagcagctggaccagcagaagaagcagcagaaacagcctgggcagagcccccagcctgaagagaagaagccccagcggcgagagaagaagcctgctgagcggcgagggccaggagagccaggacgaggaggagagcagcgaggaggagagagccagccccgccggcagcgaccacagacacagaggcagcctggagagagaggccaagagcagcttcgacctgcccgacaccctgcaggtgcccggcctgcacagaaccgccagcggcagaggcagcgccagcgagcaccaggactgcaacggcaagagcgccagcggcagactggccagagccctgagacccgacgacccccccctggacggcgacgacgccgacgacgagggcaacctgagcaagggcgagagagtgagagcctggatcagagccagactgcccgcctgctgcctggagagagacagctggagcgcctacatcttccccccccagagcagattcagactgctgtgccacagaatcatcacccacaagatgttcgaccacgtggtgctggtgatcatcttcctgaactgcatcaccatcgccatggagagacccaagatcgacccccacagcgccgagagaatcttcctgaccctgagcaactacatcttcaccgccgtgttcctggccgagatgaccgtgaaggtggtggccctgggctggtgcttcggcgagcaggcctacctgagaagcagctggaacgtgctggacggcctgctggtgctgatcagcgtgatcgacatcctggtgagcatggtgagcgacagcggcaccaagatcctgggcatgctgagagtgctgagactgctgagaaccctgagacccctgagagtgatcagcagagcccagggcctgaagctggtggtggagaccctgatgagcagcctgaagcccatcggcaacatcgtggtgatctgctgcgccttcttcatcatcttcggcatcctgggcgtgcagctgttcaagggcaagttcttcgtgtgccagggcgaggacaccagaaacatcaccaacaagagcgactgcgccgaggccagctacagatgggtgagacacaagtacaacttcgacaacctgggccaggccctgatgagcctgttcgtgctggccagcaaggacggctgggtggacatcatgtacgacggcctggacgccgtgggcgtggaccagcagcccatcatgaaccacaacccctggatgctgctgtacttcatcagcttcctgctgatcgtggccttcttcgtgctgaacatgttcgtgggcgtggtggtggagaacttccacaagtgcagacagcaccaggaggaggaggaggccagaagaagagaggagaagagactgagaagactggagaagaagagaagaaaggcccagtgcaagccctactacagcgactacagcagattcagactgctggtgcaccacctgtgcaccagccactacctggacctgttcatcaccggcgtgatcggcctgaacgtggtgaccatggccatggagcactaccagcagccccagatcctggacgaggccctgaagatctgcaactacatcttcaccgtgatcttcgtgctggagagcgtgttcaagctggtggccttcggcttcagaagattcttccaggacagatggaaccagctggacctggccatcgtgctgctgagcatcatgggcatcaccctggaggagatcgaggtgaacgccagcctgcccatcaaccccaccatcatcagaatcatgagagtgctgagaatcgccagagtgctgaagctgctgaagatggccgtgggcatgagagccctgctggacaccgtgggcaacctgggcctgctgttcatgctgctgttcttcatcttcgccgccctgggcgtggagctgttcggcgacctggagtgcgacgagacccacccctgcgagggcctgggcagacacgccaccttcagaaacttcggcatggccttcctgaccctgttcagagtgagcaccggcgacaactggaacggcatcatgaaggacaccctgagagactgcgaccaggagagcacctgctacaacaccgtgatcagccccatctacttcgtgagcttcgtgctgaccgcccagttcgtgctggtgaacgtggtgatcgccgtgctgatgaagcacctggaggagagcaacaaggaggccaaggaggaggccgagctggaggccgagctggagctggagatgaagaccctgagcccccagccccacagccccctgggcagccccttcctgtggcccggcgtggagggccccgacagccccgacagccccaagcccggcgccctgcaccccgccgcccacgccagaagcgccagccacttcagcctggagcaccccaccatgcagccccaccccaccgagctgcccggccccgacctgctgaccgtgagaaagagcggcgtgagcagaacccacagcctgcccaacgacagctacatgtgcagacacggcagcaccgccgagggccccctgggccacagaggctggggcctgcccaaggcccagagcggcagcgtgctgagcgtgcacagccagcccgccgacaccagctacatcctgcagctgcccaaggacgccccccacctgctgcagccccacagcgcccccacctggggcaccatccccaagctgcccccccccggcagaagccccctggcccagagacccctgagaagacaggccgccatcagaaccgacagcctggacgtgcagggcctgggcagcagagaggacctgctggccgaggtgagcggccccagcccccccctggccagagcctacagcttctggggccagagcagcacccaggcccagcagcacagcagaagccacagcaagatcagcaagcacatgaccccccccgccccctgccccggccccgagcccaactggggcaagggcccccccgagaccagaagcagcctggagctggacaccgagctgagctggatcagcggcgacctgctgccccccggcggccaggaggagccccccagccccagagacctgaagaagtgctacagcgtggaggcccagagctgccagagaagacccaccagctggctggacgagcagagaagacacagcatcgccgtgagctgcctggacagcggcagccagccccacctgggcaccgaccccagcaacctgggcggccagcccctgggcggccccggcagcagacccaagaagaagctgagcccccccagcatcaccatcgacccccccgagagccagggccccagaaccccccccagccccggcatctgcctgagaagaagagcccccagcagcgacagcaaggaccccctggccagcggcccccccgacagcatggccgccagccccagccccaagaaggacgtgctgagcctgagcggcctgagcagcgaccccgccgacctggacccctag

SEQ ID NO: 90288 - DNA, 6780 bp, Artificial Sequence
  derived and/or modified sequence
atggacgaagaagaggatggagcaggagccgaagaatccggacagccacgatcatttatgcggctgaacgacctatccggcgcgggcggtaggccaggccctggatcagctgaaaaagatccaggttccgccgactccgaggctgaggggttgccctacccagccctggccccagtagtctttttttacctcagccaggattctaggcctaggtcatggtgtctccgcacagtctgcaacccttggtttgagaggatctccatgctggtcatcctgttgaactgcgtcaccctcggaatgtttcgtccatgcgaagatatcgcctgcgattcacagcggtgccgcatacttcaggcctttgatgattttatttttgccttttttgcggtggaaatggtcgttaaaatggttgcccttggaatcttcggcaagaagtgctaccttggagatacctggaatcgactcgactttttcattgtcattgccgggatgttggaatactcgttggacctgcagaacgtgtcattctcagccgtgcggaccgttcgagttctgcgacccctgcgtgccatcaacagggtgcccagcatgcgcattctggtcaccctcctgctcgacaccctgcccatgctgggaaatgtattactcctctgtttcttcgtttttttcatctttggaattgttggcgtccaactgtgggcagggcttctcaggaacaggtgcttcctccctgagaatttctctcttcccctcagcgtggatctggagcggtactatcagacggagaacgaagatgagagcccattcatctgctctcagccaagagagaacggtatgcggagctgcaggtcagttcctacgctgagaggagacggcggtggtggacctccatgcgggctagactacgaggcttataactccagttctaatactacctgcgtgaattggaaccagtactatacaaattgcagtgcaggagagcataatccctttaagggagctattaattttgataacataggctatgcatggattgctatttttcaggtgataaccctggaggggtgggtcgacataatgtacttcgtcatggacgctcactcgttctacaacttcatttactttatcctgttgattatagtgggtagttttttcatgatcaatctgtgtctggtcgtcattgccacccagttctctgagaccaaacagcgcgagtctcagctaatgcgggagcagcgcgtgcgctttctgtcgaatgcatccacactcgcaagtttctcggagcctgggagctgttacgaggagctgcttaaatacctcgtgtacatactcaggaaagccgctcgcagactggcccaggtatcccgggctgccggtgttcgcgttggactgctgtcatcacccgcgcccctggggggtcaggagacccagccaagttcgtcttgttctcgctcccacaggcgtctctctgttcaccacttggtccaccaccaccaccatcaccaccaccactatcacctcggaaacggcaccctgcgcgcacctcgggcatcccctgagatccaggacagggatgccaacggaagtagacggctcatgttacctccaccgagtaccccagccctttccggtgctccccccggcggagcagagtccgtgcattccttttatcacgccgactgtcacctggaacctgtgcgctgccaagcccccccgccaaggtcaccttcagaagcctctggccggaccgtaggctccgggaaggtttaccccacagtgcatacaagtcccccccctgaaacactgaaagagaaagcactggtagaagtggcggcatcctctggcccccccacactcacaagcctgaacatcccgcctggtccttattccagcatgcataagttgctcgagacgcagtccaccggcgcctgccagagtagctgcaagatttcgtcaccatgtttaaaggcggacagtggggcatgcggacctgattcctgtccctactgcgcaagggctggagccggtgaggtggaactcgcggaccgggaaatgccagactccgactcagaagccgtttatgaatttacccaagacgcccagcactccgatctgcgcgatccccattctcggcgacagcgatcacttgggcctgatgcagaaccttcaagtgtgctcgcattttggcgccttatttgcgacacattcagaaaaatcgtggactccaagtacttcggaagagggatcatgatcgctatcctggtgaataccctttccatgggtatcgagtaccacgaacagcccgaagaattgacaaatgcgctggagataagcaatattgtgttcacctcgctctttgccctggagatgctgctgaaactcctcgtctacggcccattcggatacattaaaaacccatataacatattcgacggtgtgattgtggtcattagcgtatgggaaatagttggtcaacaagggggtgggctcagtgtactccgaacatttcgcttgatgcgcgtgcttaagttggtacgtttcttgcccgccctccagagacagctcgttgttctcatgaagacaatggacaacgtggctaccttttgcatgctgctcatgctgttcattttcatttttagcatcctggggatgcatctcttcgggtgcaaattcgcttctgagagagacggtgacactctgccagatcgcaaaaactttgatagcctcctgtgggcaatcgtgacagtgttccaaattttgacacaggaggactggaataaggtactctacaacggcatggctagcacttcaagctgggccgccctctacttcattgccctcatgacttttggaaactatgttctttttaacctgctggtggccatcctggtagaaggtttccaggctgaggaaattagcaagcgtgaggatgcgagcggccaactgagctgtatccaactgccagtagactcacagggcggggacgctaataagagcgaatccgaaccagattttttttcacctagcctggacggtgacggagaccggaagaaatgcctggccctagtatccctgggcgagcaccccgagctccggaagtctttattacctcccctgatcattcataccgctgctacgcctatgagtttacctaaatcgacatctactggcctcggagaggccctcggtcccgcgagccgcagaacttcgagcagcgggtctgcggagcccggagccgctcacgagatgaagtctccacccagtgcccggagtagtccacacagtccttggtcagcagccagctcttggaccagcagaaggtcctctcggaacagtctgggtcgcgctccttcactgaaaagacgctctccttctggtgagagacgctccctgctcagcggcgaaggccaggagagtcaggatgaggaagagagctctgaagaggaacgtgcttcaccagcgggttccgatcataggcaccggggctcactggagcgtgaagcgaaatcctccttcgacctcccagacaccctgcaggtgcccggattgcacagaaccgcttccggacgtgggagcgccagcgaacaccaagactgtaacggcaagtctgcatctgggagactggcccgggccctgcgccctgatgacccaccactggacggcgacgacgcagacgacgagggaaacctgtcaaaaggagagagagtaagagcgtggataagagccaggcttccagcctgctgtctggagcgggactcatggtctgcatacatatttcctccccaatcacgtttccggttgctgtgccatagaattattacccacaagatgttcgaccacgtggtcctggtgatcatcttcctaaactgcataaccatcgccatggaacgccctaagatcgacccccactctgcagaacggatatttctgacattgagcaattacattttcaccgctgtttttcttgccgaaatgaccgtgaaggtcgtggctctcggctggtgttttggcgagcaggcctacctgcggtcgtcttggaatgtgcttgacgggctgctggtcttgatcagtgtgattgatatcctcgtgtccatggtgagtgattctggcactaagattctcggtatgcttcgggtgttacgtctcttgcggactcttcgacctctcagagttatttcacgggcccaaggtctgaagctggtggtcgaaactctcatgtcgtccctgaaaccaatcggtaatattgtcgtgatctgctgcgcctttttcatcatcttcggaattctaggcgtccagttgttcaagggcaagttctttgtgtgccagggggaggacacgaggaacattacgaacaagtcagactgtgctgaagcgtcttaccgctgggtgaggcacaaatacaacttcgacaatttagggcaagcgcttatgtcactgtttgtgttggccagtaaagatggatgggttgatatcatgtatgatggattggatgccgtcggtgtcgaccaacaacccattatgaaccacaacccatggatgttgctgtatttcattagttttctgctgatagttgcgtttttcgtgttgaatatgttcgtaggggtggtagtggaaaattttcataaatgtagacagcaccaggaggaagaggaggctagacgaagagaggagaagcggctccggagactcgaaaagaaaagacgtaaggcccagtgtaagccctactacagcgactactcacgctttcggctactggtgcaccacctctgcacctcccactacttagatctgttcataacaggagtcattggcctgaatgtcgttaccatggccatggaacattatcagcagccccagattctcgatgaggcactcaaaatctgtaactacatttttacggtgatttttgttttagaatcagtgtttaagcttgtggctttcgggttccggagatttttccaggaccggtggaaccaactcgatctggccatagtattgctcagcatcatgggaataacgctggaggaaatcgaagtgaatgctagtcttcccatcaatcctacaatcataagaattatgagagtgctaaggattgcacgggtgttgaagctcctgaagatggctgttggaatgcgcgcattgctcgacactgtgggcaaccttggccttctctttatgctgttattttttatattcgcagctctcggtgtggaattgtttggcgacctggaatgcgacgaaacacatccttgtgagggactcggaagacacgccactttccgcaactttggtatggcttttctaaccctgttcagggtgtccaccggcgataactggaacggtatcatgaaggatacattgcgcgattgtgatcaggagtctacatgctataacaccgtcataagtcctatttactttgttagctttgttctcaccgcccagtttgtactcgtgaacgtggtgatagcggttctaatgaagcacctggaggaatccaataaagaagccaaggaggaagcggagctggaggccgagttggaactggaaatgaagactctgtccccccagccacactcccccctcggtagcccgttcctgtggcctggcgtagaagggccagactcacccgacagccccaagcccggcgccctccaccctgccgcgcacgctaggtctgcttctcacttttctctggaacaccctaccatgcagccacatcccacagaactgcctggaccggaccttttaacagtccgtaaaagtggcgtaagccgcactcactctctccctaatgattcttatatgtgtaggcacggctcaaccgcggaggggccactcggccatcgagggtggggactgcctaaggcacagagcgggagcgtgctttccgtgcacagccagcctgcagataccagctacatcctgcagcttcccaaagacgccccacacctgctccagccccatagcgcgccgacatggggcaccatccccaagttacccccacccggtagatctccacttgcccagcgtcccctgaggcggcaggctgctattcggacggactccctggacgtccaaggactgggcagccgtgaagatctgctggctgaagtttccggccccagcccgcccctcgcacgcgcctactctttctgggggcagagctccacacaggcgcagcaacattccaggagccattctaaaatcagtaaacacatgacccctccagcgccatgccctgggccagagcccaattgggggaagggcccccccgagacgaggtcctctctcgaattggacacagagctgagctggatctccggggacctccttcctcccgggggccaagaagaaccacctagtccccgcgacctgaaaaaatgctattcagtggaagcccagagttgtcagaggaggccaacaagctggttagatgagcagagacgccatagcatcgcagtttcatgcctggatagtggatctcagccccatctaggcaccgacccctccaatctcgggggccaacccctgggaggtccgggtagccgccctaagaagaaactatctcccccgtccataaccattgaccctcccgagagtcaggggcctaggacaccgccttctcccggcatttgcttacggagacgggctccatcttcagactctaaagatcccctggcctccggcccccctgacagcatggcagcttcaccttcgcccaagaaagatgtgctctcactgtctgggttaagcagcgacccggccgacctggatccatag

SEQ ID NO: 90289 - DNA, 6780 bp, Artificial Sequence
  derived and/or modified sequence
atggatgaggaggaggatggagctggagctgaggagagcggccagcccaggagcttcatgaggctgaatgacctgagcggggccggcggccggcccggccctggcagcgctgagaaggaccccggcagcgctgacagcgaggccgagggcctgccctacccagccctggcccctgtggtgttcttctacctgagccaggacagccggcccaggtcctggtgcctgaggacagtgtgcaacccctggtttgagcgcatctccatgctggtgatcctgctgaactgtgtgaccctgggcatgttccggccctgtgaagatattgcctgtgacagccagcgctgccgcatcctgcaggcctttgatgacttcatctttgccttctttgctgtggagatggtggtgaagatggtggccctgggcatctttgggaagaagtgctacctgggggacacctggaaccggctggacttcttcatcgtgattgctggcatgctggagtacagcctggacctgcagaatgtgtccttctctgctgtgaggacagtgcgggtgctgcggcccctgcgggccatcaacagagtgcccagcatgaggatcctggtgaccctgctgctggacaccctgcccatgctgggcaatgtgctgctgctgtgcttctttgtgttcttcatctttggaattgtgggcgtgcagctgtgggccggcctgctgaggaaccgctgcttcctgcctgagaacttcagcctgcccctgtctgtggacctggagcgctactaccagacagaaaatgaagatgagagccccttcatctgcagccagccccgggagaatggcatgaggagctgccgctctgtgcccaccctgcggggagatggcggcggcggccccccctgtggcctggactatgaggcctacaacagcagcagcaacaccacctgtgtgaactggaaccagtactacaccaactgcagcgctggggagcacaaccccttcaagggggccatcaactttgacaacatcggctacgcctggatcgccatcttccaggtgatcaccctggagggctgggtggacatcatgtactttgtgatggatgcccacagcttctacaacttcatctacttcatcctgctgatcatcgtgggcagcttcttcatgatcaacctgtgcctggtggtgattgccacccagttcagcgagaccaagcagcgggagagccagctgatgagggagcagagggtgcgcttcctgagcaatgccagcaccctggccagcttcagcgagcccggcagctgctatgaggagctgctgaagtacctggtgtacatcctgaggaaggccgcccggcggctggcccaggtgtccagagctgctggggtgcgggtgggcctgctgagcagccctgcccccctgggcggccaggagacccagcccagcagcagctgcagccgcagccaccggcggctgtctgtgcaccacctggtgcaccaccaccaccaccaccaccaccactaccacctgggcaatggcaccctgcgggccccccgggccagccctgagatccaggacagagatgccaacggcagccggcggctgatgctgcccccacccagcaccccagccctgagcggggcccctcctggaggagctgagagcgtgcacagcttctaccacgccgactgccacctggagcctgtgcgctgccaggcccccccacccaggagccccagcgaggccagcggccgcacagtgggcagcggcaaggtgtaccccaccgtgcacaccagccccccacctgagaccctgaaggagaaggccctggtggaggtggccgccagcagcggcccccccaccctgaccagcctgaacatccccccaggcccctacagctccatgcacaagctgctggagacccagagcactggagcctgccagagcagctgcaagatcagcagcccctgcctgaaggctgacagcggggcctgtggccctgacagctgcccctactgtgcccgggccggggccggggaggtggagctggccgaccgggagatgccagacagcgacagcgaggccgtgtatgagttcacccaggatgcccagcacagcgacctgcgggacccccacagccggcggcagaggagcctgggcccagatgctgagcccagctctgtgctggccttctggaggctcatctgtgacaccttcaggaagatcgtggacagcaagtacttcggccggggcatcatgattgccatcctggtgaacaccctgtccatgggcatcgagtaccacgagcagcctgaggagctgaccaatgccctggagatcagcaacatcgtgttcaccagcctgtttgccctggagatgctgctgaagctgctggtgtatggccccttcggctacatcaagaacccctacaacatctttgatggagtcatcgtggtgatctctgtgtgggagatcgtgggccagcagggcggcggcctgtctgtgctgcggaccttccggctgatgagggtgctgaagctggtgcgcttcctgcctgccctgcagaggcagctggtggtgctgatgaagaccatggacaacgtggccaccttctgcatgctgctgatgctgttcatcttcatcttcagcatcctgggcatgcacctgtttggctgcaagtttgccagcgagagagatggagacaccctgcctgacaggaagaactttgacagcctgctgtgggccatcgtgacagtgttccagatcctgacccaggaggactggaacaaggtgctgtacaacggcatggccagcaccagctcctgggccgccctgtacttcatcgccctgatgaccttcggcaactacgtgctcttcaacctgctggtggccatcctggtggagggcttccaggccgaggagatcagcaagcgggaggatgccagcggccagctgagctgcatccagctgcctgtggacagccagggcggagatgccaacaagtctgagagcgagccagacttcttcagccccagcctggatggagatggagacaggaagaagtgcctggccctggtgtccctgggggagcaccctgagctgaggaagagcctgctgcccccactcatcatccacacagctgccacccccatgagcctgcccaagagcaccagcacaggcctgggggaggccctgggccctgccagcaggaggaccagcagcagcggcagcgctgagcctggagctgcccacgagatgaagagcccccccagcgcccggagcagcccccacagcccctggagcgctgccagctcctggaccagccgccgcagcagcaggaacagcctgggccgggcccccagcctgaagagaagaagccccagcggggagcggcgcagcctgctgtctggagagggccaggagagccaggatgaggaggagagcagcgaggaggagcgggccagccctgctggcagtgaccaccgccaccggggcagcctggagcgggaggccaagagcagctttgacctgcctgacaccctgcaggtgcccggcctgcacaggacagccagcggccggggcagcgccagcgagcaccaggactgcaatggcaagagcgccagcggccgcctggcccgggccctgcggccagatgatcctcccctggatggagatgatgctgatgatgagggcaacctgagcaagggggagcgggtgcgggcctggatccgggcccggctgcctgcctgctgcctggagcgggacagctggagcgcctacatcttccccccccagagccgcttccggctgctgtgccaccgcatcatcacccacaagatgtttgaccacgtggtgctggtgatcatcttcctgaactgcatcaccatcgccatggagcggcccaagattgacccccacagcgctgagcgcatcttcctgaccctgagcaactacatcttcaccgctgtgttcctggccgagatgacagtgaaggtggtggccctgggctggtgcttcggggagcaggcctacctgcggagctcctggaatgtgctggatggcctgctggtgctgatctctgtgattgacatcctggtgtccatggtgtctgattctggcaccaagatcctgggcatgctgcgggtgctgcggctgctgcggaccctgcggcccctgcgggtcatcagccgggcccagggcctgaagctggtggtggagaccctgatgagcagcctgaagcccatcggcaacatcgtggtgatctgctgtgccttcttcatcatcttcggcatcctgggcgtgcagctgttcaagggcaagttctttgtgtgccagggcgaggacaccaggaacatcaccaacaagagtgactgtgccgaggccagctaccgctgggtgcgccacaagtacaactttgacaacctgggccaggccctgatgagcctgtttgtgctggccagcaaggatggctgggtggacatcatgtatgatggcctggatgctgtgggcgtggaccagcagcccatcatgaaccacaacccctggatgctgctgtacttcatctccttcctgctgattgtggccttctttgtgctgaacatgtttgtgggcgtggtggtggagaacttccacaagtgccggcagcaccaggaggaggaggaggcccggcggcgggaggagaagaggctgcggcggctggagaagaagaggaggaaggcccagtgcaagccctactacagcgactacagccgcttccggctgctggtgcaccacctgtgcaccagccactacctggacctcttcatcaccggggtgattggcctgaatgtggtgaccatggccatggagcactaccagcagccccagatcctggatgaggccctgaagatctgcaactacatcttcaccgtcatctttgtgctggagagcgtcttcaagctggtggccttcggcttccgccgcttcttccaggaccgctggaaccagctggacctggccatcgtgctgctgagcatcatgggcatcaccctggaggagattgaggtgaatgccagcctgcccatcaaccccaccatcatccgcatcatgagggtgctgcgcatcgcccgggtgctgaagctgctgaagatggctgtgggcatgagggccctgctggacacagtgggcaacctgggcctgctcttcatgctgctcttcttcatctttgctgccctgggcgtggagctgtttggagacctggagtgtgatgagacccacccctgtgagggcctgggcagacatgccaccttcaggaactttggcatggccttcctgaccctcttccgggtgtccactggagacaactggaatggcatcatgaaggacaccctgcgggactgtgaccaggagagcacctgctacaacacagtcatcagccccatctactttgtgtcctttgtgctgacagcccagtttgtgctggtgaatgtggtgattgctgtgctgatgaagcacctggaggagagcaacaaggaggccaaggaggaggccgagctggaggccgagctggagctggagatgaagaccctgagcccccagccccacagccccctgggcagccccttcctgtggccaggagtggagggccctgacagcccagacagccccaagccaggggccctgcaccctgctgcccacgcccggagcgccagccacttcagcctggagcaccccaccatgcagccccaccccacagagctgcccggccctgacctgctgactgtgaggaagtctggagtgtccaggacccacagcctgcccaatgacagctacatgtgccgccacggcagcacagctgagggccccctgggccaccggggctggggcctgcccaaggcccagagcggctctgtgctgtctgtgcacagccagcctgctgacaccagctacatcctgcagctgcccaaggatgccccccacctgctgcagccccacagcgcccccacctggggcaccatccccaagctgcccccacctggccgcagccccctggcccagaggcccctgcggcggcaggccgccatcagaacagacagcctggatgtgcagggcctgggcagccgggaggacctgctggccgaggtgtctggccccagcccccccctggcccgggcctacagcttctggggccagagcagcacccaggcccagcagcacagccgcagccacagcaagatcagcaagcacatgaccccaccagccccctgccccggccctgagcccaactggggcaagggccccccagagaccaggagcagcctggagctggacacagagctgtcctggatcagcggggacctgctgcccccaggcggccaggaggagccccccagcccccgggacctgaagaagtgctacagcgtggaggcccagagctgccagaggcggcccacctcctggctggatgagcagaggaggcacagcattgctgtgtcctgcctggacagcggcagccagccccacctgggcacagaccccagcaacctgggcggccagcccctgggcggccctggcagccggcccaagaagaagctgagcccccccagcatcaccattgatcctcctgagagccagggccccaggaccccacccagccctggcatctgcctgcggcggcgggcccccagcagtgacagcaaggaccccctggccagcggccccccagacagcatggccgccagccccagccccaagaaggatgtgctgagcctgagcggcctgagcagtgaccctgctgacctggacccctag

SEQ ID NO: 90290 - DNA, 6780 bp, Artificial Sequence
  derived and/or modified sequence
atggacgaggaggaggacggcgccggcgccgaggagagcggccagccccgatcattcatgcggctcaacgacctgagcggggccggtggccgacccggccccgggtccgccgaaaaggaccctggctcagccgatagtgaagctgagggccttccctacccagccctcgctccagtggtatttttctatctgagtcaagacagtaggcctaggtcttggtgcttgaggacagtgtgcaatccgtggttcgagaggatctccatgctggtgatcctgcttaactgcgtcactctcgggatgttcagaccctgtgaggacatcgcttgtgatagtcagagatgtcgaatcctgcaagcattcgatgactttatcttcgcattttttgccgtggagatggtggttaagatggtcgccctgggcatatttggaaagaagtgttatctgggtgatacctggaatcgtttggatttcttcatcgttatagcagggatgctggaatatagcctggatctgcagaacgtcagcttctctgcagtgcggactgtgcgggtgctgaggcccttaagagccattaacagggttccctcaatgcggatactggtaaccctgctgctcgatactctgccaatgctgggaaatgttcttctgctgtgctttttcgtctttttcatctttgggatcgtgggtgtccaactctgggctgggctcctgaggaacagatgtttccttcctgagaatttcagtctgccattgtcagtggacctggagcgctactaccagacagaaaatgaggacgagagcccattcatttgctcacagcctcgagagaacggcatgagaagctgccgcagcgtgcctaccctgcgcggcgatggcggagggggtcctccctgtggcctggattacgaagcctataactctagctccaatacaacatgtgtaaactggaatcagtattacactaactgcagcgccggagagcacaatccattcaagggtgccatcaactttgataacattggatacgcctggatcgcaatctttcaggtcataacccttgaggggtgggtggacataatgtattttgtcatggatgcccactcgttctataactttatttattttatcctcctaatcatcgtcggatctttctttatgattaacctgtgcctggtcgtcatagccacccagttttcagagacaaagcagcgcgaatctcaactaatgcgagagcagcgtgtgagatttctgtctaatgcttccaccttagcctcattctctgagcccggatcttgctacgaagagctgctgaaatatctggtgtatattttaagaaaggctgcacgtaggctcgcacaggtaagcagagcggccggagtgagagtgggactgctttcaagtccagctccccttggcggccaagagacacagcccagctcctcctgcagtcgtagtcatagaaggttatccgtgcaccacttggtccatcatcaccaccaccaccaccaccactaccacctggggaacggcacccttagagctccaagagcttctccggagatccaggatcgtgatgctaatggctcgcgccggctcatgctccctcctcccagcactcctgcattgtccggcgccccacctgggggcgctgagagcgtccactccttctatcacgcagattgtcacctggagccggtgaggtgtcaggccccccctccccgctccccctcagaggctagcggccggaccgtgggctccggtaaagtttacccaacggttcatacatcacccccacccgagactctaaaagagaaagctctggtcgaggtcgctgcctcctctggtcctcctacccttacctctctcaacattcctccgggaccttactcctccatgcacaagctgctcgagactcaatctactggcgcctgccaaagctcctgcaagatctcctcgccctgcctgaaggctgattccggcgcatgtggccctgactcgtgcccttactgcgcgagggcgggtgctggggaggtggaactcgccgatcgcgagatgccagacagcgacagcgaggcagtatacgaattcacacaggacgcccagcacagcgatctgcgcgacccacatagtaggagacagcgcagcttgggacccgacgctgagccgtcatctgtgctggcattttggcgtctgatctgcgatacgtttcgcaagatagttgacagcaagtattttgggagaggcattatgatcgcaatcttggtcaatactctcagcatgggaatcgagtaccatgagcaaccagaggagttaactaatgcgctggagatcagcaatatcgtattcaccagtctattcgccctcgagatgctgttgaagctgcttgtgtacggaccctttggatacattaagaacccctacaacatttttgatggggtcatcgtagtcatctctgtgtgggaaatagtggggcagcaggggggaggtctgtcggtattgcgcacttttcggctgatgcgggtgctcaaactagttaggttccttcccgctttacagcgtcagcttgtggtgctcatgaaaaccatggacaacgtggccaccttttgtatgcttctcatgctgttcatattcatcttcagtatcctgggaatgcacctgtttggatgtaagtttgcctctgagagagacggagacactctcccagacagaaaaaactttgattccctgctgtgggcaatcgtgaccgttttccagatcctcacgcaggaggactggaacaaggtattgtacaatggcatggctagcacttctagttgggccgccctgtactttatcgcactcatgacatttgggaattatgtgttgtttaacttactcgtggctatcttggtcgagggctttcaagctgaagaaatttcgaagagagaagatgcctcaggccagcttagctgcatccagcttcctgtcgacagccaggggggtgatgccaacaagtcagagagcgagcctgatttttttagcccttccctggacggagatggcgaccggaaaaagtgtctggcccttgtgtccctgggggagcaccccgagctgcgaaagtctctcctaccaccattgatcatacatacagcggcaacccccatgagtttgcctaaaagcacctcgaccggactcggcgaagcacttggtcccgcctcccgcaggaccagttctagtggcagcgctgagccaggagcagctcacgaaatgaagtcaccccctagcgcgcggtccagccctcacagcccatggtccgctgcctcaagctggacatcgcggcgctcctcaagaaatagtcttggtagggcacccagcttgaagcggcgcagccccagcggcgaaaggaggtctctgctgtctggcgaagggcaggaatctcaggacgaggaggaatccagcgaagaggagcgcgcttctccagctggatccgaccataggcatagagggtccctggaacgagaagccaaatcctctttcgatttacctgacactctgcaagtgccgggcctgcatcgaacagctagcggcaggggatcagcctccgagcatcaggattgtaacggaaagtctgcaagtggcagactagcccgagccttgcgccctgatgatccacccctggacggcgatgacgctgatgacgaaggcaatctgagcaaaggagaaagggtgcgggcttggatcagggcgcgtttacccgcctgttgtctggaacgagactcttggtcagcctatatttttcctcctcagtccagattccggctgttgtgtcatcggatcataacacataagatgttcgaccatgtggtgctcgtgatcatcttcttgaactgtatcaccatcgcgatggaacggcctaaaatagacccgcacagcgcagagcggatatttctgacactctccaattacatattcacagctgtgttccttgccgagatgacagtaaaggtcgttgctctgggttggtgttttggggagcaggcttatttgagaagttcctggaatgtgctggacggacttctggtccttatcagtgtgattgatatcctggtgagtatggtgtcagattctgggactaaaatacttggcatgctgcgcgtactacgcctgctgaggaccctgcgacctttgcgtgttatcagcagggctcaggggctgaaacttgtcgtcgagaccctaatgagttccctcaaaccaatcggcaacatagtggttatttgttgtgccttttttatcattttcggtatactgggtgttcagctgttcaaaggaaaatttttcgtatgccagggagaggatacacgaaacattacaaataagtctgattgcgcagaagctagttataggtgggtgcgccacaagtataatttcgataatttgggccaggccctgatgtctctgttcgtactcgcatcaaaagacggctgggtggacatcatgtatgacggactggacgctgtgggtgtcgatcagcagccgataatgaatcataatccctggatgcttctatatttcatctctttcctcttgatagtggcatttttcgttctgaacatgttcgtaggggtcgtggtcgagaattttcacaaatgccggcagcatcaggaggaagaagaagctagaagaagagaggagaagaggctgagacgcctggaaaaaaaacggcgcaaggcgcagtgcaaaccatattactcagactactctaggtttcgccttctagtgcaccacctgtgcactagtcattacctggacttattcatcaccggagttataggcctgaacgtggtcacaatggccatggagcactaccaacagccccagattctcgatgaggccctgaagatttgtaactacatttttacagtgatttttgttttggagagtgtttttaagctcgtggcattcggattccgacggttttttcaggatcgttggaatcagcttgacttggcgatcgtgctgctgagcataatgggtattaccctggaggagatagaagttaacgcctccctgccaatcaacccaacgatcattcggattatgcgggttctcaggattgcacgcgtactgaagttgcttaaaatggcagtaggaatgcgcgcactcctggacacagtcggtaacttagggctgctgtttatgctcctcttctttatcttcgcagctctgggcgttgaactgttcggcgacctggaatgtgatgaaacccatccgtgcgaagggcttgggcggcacgcaacctttcggaacttcggcatggcatttttaaccctattcagagtctccaccggggataactggaacgggattatgaaggacacactcagggattgcgatcaagaatccacgtgctataacacggtgatcagtcctatctactttgtgtcctttgtcctgacagcccagtttgtgctggtgaatgtggtaatcgctgtccttatgaagcaccttgaagaatccaacaaggaggctaaggaggaggcggaactggaagccgaactagagttggagatgaaaaccttatccccgcagcctcattcgccattgggctcaccatttctgtggcctggagtggagggaccagactctcccgatagccccaagcccggtgccttgcaccccgcagcacatgcccggagcgccagccacttttcacttgagcaccccaccatgcaaccacatcctaccgaactgccgggacccgacctactgacagttagaaagtccggcgtgtctcggacccactccttgcccaacgactcatatatgtgtcgacatggctctacggcggaagggcctctgggccaccgtggttggggactgccaaaagcccagtcagggtccgtactctcagtgcattcacagccggctgacacatcttatatcttacagttgcctaaggatgcacctcatttactgcaaccccattcagcccccacatgggggacgatccctaagctcccacctcccggcaggtccccgctagcgcaacgtcccctgaggcgccaggccgccatacgaacagactccctcgatgtccaaggccttggctccagagaagacttgctggccgaagtaagcgggccttccccccctttagcgcgagcttatagcttctggggccagagcagtacccaggcccagcaacactctagaagccactccaagatttccaaacacatgacaccccctgctccttgccccggaccagagcccaactggggaaagggaccacccgagacaagatcctctctggaattggacaccgagctcagctggatttcaggtgatcttctcccccccggcggacaggaggagccaccaagtccccgcgatctcaagaaatgctactctgtggaggctcaatcttgccagcggcggcccacaagctggctcgacgagcagcggagacactctatcgctgtttcctgcttggattcaggcagccagccgcaccttggaaccgatccgtcaaacctgggaggtcagcccctcggaggtcccggcagccgtccaaagaagaagctgtctcctccgagtatcacaatcgatccgcctgagtcccagggcccgcggaccccacccagccccggtatctgcctgcggaggcgcgcacccagcagcgattccaaggacccgctggccagcggacctcctgattcaatggctgccagtccctcccctaagaaagacgtcttgtcactgtcaggactgtcttccgaccctgccgacttggacccgtag

SEQ ID NO: 90291 - DNA, 6779 bp, Artificial Sequence
  derived and/or modified sequence
atggatgaagaggaggacggggctggggcagaagaatccggccaaccgagatctttcatgcggctgaatgacttgagcggagccggtggcagacccggtcctggctctgctgagaaggatcccggatctgcggatagtgaggctgagggtcttccctacccagctcttgcacccgtcgtgtttttttacctgtctcaggactcccgtccaaggtcctggtgtctgcgcactgtgtgtaatccatggtttgagcggatcagcatgctcgtgatcctgcttaactgtgtgacactgggcatgtttaggccgtgcgaagacatcgcgtgtgactctcagagatgcaggattcttcaggcattcgacgattttatctttgccttttttgccgtggagatggtcgtgaagatggttgctctaggcatatttggcaaaaagtgttatttgggagacacctggaaccgactggactttttcatcgtgattgctggaatgttggaatattctctggatttgcagaatgtttctttttcagcagtgcgcactgtgagggtgctgcgccctctaagagccattaaccgggtgcccagcatgcgcattttggtgacgcttctactggacactctgcccatgcttgggaacgtactgctgctgtgcttctttgtcttctttattttcggtatagtcggagtccaactctgggctgggttactccgaaaccgctgtttcctccccgagaacttctccctgcccctctccgtcgatttggaacggtattaccagaccgagaacgaggacgaaagtcctttcatctgcagccagccgagggaaaacgggatgcgtagctgtcggtcagtgcctaccctgagaggcgacggaggaggtggccctccgtgcggtctcgactacgaggcttataactccagctctaacaccacatgcgtgaactggaatcagtactacaccaattgtagcgcaggcgaacacaatccatttaagggggctattaactttgataatatcggctatgcatggatagctatcttccaggtgattacgctagagggctgggtagatataatgtacttcgtcatggatgctcattctttctacaattttatctacttcatcctgctcataattgtgggctcatttttcatgatcaacctgtgtcttgtggtgatagcgacgcaatttagtgagaccaaacaaagggagtcccagttgatgcgggagcagcgggtccggtttctttccaacgccagtaccctggcatccttctctgagcccggttcctgttacgaggaacttcttaagtacctcgtgtacatcttgaggaaagccgcacgcaggctggcacaggtatccagggccgctggcgttcgcgtgggactactgagtagtcccgctcctctgggcggtcaggagacacagcccagttcttcgtgctcacggtctcaccgccgactctcagtccatcacctggttcatcatcatcaccatcaccaccaccattatcacctgggcaatgggacactgagagccccaagagccagcccggaaatccaagaccgcgacgctaacggatctcgacggttgatgctcccccctcccagcacacctgcactaagcggagcccctccaggtggggcagaatccgtgcactctttctaccacgccgactgccacctcgagcctgttcgctgccaagcacccccacccagaagtccttccgaagctagtggcaggacagtgggcagtggtaaggtttatccgacggtgcatacgagccccccacccgaaactctaaaggagaaagcacttgtggaggtcgccgcatcatccggccctccaactcttactagtctgaatattccacctggtccgtatagttcaatgcacaagttgttggaaacacaatcaaccggggcttgtcaaagctcttgcaagattagtagtccgtgtttgaaggccgactctggcgcatgtgggcctgatagctgcccgtactgtgctagggcgggagccggagaggttgagctcgccgatcgggaaatgccggactctgactcagaggcggtgtatgagtttactcaggatgcacaacacagtgatctgagggatccccactcaaggcggcagaggtcattgggtcccgacgcggaacctagctcagttctcgcattttggagattgatctgcgatacctttcggaaaatcgtagactctaaatatttcggaagaggaattatgatcgccatacttgtgaataccctttcaatgggcattgagtatcacgagcagccagaggaattaaccaatgccttggaaatttcaaatattgtgttcaccagtcttttcgcactggagatgcttttaaaactgctggtatatggcccttttggctatattaagaatccctacaatatctttgacggggtgatcgtggtcatcagcgtttgggagatcgtgggacagcaaggcggaggtctaagtgttctgcgcacttttagattgatgcgggtgctgaagcttgtgagattcctgccggcactccagagacagctggtcgtgctcatgaaaacaatggataacgtggccacgttttgcatgttactgatgctgtttatctttatcttctctattcttgggatgcacttattcggatgcaaattcgcttctgagcgcgacggcgataccttacccgaccggaagaacttcgactccctgctttgggcaatagtgactgtcttccagatcctgacccaggaggattggaataaggtgctttataacggaatggccagcacttcctcctgggctgccctttacttcatcgctctcatgacattcggtaactacgtcttgtttaacctgctggtggctatacttgttgagggcttccaggcagaggagatcagcaaacgggaagacgccagcggacagttatcgtgtatccagctgcccgtggactcacagggaggggatgcaaataaaagcgagagcgaacccgattttttctcgcccagtcttgacggcgacggtgatcggaaaaagtgtcttgccctcgtcagcctaggagagcatcccgagctgcgcaagagcctcctcccccctctgataatccatacagccgctacccctatgtcactccctaagagcacttccactggcctgggtgaggcccttggccctgccagccgacgcacgtcaagtagcggctcagcagaaccaggagcggctcatgaaatgaagtcccctccctctgccaggagttctccacactccccatggtcagcagcgtcttcatggacctccagaagatcaagccgtaactcgctgggcagggccccttccctaaaacgcagatccccgtcaggcgagagacgcagcttgctgtccggggaaggacaggagtcccaggacgaggaagagagtagtgaagaggaacgtgcttctcctgcgggatccgatcaccgacatcggggtagtctggagcgcgaagctaaatcatcgttcgacttaccggacactctgcaggtccctggactgcataggacagcgagcggcaggggatcagcttctgaacatcaggactgcaacggaaaatctgcaagcgggaggctggcaagggctctgagaccggatgacccaccattagatggagatgatgcggatgatgaagggaacctcagtaaaggggaaagggttcgtgcttggatcagagcgcgtttgccagcttgttgtctggagcgcgattcatggtccgcctatattttcccaccgcagtcaagatttcggcttctatgtcatcgtataattacacataagatgtttgatcacgtggtgctggtgataatatttctcaactgtattactattgccatggagcgtcctaaaattgatccgcactccgccgagcgcattttcctgacactcagtaattatatctttacagccgttttcctagccgaaatgaccgtgaaggtggtcgccttaggctggtgcttcggagaacaggcctatttgcgctcgagctggaatgtcttggatggtttgttagtgttaatcagcgtcatcgacatattggtatccatggtttcagattccggcaccaaaatccttggcatgctgcgcgtgctgcgactgctccggaccctgcggccactgcgggtgattagcagggcacaaggactcaagctcgttgtggagactctgatgagcagcctcaaaccgattggtaatattgttgtgatctgctgtgcgttctttattatctttggtatattaggggtccagttgtttaaaggtaaattctttgtctgtcaaggagaagacacacgcaacattacgaataagagcgactgcgccgaagcgtcctatcgctgggtaaggcacaagtacaattttgataatttagggcaagctttgatgtccctgttcgttttggcaagcaaagacggctgggtggatattatgtacgacggcctggatgccgttggcgttgaccagcagccaatcatgaaccataacccctggatgctgctgtatttcatttcattcctgctcattgtagccttctttgtgctgaacatgtttgtgggcgtagtagtcgaaaatttccataagtgcaggcaacaccaagaagaggaagaggcgagaagaagggaggaaaagcgcctgcgtcgcctcgaaaaaaagcggcgtaaggcgcagtgtaagccctactacagcgattattcccggttccgcctgcttgtgcaccacctttgcacctcccattatcttgatctgttcatcacaggcgttatcggcctcaacgtcgtcaccatggccatggaacactaccaacagccccagatcttggacgaggcactgaaaatttgcaactatattttcacagtaatcttcgtgctagagagcgtttttaaactggtcgctttcggattccggaggttcttccaggaccgatggaaccagctggacctagctattgtgttgttgagtattatgggcatcacactcgaagaaatcgaagtgaacgcaagtctcccgattaatcctaccattataaggattatgagggtcctgcggatcgcgcgtgtgctcaagttgctcaagatggcggtcggcatgcgggctctcctggatacagttggcaacctggggttgcttttcatgctgctattttttatcttcgccgcactgggagtggagctgttcggagacctcgagtgtgatgaaacccacccctgtgaaggccttgggcgacatgctactttccgaaattttggaatggcgtttctgaccctttttcgcgtgtcaacaggcgacaactggaatggcattatgaaggataccttacgcgactgtgaccaggaaagcacatgttacaacacagtcatcagcccaatctattttgtttccttcgtgttgaccgcccagttcgtacttgtcaacgtggtgattgctgtgctgatgaaacacctcgaggagagcaacaaagaggcgaaagaggaggccgagctggaggccgagttggaattggagatgaaaaccctaagtccacagccccactcacccctgggcagccccttcctatggccgggagtcgaggggcctgactctcccgactcacctaagccgggagccctgcatcctgcggctcacgccaggtcggcatcccacttcagccttgagcatcccaccatgcagccacaccctacggaattacctgggccagacctgcttaccgtgcggaaatcaggtgtctctaggactcactcccttcctaatgattcctatatgtgcaggcacgggagcacagctgagggacctttgggccatcgcggatggggcttacctaaggcacagtcaggttctgtgctgtccgtacacagtcaacccgctgatacctcatacatcttgcagttgccaaaagatgccccacacctactgcaaccacactctgctccaacttggggtaccatccctaaactcccaccacctggccgaagtccactggcccagcgcccacttaggaggcaggctgccattagaactgactccctggacgtccaaggccttggaagcagagaggacttactggctgaggtgtccggaccttcacctcctctggcacgcgcatattccttctggggccaatcatctactcaggcccagcaacacagtcgttctcactccaagatcagtaagcacatgaccccacccgctccttgcccaggcccagagccaaattgggggaaaggccctccggagacaaggtcttctctggaacttgacactgaactaagctggatttcaggtgatctcctgcccccagggggacaggaggagcccccaagccctcgtgatctcaagaagtgctactccgtggaggcacagtcgtgtcagagacggcctacctcatggctggacgaacagcgcaggcattcaatagccgtgtcctgtcttgactctggcagtcagcctcatctgggcactgaccccagcaatttaggtggacagcccttagggggtcccggatcacgtcctaagaagaaactctcgccacccagcatcactatcgatcctcccgaaagtcagggccctcgcacccccccatctcctggcatctgtttgcggagacgcgcaccttcaagtgacagcaaagacccattggcttctggaccacccgacagcatggctgcgtccccatcacccaagaaagacgtcctgagcttaagtgggctttcctccgaccctgctgatcttgaccccta

SEQ ID NO: 90292 - DNA, 6795 bp, Artificial Sequence
  derived and/or modified sequence
atggacgaggaggaggatggagcgggcgccgaggagtcgggacagccccggagcttcatgcggctcaacgacctgtcgggggccgggggccggccggggccggggtcagcagaaaaggacccgggcagcgcggactccgaggcggaggggctgccgtacccggcgctggccccggtggttttcttctacttgagccaggacagccgcccgcggagctggtgtctccgcacggtctgtaacccctggtttgagcgcatcagcatgttggtcatccttctcaactgcgtgaccctgggcatgttccggccatgcgaggacatcgcctgtgactcccagcgctgccggatcctgcaggcctttgatgacttcatctttgccttctttgccgtggagatggtggtgaagatggtggccttgggcatctttgggaaaaagtgttacctgggagacacttggaaccggcttgactttttcatcgtcatcgcagggatgctggagtactcgctggacctgcagaacgtcagcttctcagctgtcaggacagtccgtgtgctgcgaccgctcagggccattaaccgggtgcccagcatgcgcatccttgtcacgttgctgctggatacgctgcccatgctgggcaacgtcctgctgctctgcttcttcgtcttcttcatcttcggcatcgtcggcgtccagctgtgggcagggctgcttcggaaccgatgcttcctacctgagaatttcagcctccccctgagcgtggacctggagcgctattaccagacagagaacgaggatgagagccccttcatctgctcccagccacgcgagaacggcatgcggtcctgcagaagcgtgcccacgctgcgcggggacgggggcggtggcccaccttgcggtctggactatgaggcctacaacagctccagcaacaccacctgtgtcaactggaaccagtactacaccaactgctcagcgggggagcacaaccccttcaagggcgccatcaactttgacaacattggctatgcctggatcgccatcttccaggtcatcacgctggagggctgggtcgacatcatgtactttgtgatggatgctcattccttctacaatttcatctacttcatcctcctcatcatcgtgggctccttcttcatgatcaacctgtgcctggtggtgattgccacgcagttctcagagaccaagcagcgggaaagccagctgatgcgggagcagcgtgtgcggttcctgtccaacgccagcaccctggctagcttctctgagcccggcagctgctatgaggagctgctcaagtacctggtgtacatccttcgtaaggcagcccgcaggctggctcaggtctctcgggcagcaggtgtgcgggttgggctgctcagcagcccagcacccctcgggggccaggagacccagcccagcagcagctgctctcgctcccaccgccgcctatccgtccaccacctggtgcaccaccaccaccaccatcaccaccactaccacctgggcaatgggacgctcagggccccccgggccagcccggagatccaggacagggatgccaatgggtcccgccggctcatgctgccaccaccctcgacgcctgccctctccggggccccccctggtggcgcagagtctgtgcacagcttctaccatgccgactgccacttagagccagtccgctgccaggcgccccctcccaggtccccatctgaggcatccggcaggactgtgggcagcgggaaggtgtatcccaccgtgcacaccagccctccaccggagacgctgaaggagaaggcactagtagaggtggctgccagctctgggcccccaaccctcaccagcctcaacatcccacccgggccctacagctccatgcacaagctgctggagacacagagtacaggtgcctgccaaagctcttgcaagatctccagcccttgcttgaaagcagacagtggagcctgtggtccagacagctgcccctactgtgcccgggccggggcaggggaggtggagctcgccgaccgtgaaatgcctgactcagacagcgaggcagtttatgagttcacacaggatgcccagcacagcgacctccgggacccccacagccggcggcaacggagcctgggcccagatgcagagcccagctctgtgctggccttctggaggctaatctgtgacaccttccgaaagattgtggacagcaagtactttggccggggaatcatgatcgccatcctggtcaacacactcagcatgggcatcgaataccacgagcagcccgaggagcttaccaacgccctagaaatcagcaacatcgtcttcaccagcctctttgccctggagatgctgctgaagctgcttgtgtatggtccctttggctacatcaagaatccctacaacatcttcgatggtgtcattgtggtcatcagcgtgtgggagatcgtgggccagcaggggggcggcctgtcggtgctgcggaccttccgcctgatgcgtgtgctgaagctggtgcgcttcctgccggcgctgcagcggcagctggtggtgctcatgaagaccatggacaacgtggccaccttctgcatgctgcttatgctcttcatcttcatcttcagcatcctgggcatgcatctcttcggctgcaagtttgcctctgagcgggatggggacaccctgccagaccggaagaattttgactccttgctctgggccatcgtcactgtctttcagatcctgacccaggaggactggaacaaagtcctctacaatggtatggcctccacgtcgtcctgggcggccctttatttcattgccctcatgaccttcggcaactacgtgctcttcaatttgctggtcgccattctggtggagggcttccaggcggaggaaatcagcaaacgggaagatgcgagtggacagttaagctgtattcagctgcctgtcgactcccaggggggagatgccaacaagtccgaatcagagcccgatttcttctcacccagcctggatggtgatggggacaggaagaagtgcttggccttggtgtccctgggagagcacccggagctgcggaagagcctgctgccgcctctcatcatccacacggccgccacacccatgtcgctgcccaagagcaccagcacgggcctgggcgaggcgctgggccctgcgtcgcgccgcaccagcagcagcgggtcggcagagcctggggcggcccacgagatgaagtcaccgcccagcgcccgcagctctccgcacagcccctggagcgctgcaagcagctggaccagcaggcgctccagccggaacagcctcggccgtgcacccagcctgaagcggagaagcccaagtggagagcggcggtccctgttgtcgggagaaggccaggagagccaggatgaagaggagagctcagaagaggagcgggccagccctgcgggcagtgaccatcgccacagggggtccctggagcgggaggccaagagttcctttgacctgccagacacactgcaggtgccagggctgcatcgcactgccagtggccgagggtctgcttctgagcaccaggactgcaatggcaagtcggcttcagggcgcctggcccgggccctgcggcctgatgaccccccactggatggggatgacgccgatgacgagggcaacctgagcaaaggggaacgggtccgcgcgtggatccgagcccgactccctgcctgctgcctcgagcgagactcctggtcagcctacatcttccctcctcagtccaggttccgcctcctgtgtcaccggatcatcacccacaagatgttcgaccacgtggtccttgtcatcatcttccttaactgcatcaccatcgccatggagcgccccaaaattgacccccacagcgctgaacgcatcttcctgaccctctccaattacatcttcaccgcagtctttctggctgaaatgacagtgaaggtggtggcactgggctggtgcttcggggagcaggcgtacctgcggagcagttggaacgtgctggacgggctgttggtgctcatctccgtcatcgacattctggtgtccatggtctctgacagcggcaccaagatcctgggcatgctgagggtgctgcggctgctgcggaccctgcgcccgctcagggtgatcagccgggcgcaggggctgaagctggtggtggagacgctgatgtcctcactgaaacccatcggcaacattgtagtcatctgctgtgccttcttcatcattttcggcatcttgggggtgcagctcttcaaagggaagtttttcgtgtgccagggcgaggataccaggaacatcaccaataaatcggactgtgccgaggccagttaccggtgggtccggcacaagtacaactttgacaaccttggccaggccctgatgtccctgttcgttttggcctccaaggatggttgggtggacatcatgtacgatgggctggatgctgtgggcgtggaccagcagcccatcatgaaccacaacccctggatgctgctgtacttcatctcgttcctgctcattgtggccttctttgtcctgaacatgtttgtgggtgtggtggtggagaacttccacaagtgtcggcagcaccaggaggaagaggaggcccggcggcgggaggagaagcgcctacgaagactggagaaaaagagaaggaaagcccagtgcaaaccttactactccgactactcccgcttccggctcctcgtccaccacttgtgcaccagccactacctggacctcttcatcacaggtgtcatcgggctgaacgtggtcaccatggccatggagcactaccagcagccccagattctggatgaggctctgaagatctgcaactacatcttcactgtcatctttgtcttggagtcagttttcaaacttgtggcctttggtttccgtcggttcttccaggacaggtggaaccagctggacctggccattgtgctgctgtccatcatgggcatcacgctggaggaaatcgaggtcaacgcctcgctgcccatcaaccccaccatcatccgcatcatgagggtgctgcgcattgcccgagtgctgaagctgctgaagatggctgtgggcatgcgggcgctgctggacacggtggggaacctgggacttctcttcatgttgttgtttttcatctttgcagctctgggcgtggagctctttggagacctggagtgtgacgagacacacccctgtgagggcctgggccgtcatgccacctttcggaactttggcatggccttcctaaccctcttccgagtctccacaggtgacaattggaatggcattatgaaggacaccctccgggactgtgaccaggagtccacctgctacaacacggtcatctcgcctatctactttgtgtccttcgtgctgacggcccagttcgtgctagtcaacgtggtgatcgccgtgctgatgaagcacctggaggagagcaacaaggaggccaaggaggaggccgagctagaggctgagctggagctggagatgaagaccctcagcccccagccccactcgccactgggcagccccttcctctggcctggggtcgagggccccgacagccccgacagccccaagcctggggctctgcacccagcggcccacgcgagatcagcctcccacttttccctggagcaccccacgatgcagccccaccccacggagctgccaggaccagacttactgactgtgcggaagtctggggtcagccgaacgcactctctgcccaatgacagctacatgtgtcggcatgggagcactgccgaggggcccctgggacacaggggctgggggctccccaaagctcagtcaggctccgtcttgtccgttcactcccagccagcagataccagctacatcctgcagcttcccaaagatgcacctcatctgctccagccccacagcgccccaacctggggcaccatccccaaactgcccccaccaggacgctcccctttggctcagaggccactcaggcgccaggcagcaataaggactgactccttggacgttcagggtctgggcagccgggaagacctgctggcagaggtgagtgggccctccccgcccctggcccgggcctactctttctggggccagtcaagtacccaggcacagcagcactcccgcagccacagcaagatctccaagcacatgaccccgccagccccttgcccaggcccagaacccaactggggcaagggccctccagagaccagaagcagcttagagttggacacggagctgagctggatttcaggagacctcctgccccctggcggccaggaggagcccccatccccacgggacctgaagaagtgctacagcgtggaggcccagagctgccagcgccggcctacgtcctggctggatgagcagaggagacactctatcgccgtcagctgcctggacagcggctcccaaccccacctgggcacagacccctctaaccttgggggccagcctcttggggggcctgggagccggcccaagaaaaaactcagcccgcctagtatcaccatagacccccccgagagccaaggtcctcggaccccgcccagccctggtatctgcctccggaggagggctccgtccagcgactccaaggatcccttggcctctggcccccctgacagcatggctgcctcgccctccccaaagaaagatgtgctgagtctctccggtttatcctctgacccagcagacctggacccctgagtcctgccccacttt

SEQ ID NO: 90293 - protein, 2250 aa, Artificial Sequence
  derived and/or modified sequence
MDEEEDGAGAEESGQPRSFMRLNDLSGAGGRPGPGSAEKDPGSADSEAEGLPYPALAPVVFFYLSQDSRPRSWCLRTVCNPWFERISMLVILLNCVTLGMFRPCEDIACDSQRCRILQAFDDFIFAFFAVEMVVKMVALGIFGKKCYLGDTWNRLDFFIVIAGMLEYSLDLQNVSFSAVRTVRVLRPLRAINRVPSMRILVTLLLDTLPMLGNVLLLCFFVFFIFGIVGVQLWAGLLRNRCFLPENFSLPLSVDLERYYQTENEDESPFICSQPRENGMRSCRSVPTLRGDGGGGPPCGLDYEAYNSSSNTTCVNWNQYYTNCSAGEHNPFKGAINFDNIGYAWIAIFQVITLEGWVDIMYFVMDAHSFYNFIYFILLIIVGSFFMINLCLVVIATQFSETKQRESQLMREQRVRFLSNASTLASFSEPGSCYEELLKYLVYILRKAARRLAQVSRAAGVRVGLLSSPAPLGGQETQPSSSCSRSHRRLSVHHLVHHHHHHHHHYHLGNGTLRAPRASPEIQDRDANGSRRLMLPPPSTPALSGAPPGGAESVHSFYHADCHLEPVRCQAPPPRSPSEASGRTVGSGKVYPTVHTSPPPETLKEKALVEVAASSGPPTLTSLNIPPGPYSSMHKLLETQSTGACQSSCKISSPCLKADSGACGPDSCPYCARAGAGEVELADREMPDSDSEAVYEFTQDAQHSDLRDPHSRRQRSLGPDAEPSSVLAFWRLICDTFRKIVDSKYFGRGIMIAILVNTLSMGIEYHEQPEELTNALEISNIVFTSLFALEMLLKLLVYGPFGYIKNPYNIFDGVIVVISVWEIVGQQGGGLSVLRTFRLMRVLKLVRFLPALQRQLVVLMKTMDNVATFCMLLMLFIFIFSILGMHLFGCKFASERDGDTLPDRKNFDSLLWAIVTVFQILTQEDWNKVLYNGMASTSSWAALYFIALMTFGNYVLFNLLVAILVEGFQAEEISKREDASGQLSCIQLPVDSQGGDANKSESEPDFFSPSLDGDGDRKKCLALVSLGEHPELRKSLLPPLIIHTAATPMSLPKSTSTGLGEALGPASRRTSSSGSAEPGAAHEMKSPPSARSSPHSPWSAASSWTSRRSSRNSLGRAPSLKRRSPSGERRSLLSGEGQESQDEEESSEEERASPAGSDHRHRGSLEREAKSSFDLPDTLQVPGLHRTASGRGSASEHQDCNGKSASGRLARALRPDDPPLDGDDADDEGNLSKGERVRAWIRARLPACCLERDSWSAYIFPPQSRFRLLCHRIITHKMFDHVVLVIIFLNCITIAMERPKIDPHSAERIFLTLSNYIFTAVFLAEMTVKVVALGWCFGEQAYLRSSWNVLDGLLVLISVIDILVSMVSDSGTKILGMLRVLRLLRTLRPLRVISRAQGLKLVVETLMSSLKPIGNIVVICCAFFIIFGILGVQLFKGKFFVCQGEDTRNITNKSDCAEASYRWVRHKYNFDNLGQALMSLFVLASKDGWVDIMYDGLDAVGVDQQNFHKCRQHQEEEEARRREEKRLRRLEKKRRNLMLDDVIASGSSASAASEAQCKPYYSDYSRFRLLVHHLCTSHYLDLFITGVIGLNVVTMAMEHYQQPQILDEALKICNYIFTVIFVLESVFKLVAFGFRRFFQDRWNQLDLAIVLLSIMGITLEEIEVNASLPINPTIIRIMRVLRIARVLKLLKMAVGMRALLDTVMQALPQVGNLGLLFMLLFFIFAALGVELFGDLECDETHPCEGLGRHATFRNFGMAFLTLFRVSTGDNWNGIMKDTLRDCDQESTCYNTVISPIYFVSFVLTAQFVLVNVVIAVLMKHLEESNKEAKEEAELEAELELEMKTLSPQPHSPLGSPFLWPGVEGPDSPDSPKPGALHPAAHARSASHFSLEHPTMQPHPTELPGPDLLTVRKSGVSRTHSLPNDSYMCRHGSTAEGPLGHRGWGLPKAQSGSVLSVHSQPADTSYILQLPKDAPHLLQPHSAPTWGTIPKLPPPGRSPLAQRPLRRQAAIRTDSLDVQGLGSREDLLAEVSGPSPPLARAYSFWGQSSTQAQQHSRSHSKISKHMTPPAPCPGPEPNWGKGPPETRSSLELDTELSWISGDLLPPGGQEEPPSPRDLKKCYSVEAQSCQRRPTSWLDEQRRHSIAVSCLDSGSQPHLGTDPSNLGGQPLGGPGSRPKKKLSPPSITIDPPESQGPRTPPSPGICLRRRAPSSDSKDPLASGPPDSMAASPSPKKDVLSLSGLSSDPADLDP

SEQ ID NO: 90294 - DNA, 6753 bp, Artificial Sequence
  derived and/or modified sequence
atggacgaggaggaggacggcgccggcgccgaggagagcggccagcccagaagcttcatgagactgaacgacctgagcggcgccggcggcagacccggccccggcagcgccgagaaggaccccggcagcgccgacagcgaggccgagggcctgccctaccccgccctggcccccgtggtgttcttctacctgagccaggacagcagacccagaagctggtgcctgagaaccgtgtgcaacccctggttcgagagaatcagcatgctggtgatcctgctgaactgcgtgaccctgggcatgttcagaccctgcgaggacatcgcctgcgacagccagagatgcagaatcctgcaggccttcgacgacttcatcttcgccttcttcgccgtggagatggtggtgaagatggtggccctgggcatcttcggcaagaagtgctacctgggcgacacctggaacagactggacttcttcatcgtgatcgccggcatgctggagtacagcctggacctgcagaacgtgagcttcagcgccgtgagaaccgtgagagtgctgagacccctgagagccatcaacagagtgcccagcatgagaatcctggtgaccctgctgctggacaccctgcccatgctgggcaacgtgctgctgctgtgcttcttcgtgttcttcatcttcggcatcgtgggcgtgcagctgtgggccggcctgctgagaaacagatgcttcctgcccgagaacttcagcctgcccctgagcgtggacctggagagatactaccagaccgagaacgaggacgagagccccttcatctgcagccagcccagagagaacggcatgagaagctgcagaagcgtgcccaccctgagaggcgacggcggcggcggccccccctgcggcctggactacgaggcctacaacagcagcagcaacaccacctgcgtgaactggaaccagtactacaccaactgcagcgccggcgagcacaaccccttcaagggcgccatcaacttcgacaacatcggctacgcctggatcgccatcttccaggtgatcaccctggagggctgggtggacatcatgtacttcgtgatggacgcccacagcttctacaacttcatctacttcatcctgctgatcatcgtgggcagcttcttcatgatcaacctgtgcctggtggtgatcgccacccagttcagcgagaccaagcagagagagagccagctgatgagagagcagagagtgagattcctgagcaacgccagcaccctggccagcttcagcgagcccggcagctgctacgaggagctgctgaagtacctggtgtacatcctgagaaaggccgccagaagactggcccaggtgagcagagccgccggcgtgagagtgggcctgctgagcagccccgcccccctgggcggccaggagacccagcccagcagcagctgcagcagaagccacagaagactgagcgtgcaccacctggtgcaccaccaccaccaccaccaccaccactaccacctgggcaacggcaccctgagagcccccagagccagccccgagatccaggacagagacgccaacggcagcagaagactgatgctgcccccccccagcacccccgccctgagcggcgccccccccggcggcgccgagagcgtgcacagcttctaccacgccgactgccacctggagcccgtgagatgccaggcccccccccccagaagccccagcgaggccagcggcagaaccgtgggcagcggcaaggtgtaccccaccgtgcacaccagccccccccccgagaccctgaaggagaaggccctggtggaggtggccgccagcagcggcccccccaccctgaccagcctgaacatcccccccggcccctacagcagcatgcacaagctgctggagacccagagcaccggcgcctgccagagcagctgcaagatcagcagcccctgcctgaaggccgacagcggcgcctgcggccccgacagctgcccctactgcgccagagccggcgccggcgaggtggagctggccgacagagagatgcccgacagcgacagcgaggccgtgtacgagttcacccaggacgcccagcacagcgacctgagagacccccacagcagaagacagagaagcctgggccccgacgccgagcccagcagcgtgctggccttctggagactgatctgcgacaccttcagaaagatcgtggacagcaagtacttcggcagaggcatcatgatcgccatcctggtgaacaccctgagcatgggcatcgagtaccacgagcagcccgaggagctgaccaacgccctggagatcagcaacatcgtgttcaccagcctgttcgccctggagatgctgctgaagctgctggtgtacggccccttcggctacatcaagaacccctacaacatcttcgacggcgtgatcgtggtgatcagcgtgtgggagatcgtgggccagcagggcggcggcctgagcgtgctgagaaccttcagactgatgagagtgctgaagctggtgagattcctgcccgccctgcagagacagctggtggtgctgatgaagaccatggacaacgtggccaccttctgcatgctgctgatgctgttcatcttcatcttcagcatcctgggcatgcacctgttcggctgcaagttcgccagcgagagagacggcgacaccctgcccgacagaaagaacttcgacagcctgctgtgggccatcgtgaccgtgttccagatcctgacccaggaggactggaacaaggtgctgtacaacggcatggccagcaccagcagctgggccgccctgtacttcatcgccctgatgaccttcggcaactacgtgctgttcaacctgctggtggccatcctggtggagggcttccaggccgaggagatcagcaagagagaggacgccagcggccagctgagctgcatccagctgcccgtggacagccagggcggcgacgccaacaagagcgagagcgagcccgacttcttcagccccagcctggacggcgacggcgacagaaagaagtgcctggccctggtgagcctgggcgagcaccccgagctgagaaagagcctgctgccccccctgatcatccacaccgccgccacccccatgagcctgcccaagagcaccagcaccggcctgggcgaggccctgggccccgccagcagaagaaccagcagcagcggcagcgccgagcccggcgccgcccacgagatgaagagcccccccagcgccagaagcagcccccacagcccctggagcgccgccagcagctggaccagcagaagaagcagcagaaacagcctgggcagagcccccagcctgaagagaagaagccccagcggcgagagaagaagcctgctgagcggcgagggccaggagagccaggacgaggaggagagcagcgaggaggagagagccagccccgccggcagcgaccacagacacagaggcagcctggagagagaggccaagagcagcttcgacctgcccgacaccctgcaggtgcccggcctgcacagaaccgccagcggcagaggcagcgccagcgagcaccaggactgcaacggcaagagcgccagcggcagactggccagagccctgagacccgacgacccccccctggacggcgacgacgccgacgacgagggcaacctgagcaagggcgagagagtgagagcctggatcagagccagactgcccgcctgctgcctggagagagacagctggagcgcctacatcttccccccccagagcagattcagactgctgtgccacagaatcatcacccacaagatgttcgaccacgtggtgctggtgatcatcttcctgaactgcatcaccatcgccatggagagacccaagatcgacccccacagcgccgagagaatcttcctgaccctgagcaactacatcttcaccgccgtgttcctggccgagatgaccgtgaaggtggtggccctgggctggtgcttcggcgagcaggcctacctgagaagcagctggaacgtgctggacggcctgctggtgctgatcagcgtgatcgacatcctggtgagcatggtgagcgacagcggcaccaagatcctgggcatgctgagagtgctgagactgctgagaaccctgagacccctgagagtgatcagcagagcccagggcctgaagctggtggtggagaccctgatgagcagcctgaagcccatcggcaacatcgtggtgatctgctgcgccttcttcatcatcttcggcatcctgggcgtgcagctgttcaagggcaagttcttcgtgtgccagggcgaggacaccagaaacatcaccaacaagagcgactgcgccgaggccagctacagatgggtgagacacaagtacaacttcgacaacctgggccaggccctgatgagcctgttcgtgctggccagcaaggacggctgggtggacatcatgtacgacggcctggacgccgtgggcgtggaccagcagaacttccacaagtgcagacagcaccaggaggaggaggaggccagaagaagagaggagaagagactgagaagactggagaagaagagaagaaacctgatgctggacgacgtgatcgccagcggcagcagcgccagcgccgccagcgaggcccagtgcaagccctactacagcgactacagcagattcagactgctggtgcaccacctgtgcaccagccactacctggacctgttcatcaccggcgtgatcggcctgaacgtggtgaccatggccatggagcactaccagcagccccagatcctggacgaggccctgaagatctgcaactacatcttcaccgtgatcttcgtgctggagagcgtgttcaagctggtggccttcggcttcagaagattcttccaggacagatggaaccagctggacctggccatcgtgctgctgagcatcatgggcatcaccctggaggagatcgaggtgaacgccagcctgcccatcaaccccaccatcatcagaatcatgagagtgctgagaatcgccagagtgctgaagctgctgaagatggccgtgggcatgagagccctgctggacaccgtgatgcaggccctgccccaggtgggcaacctgggcctgctgttcatgctgctgttcttcatcttcgccgccctgggcgtggagctgttcggcgacctggagtgcgacgagacccacccctgcgagggcctgggcagacacgccaccttcagaaacttcggcatggccttcctgaccctgttcagagtgagcaccggcgacaactggaacggcatcatgaaggacaccctgagagactgcgaccaggagagcacctgctacaacaccgtgatcagccccatctacttcgtgagcttcgtgctgaccgcccagttcgtgctggtgaacgtggtgatcgccgtgctgatgaagcacctggaggagagcaacaaggaggccaaggaggaggccgagctggaggccgagctggagctggagatgaagaccctgagcccccagccccacagccccctgggcagccccttcctgtggcccggcgtggagggccccgacagccccgacagccccaagcccggcgccctgcaccccgccgcccacgccagaagcgccagccacttcagcctggagcaccccaccatgcagccccaccccaccgagctgcccggccccgacctgctgaccgtgagaaagagcggcgtgagcagaacccacagcctgcccaacgacagctacatgtgcagacacggcagcaccgccgagggccccctgggccacagaggctggggcctgcccaaggcccagagcggcagcgtgctgagcgtgcacagccagcccgccgacaccagctacatcctgcagctgcccaaggacgccccccacctgctgcagccccacagcgcccccacctggggcaccatccccaagctgcccccccccggcagaagccccctggcccagagacccctgagaagacaggccgccatcagaaccgacagcctggacgtgcagggcctgggcagcagagaggacctgctggccgaggtgagcggccccagcccccccctggccagagcctacagcttctggggccagagcagcacccaggcccagcagcacagcagaagccacagcaagatcagcaagcacatgaccccccccgccccctgccccggccccgagcccaactggggcaagggcccccccgagaccagaagcagcctggagctggacaccgagctgagctggatcagcggcgacctgctgccccccggcggccaggaggagccccccagccccagagacctgaagaagtgctacagcgtggaggcccagagctgccagagaagacccaccagctggctggacgagcagagaagacacagcatcgccgtgagctgcctggacagcggcagccagccccacctgggcaccgaccccagcaacctgggcggccagcccctgggcggccccggcagcagacccaagaagaagctgagcccccccagcatcaccatcgacccccccgagagccagggccccagaaccccccccagccccggcatctgcctgagaagaagagcccccagcagcgacagcaaggaccccctggccagcggcccccccgacagcatggccgccagccccagccccaagaaggacgtgctgagcctgagcggcctgagcagcgaccccgccgacctggacccctag

SEQ ID NO: 90295 - DNA, 6753 bp, Artificial Sequence
  derived and/or modified sequence
atggatgaagaggaggacggcgcaggcgccgaagagtctggtcagcctaggagtttcatgaggctgaatgacctgtctggcgctggtggccgacctggacccggtagcgctgagaaagatccgggctcagcagatagcgaagctgaggggcttccctatcccgccctggctccagtcgtcttcttttacctatcacaggactctcgacccaggagctggtgtctgcgcacggtctgcaatccttggtttgagagaattagcatgctggttatattgctgaactgtgtgacactgggaatgtttaggccgtgcgaggacattgcttgtgatagtcagcgttgcagaattctccaggctttcgatgacttcatttttgccttctttgctgtcgaaatggttgtcaaaatggtggccttggggattttcggaaagaagtgttacttgggagacacgtggaatcggctagatttttttatcgtcattgcgggtatgttggaatacagtttagacctgcaaaacgtgtcatttagcgccgtcagaaccgtgagggttcttcgcccccttagagctatcaacagggtgccaagcatgagaatcttagttaccttgcttttagacactttgcctatgttgggaaatgtgctcctactgtgtttttttgtgtttttcattttcggcatagttggcgtgcagctctgggccggtctgcttaggaataggtgtttcttgcctgagaactttagcttgcctctgagtgttgaccttgagcgatattaccaaacagaaaacgaagatgagagtccctttatttgtagccagcctcgtgaaaatggtatgagatcctgccgtagtgtgccgacactccggggcgacggcggcggcgggccgccatgcggtctggattacgaggcctataactcgtcttccaatacaacttgtgttaactggaatcaatattacacaaactgttcagctggtgagcataatccctttaaaggagccatcaattttgataatattggctacgcgtggattgctatctttcaggttattactctcgagggctgggtcgacattatgtatttcgtgatggacgcgcactctttctataacttcatatatttcattttacttatcatcgtggggtccttcttcatgataaacctctgtctggtagtcatcgcgacacagttcagcgagaccaaacagagagaatcccaactgatgagggaacagagagtgaggttcttgtcaaatgcctccacactggcttctttctctgagcccggctcctgttacgaagagctcctgaaataccttgtctatatcctgagaaaagctgcccgcaggctggctcaggtatcgagagcagccggcgttcgagtcggcctcctgagttccccagcccccctggggggccaagagacacaaccttcgtccagctgcagtcggtcacatcggcgcctgtctgttcaccacttggtgcaccaccaccatcatcaccaccatcactatcatctcggcaacgggacacttcgcgccccacgcgcctccccagaaattcaggatcgggacgccaacggatcacggagactgatgttgccccccccttctactcctgctctgtctggggctccccctggaggggcagagtcggttcacagcttttatcatgccgactgtcacctggagcccgtgcggtgccaggctccccctccaagaagcccaagcgaagcatcaggaaggaccgtcgggagtggcaaggtttatcccacggtacacacctcaccgcccccagaaaccctgaaggagaaggccctggtggaggttgctgcaagctctggtccaccaactctcacatctttgaacattcctccaggtccatattcttcgatgcacaaactgctggaaacgcagtctaccggcgcttgccagagcagctgcaagatatctagtccctgtttgaaggccgactctggtgcctgtggtccagatagctgtccatactgcgcgagggctggagccggcgaggtggaattggcagacagggagatgccagatagcgatagcgaggccgtgtacgagtttacccaggacgcacagcactccgacctccgcgatccccattccaggaggcagcgtagtctggggcccgatgctgagccttcttcggttctggctttctggcgtctcatttgtgacactttccgcaaaatagtggattcaaagtactttggacgtggaatcatgatcgcaatcctggtaaacacactgtcaatgggaattgagtatcacgaacagcccgaagaattgacgaatgctttggaaatcagtaacatagtctttactagcctatttgccttggagatgctcctcaagctgctcgtctacgggcccttcggatatatcaagaatccgtacaatatcttcgatggcgtgatcgtcgtgatcagcgtctgggagatcgttggccagcaaggtggcggtctctccgtcctgagaacatttcgcctcatgagggttctgaaacttgtgaggttcctgcccgctctgcagagacagcttgtggtgcttatgaagactatggacaatgtagccacattttgcatgctgttgatgctgttcatttttattttttctatattgggtatgcatctgttcggctgcaaatttgcctcagagcgagatggggacaccctgccagaccggaaaaacttcgactctttgctgtgggccattgtgacagtgttccagatactgacccaggaggactggaataaagtcttatataacggcatggcatcaacatctagttgggctgcactttatttcattgcactgatgacttttggcaactatgtcctgttcaacctgctcgtggctattctggtcgaaggtttccaagccgaggaaattagcaagagagaggacgcttcaggccaactctcctgcattcagttacctgtggatagtcagggcggagatgccaataagtccgagagtgaaccagatttttttagcccgagccttgacggtgacggcgatcgtaagaagtgcttggcattggtgtccttgggtgagcatcctgaactccggaagtctctactccctcccctgataatccacacagcggctactccaatgtccctgcccaagtctacgtccactggcctgggcgaggcactcgggcccgccagtagacgaacatccagttccggctctgccgaaccaggcgccgctcacgagatgaaaagcccaccctccgcaagatcatccccgcattccccttggtcagctgcctctagctggacttccaggaggagcagtcggaactcactggggagggccccctctttgaaacggaggtcacctagcggagagcgacgctccctgttatcaggtgaaggtcaggagagtcaagatgaagaggagagttctgaggaggagcgcgcaagcccggccggatccgaccatcgtcaccggggctcattggagagagaggcaaagtcttcatttgacctgcctgacacactgcaagtccccggccttcacaggaccgcaagcggacggggctctgctagcgagcaccaagactgcaatggcaagagtgcttcagggcgcctagcaagggccctgcgcccagacgatccacccctggacggagacgatgccgatgacgaaggcaatctttctaagggcgagagagtacgagcctggattcgcgcgaggctgcccgcttgctgtctagagcgagactcttggtccgcttatatctttcctcctcagtcaagatttaggctgctctgtcatcgtatcatcacacacaaaatgtttgaccacgtggtcctcgtgattatctttttgaactgtataacaattgccatggaacgtccaaagattgatccgcattcagccgaaagaatattccttaccttatcaaactatattttcaccgcggtatttctggcagaaatgacagtgaaggtggtggctctggggtggtgcttcggagagcaagcgtaccttcgttctagctggaatgtcctggatgggctactggtactgatttcagtcattgatatcttagtatccatggtgagtgattctggcacgaaaatcttaggcatgcttcgagttttgagacttctgaggaccctcagaccccttagagtgattagtcgcgcgcagggccttaagctcgtcgtagagacattaatgtcttccctcaagccaatcgggaacattgtggtgatttgctgcgctttcttcataatattcgggattctgggcgtccaactgttcaagggcaagtttttcgtgtgtcagggagaggataccagaaacataaccaacaaatccgattgcgccgaagctagttacaggtgggtgaggcacaaatacaatttcgacaatctcgggcaggcactgatgtccctgtttgtactcgccagcaaggatggctgggtagacatcatgtacgacggtcttgacgcagtaggcgtcgaccagcagaattttcataagtgtcgacaacatcaagaggaagaagaggccagacggcgggaagaaaaacggctgagacgcctggagaaaaagcgccggaacctgatgctcgacgatgtcattgctagcgggtctagcgcttctgccgccagtgaggcacaatgcaagccctattattctgattattctcggtttaggcttctggttcaccatctgtgcacctcccactacctcgatcttttcatcacgggggtgattggccttaacgttgttaccatggctatggaacactaccagcagccccagatcctagacgaggctttaaaaatctgcaattacatcttcaccgtaatttttgtcctcgaatctgttttcaagttggtcgctttcggctttcggcgcttctttcaggaccggtggaaccagttggatctagctatcgtgctgctgtccataatgggcatcactctggaagaaatcgaggtgaatgcttctctgcccatcaaccctaccattatcagaataatgagagttctgcggattgccagagtgctgaaactgttgaagatggcagtgggcatgagagctttactggacactgtgatgcaggcattaccacaggttgggaatctgggcctgctgtttatgctactgttctttatcttcgctgcccttggtgttgaactgttcggtgatctggagtgtgacgaaacccatccatgcgaaggcctgggacggcatgcgaccttcaggaactttgggatggccttcttaactctcttccgggtttccacaggggacaactggaacggtatcatgaaggacactctaagagactgcgatcaggagtctacatgttacaatactgtcatcagccccatttattttgtgagtttcgtactaacagcacagtttgttctggtgaacgtggtgatcgccgttctgatgaagcacctggaggagagtaacaaggaagccaaagaagaagcggagttggaagccgagctggagctcgaaatgaaaacattgagcccccagccacattctcctctgggttctccctttctttggccaggggttgaagggccggactcaccagactcgccaaagccgggagcgctgcaccccgccgcacacgctcgctctgcttctcatttttccctggaacaccctacgatgcagcctcaccccacagagctgccaggacccgatctgttaacagtgagaaagtccggagtctctaggacccatagcctccccaatgatagctacatgtgtcgccatgggagcacagcagaaggcccactaggacatagggggtggggactgccaaaagctcaatctgggagcgtactgtccgtccactctcagccagccgacacatcatatattttacaattacctaaggacgccccgcatttgctgcagccccattctgcccccacgtggggcaccattcctaagctgcctcctcctggtcgaagccccctggcccaaagacccttacggcggcaagctgcaatccgaactgacagcctagacgtgcagggcctgggcagtagggaggacctgctcgctgaagtgagcggcccttcccctcccctggctagagcctatagcttttggggccagtcctccactcaggctcagcaacattcccggtcacattccaagattagtaagcacatgactccgccagccccctgccccggccctgagccaaactggggcaaaggccctccagagacacgctcttccctcgaactagatacagagttatcctggatttctggggatctgctgccacctggcggccaagaggaacccccatccccaagggacctgaaaaaatgctacagcgtggaggcccagagctgccagcggcggccaacatcttggctcgatgagcagaggcgccattcaatcgctgtatcgtgcttggacagcggctctcagccgcacttggggaccgacccgagtaacctgggcggtcagcctcttgggggccctggcagtagaccgaagaagaagctctcccccccaagtatcaccatcgaccccccggagtctcagggccctcggaccccaccatccccaggcatttgcttgaggcgtcgcgctcctagttctgactcaaaagacccattagcctcgggtccgccggactctatggccgctagtccctcccctaagaaagatgttcttagcctttctgggctgtcctccgaccccgcggacctggacccctag

SEQ ID NO: 90296 - DNA, 6753 bp, Artificial Sequence
  derived and/or modified sequence
atggatgaggaggaggatggagctggagctgaggagagcggccagcccaggagcttcatgaggctgaatgacctgagcggggccggcggccggcccggccctggcagcgctgagaaggaccccggcagcgctgacagcgaggccgagggcctgccctacccagccctggcccctgtggtgttcttctacctgagccaggacagccggcccaggtcctggtgcctgaggacagtgtgcaacccctggtttgagcgcatctccatgctggtgatcctgctgaactgtgtgaccctgggcatgttccggccctgtgaagatattgcctgtgacagccagcgctgccgcatcctgcaggcctttgatgacttcatctttgccttctttgctgtggagatggtggtgaagatggtggccctgggcatctttgggaagaagtgctacctgggggacacctggaaccggctggacttcttcatcgtgattgctggcatgctggagtacagcctggacctgcagaatgtgtccttctctgctgtgaggacagtgcgggtgctgcggcccctgcgggccatcaacagagtgcccagcatgaggatcctggtgaccctgctgctggacaccctgcccatgctgggcaatgtgctgctgctgtgcttctttgtgttcttcatctttggaattgtgggcgtgcagctgtgggccggcctgctgaggaaccgctgcttcctgcctgagaacttcagcctgcccctgtctgtggacctggagcgctactaccagacagaaaatgaagatgagagccccttcatctgcagccagccccgggagaatggcatgaggagctgccgctctgtgcccaccctgcggggagatggcggcggcggccccccctgtggcctggactatgaggcctacaacagcagcagcaacaccacctgtgtgaactggaaccagtactacaccaactgcagcgctggggagcacaaccccttcaagggggccatcaactttgacaacatcggctacgcctggatcgccatcttccaggtgatcaccctggagggctgggtggacatcatgtactttgtgatggatgcccacagcttctacaacttcatctacttcatcctgctgatcatcgtgggcagcttcttcatgatcaacctgtgcctggtggtgattgccacccagttcagcgagaccaagcagcgggagagccagctgatgagggagcagagggtgcgcttcctgagcaatgccagcaccctggccagcttcagcgagcccggcagctgctatgaggagctgctgaagtacctggtgtacatcctgaggaaggccgcccggcggctggcccaggtgtccagagctgctggggtgcgggtgggcctgctgagcagccctgcccccctgggcggccaggagacccagcccagcagcagctgcagccgcagccaccggcggctgtctgtgcaccacctggtgcaccaccaccaccaccaccaccaccactaccacctgggcaatggcaccctgcgggccccccgggccagccctgagatccaggacagagatgccaacggcagccggcggctgatgctgcccccacccagcaccccagccctgagcggggcccctcctggaggagctgagagcgtgcacagcttctaccacgccgactgccacctggagcctgtgcgctgccaggcccccccacccaggagccccagcgaggccagcggccgcacagtgggcagcggcaaggtgtaccccaccgtgcacaccagccccccacctgagaccctgaaggagaaggccctggtggaggtggccgccagcagcggcccccccaccctgaccagcctgaacatccccccaggcccctacagctccatgcacaagctgctggagacccagagcactggagcctgccagagcagctgcaagatcagcagcccctgcctgaaggctgacagcggggcctgtggccctgacagctgcccctactgtgcccgggccggggccggggaggtggagctggccgaccgggagatgccagacagcgacagcgaggccgtgtatgagttcacccaggatgcccagcacagcgacctgcgggacccccacagccggcggcagaggagcctgggcccagatgctgagcccagctctgtgctggccttctggaggctcatctgtgacaccttcaggaagatcgtggacagcaagtacttcggccggggcatcatgattgccatcctggtgaacaccctgtccatgggcatcgagtaccacgagcagcctgaggagctgaccaatgccctggagatcagcaacatcgtgttcaccagcctgtttgccctggagatgctgctgaagctgctggtgtatggccccttcggctacatcaagaacccctacaacatctttgatggagtcatcgtggtgatctctgtgtgggagatcgtgggccagcagggcggcggcctgtctgtgctgcggaccttccggctgatgagggtgctgaagctggtgcgcttcctgcctgccctgcagaggcagctggtggtgctgatgaagaccatggacaacgtggccaccttctgcatgctgctgatgctgttcatcttcatcttcagcatcctgggcatgcacctgtttggctgcaagtttgccagcgagagagatggagacaccctgcctgacaggaagaactttgacagcctgctgtgggccatcgtgacagtgttccagatcctgacccaggaggactggaacaaggtgctgtacaacggcatggccagcaccagctcctgggccgccctgtacttcatcgccctgatgaccttcggcaactacgtgctcttcaacctgctggtggccatcctggtggagggcttccaggccgaggagatcagcaagcgggaggatgccagcggccagctgagctgcatccagctgcctgtggacagccagggcggagatgccaacaagtctgagagcgagccagacttcttcagccccagcctggatggagatggagacaggaagaagtgcctggccctggtgtccctgggggagcaccctgagctgaggaagagcctgctgcccccactcatcatccacacagctgccacccccatgagcctgcccaagagcaccagcacaggcctgggggaggccctgggccctgccagcaggaggaccagcagcagcggcagcgctgagcctggagctgcccacgagatgaagagcccccccagcgcccggagcagcccccacagcccctggagcgctgccagctcctggaccagccgccgcagcagcaggaacagcctgggccgggcccccagcctgaagagaagaagccccagcggggagcggcgcagcctgctgtctggagagggccaggagagccaggatgaggaggagagcagcgaggaggagcgggccagccctgctggcagtgaccaccgccaccggggcagcctggagcgggaggccaagagcagctttgacctgcctgacaccctgcaggtgcccggcctgcacaggacagccagcggccggggcagcgccagcgagcaccaggactgcaatggcaagagcgccagcggccgcctggcccgggccctgcggccagatgatcctcccctggatggagatgatgctgatgatgagggcaacctgagcaagggggagcgggtgcgggcctggatccgggcccggctgcctgcctgctgcctggagcgggacagctggagcgcctacatcttccccccccagagccgcttccggctgctgtgccaccgcatcatcacccacaagatgtttgaccacgtggtgctggtgatcatcttcctgaactgcatcaccatcgccatggagcggcccaagattgacccccacagcgctgagcgcatcttcctgaccctgagcaactacatcttcaccgctgtgttcctggccgagatgacagtgaaggtggtggccctgggctggtgcttcggggagcaggcctacctgcggagctcctggaatgtgctggatggcctgctggtgctgatctctgtgattgacatcctggtgtccatggtgtctgattctggcaccaagatcctgggcatgctgcgggtgctgcggctgctgcggaccctgcggcccctgcgggtcatcagccgggcccagggcctgaagctggtggtggagaccctgatgagcagcctgaagcccatcggcaacatcgtggtgatctgctgtgccttcttcatcatcttcggcatcctgggcgtgcagctgttcaagggcaagttctttgtgtgccagggcgaggacaccaggaacatcaccaacaagagtgactgtgccgaggccagctaccgctgggtgcgccacaagtacaactttgacaacctgggccaggccctgatgagcctgtttgtgctggccagcaaggatggctgggtggacatcatgtatgatggcctggatgctgtgggcgtggaccagcagaacttccacaagtgccggcagcaccaggaggaggaggaggcccggcggcgggaggagaagaggctgcggcggctggagaagaagagaagaaacctgatgctggatgatgtgattgccagcggcagcagcgccagcgctgccagcgaggcccagtgcaagccctactacagcgactacagccgcttccggctgctggtgcaccacctgtgcaccagccactacctggacctcttcatcaccggggtgattggcctgaatgtggtgaccatggccatggagcactaccagcagccccagatcctggatgaggccctgaagatctgcaactacatcttcaccgtcatctttgtgctggagagcgtcttcaagctggtggccttcggcttccgccgcttcttccaggaccgctggaaccagctggacctggccatcgtgctgctgagcatcatgggcatcaccctggaggagattgaggtgaatgccagcctgcccatcaaccccaccatcatccgcatcatgagggtgctgcgcatcgcccgggtgctgaagctgctgaagatggctgtgggcatgagggccctgctggacacagtgatgcaggccctgccccaggtgggcaacctgggcctgctcttcatgctgctcttcttcatctttgctgccctgggcgtggagctgtttggagacctggagtgtgatgagacccacccctgtgagggcctgggcagacatgccaccttcaggaactttggcatggccttcctgaccctcttccgggtgtccactggagacaactggaatggcatcatgaaggacaccctgcgggactgtgaccaggagagcacctgctacaacacagtcatcagccccatctactttgtgtcctttgtgctgacagcccagtttgtgctggtgaatgtggtgattgctgtgctgatgaagcacctggaggagagcaacaaggaggccaaggaggaggccgagctggaggccgagctggagctggagatgaagaccctgagcccccagccccacagccccctgggcagccccttcctgtggccaggagtggagggccctgacagcccagacagccccaagccaggggccctgcaccctgctgcccacgcccggagcgccagccacttcagcctggagcaccccaccatgcagccccaccccacagagctgcccggccctgacctgctgactgtgaggaagagcggcgtgtccaggacccacagcctgcccaatgacagctacatgtgcagacatggcagcacagctgagggccccctgggccaccggggctggggcctgcccaaggcccagagcggctctgtgctgtctgtgcacagccagcctgctgacaccagctacatcctgcagctgcccaaggatgccccccacctgctgcagccccacagcgcccccacctggggcaccatccccaagctgcccccacctggccgcagccccctggcccagaggcccctgcggcggcaggccgccatcagaacagacagcctggatgtgcagggcctgggcagccgggaggacctgctggccgaggtgtctggccccagcccccccctggcccgggcctacagcttctggggccagagcagcacccaggcccagcagcacagccgcagccacagcaagatcagcaagcacatgaccccaccagccccctgccccggccctgagcccaactggggcaaaggacctcctgagaccaggagcagcctggagctggacacagagctgtcctggatcagcggggacctgctgcccccaggcggccaggaggagccccccagcccccgggacctgaagaagtgctacagcgtggaggcccagagctgccagaggcggcccacctcctggctggatgagcagaggaggcacagcattgctgtgtcctgcctggacagcggcagccagccccacctgggcacagaccccagcaacctgggcggccagcccctgggcggccctggcagccggcccaagaagaagctgagccccccatccatcaccatcgaccccccagagagccagggccccaggaccccacccagccctggcatctgcctgcggcggcgggcccccagcagtgacagcaaggaccccctggccagcggccccccagacagcatggccgccagccccagccccaagaaggatgtgctgagcctgagcggcctgagcagtgaccctgctgacctggacccctag

SEQ ID NO: 90297 - DNA, 6753 bp, Artificial Sequence
  derived and/or modified sequence
atggacgaggaggaggacggcgccggcgccgaggagagcggccagcctaggtcattcatgagactgaacgacctgtctggagccggcggcagaccaggtcctggttcagcagaaaaggatcccggcagcgccgactctgaggccgaggggctgccttaccctgcattagcccccgtcgtcttcttttatttatcacaagactccagacctcgaagttggtgtcttcggacggtgtgtaatccctggtttgagcgcatttcaatgctggtgattctcctgaactgtgtaaccctcgggatgttcaggccgtgcgaagacattgcttgtgatagccagcgctgtaggatcctgcaggccttcgacgatttcatttttgctttctttgccgtggagatggtagtgaaaatggtggccctgggcatcttcgggaaaaagtgctacttgggcgacacctggaacaggttggacttcttcatcgtgatcgcaggaatgttagagtattcgttggatttgcagaacgtctccttcagcgcagtacgcacggttagggtgctgagacccctcagagcgataaatcgagtcccatccatgcggattttagtaactctacttcttgatacactgcccatgcttggcaatgttcttctgctctgcttcttcgtcttcttcattttcggaattgttggtgtgcagctgtgggcaggcctcttgcggaaccgttgctttctccctgaaaatttctcactccccctgagtgttgatcttgaacgctactatcaaacagagaacgaagacgagagcccgtttatttgcagtcagccccgcgagaacggtatgaggagctgtcgatctgtccctaccctgcgcggtgacggtggaggaggaccaccctgcggcttagattacgaggcatataacagtagcagcaatactacttgcgtcaactggaaccaatactacactaattgttctgcaggtgaacacaatccgttcaaaggcgccatcaactttgataacatcggttatgcttggatagccatcttccaggtcatcactcttgagggatgggtagacattatgtacttcgtcatggatgcccactccttctacaacttcatctactttatcctcttaatcattgtcggctcattttttatgatcaatttatgcctggtcgtgatcgctacacagttttccgaaaccaagcagagagagtcacaacttatgcgtgaacaacgggttaggtttctctccaacgccagcaccctggctagcttcagcgagcctggctcatgctatgaggagctcctgaaatacttggtgtatattctgcgcaaagctgcacgtcggctcgctcaagtatcgcgagctgccggtgtccgcgtgggtctgctctccagccccgcgcctttaggcggacaggagacacagccctcaagctcctgctcacggtctcatcgtcgcctgtcagtgcatcacctggtgcatcatcaccatcaccaccaccatcattatcatcttggaaacggtacactcagggctccccgggcctcccccgagatccaagaccgggatgctaatggctccaggaggctgatgctgcctcctcctagtacgccggctctttccggtgcgccgcccgggggggcagagtcagtgcattccttctaccatgccgattgtcatctcgaaccagtcagatgccaggctcctcctcccagatcccctagtgaagcttccggacggactgtcggtagtggcaaagtgtatcccacagtgcatacatctccccctcccgaaaccttgaaggagaaagcactggtggaggtcgcagcctctagcgggcctcctacactgacgagcctgaatatcccccctggcccctacagtagtatgcataagcttctggaaacccagagtacaggggcatgccaatcctcatgtaaaataagcagcccttgtctgaaggctgactctggcgcatgtggaccggacagttgcccttattgtgcaagggcgggggcaggcgaggtggaactcgctgaccgggaaatgcccgacagcgactccgaggccgtttacgagttcactcaggatgcccagcactcagacttgcgagacccacatagccgaaggcagaggagtctgggacctgacgccgagcccagcagcgtgctcgctttctggcggctaatctgtgacactttcagaaagatagtcgactctaagtactttggtcgagggatcatgattgcaatccttgtgaacactctgtcaatgggcatagaatatcatgagcaacctgaagagttgaccaatgcactggaaatatcaaacatcgtcttcaccagtttgttcgcccttgagatgctcttaaagctgctcgtatatgggcccttcggatatattaaaaatccatacaacattttcgatggagtgattgtggtgataagcgtgtgggagatcgtaggccaacagggtggagggctgagtgtactccgcacattccggctgatgagggtcctaaagctagtgcgatttctgcccgctctccagcgacagctcgttgtcctgatgaagacgatggataatgtggccacgttctgtatgctcctcatgctttttatcttcatcttttctatcctgggtatgcatctgtttggatgcaaattcgcctctgaaagggacggagacacacttccggatcgaaagaactttgacagtctactctgggccattgtcactgtttttcaaattcttactcaggaggactggaacaaggtgctctacaacggcatggcctctacatcttcctgggccgcactctacttcatcgccctgatgaccttcggaaactatgttttgttcaacctactggtggccatccttgtagaggggttccaagccgaggaaatcagcaagcgagaggacgcgtccggccaactcagttgcatccaactgccagtcgacagccaggggggcgacgcgaataagagcgagtcagaaccagacttcttctctccatctctcgatggggatggtgacaggaagaaatgtctcgccttggtttccctgggcgaacaccctgagctcagaaagagtttactccctccattgatcatccatactgctgctacacccatgagtctgccaaagagcactagcactggactcggggaagccctcggccccgcgtcccgcaggaccagcagttcgggaagtgcggagcctggcgccgcccacgagatgaagtcacccccttcggctcggagctccccccattctccttggagcgccgcatcaagctggacttctcggagatcaagtagaaactctctcggcagggctccatctctgaaaagacgtagccccagtggcgagcgtcgttcactgctgagcggtgaaggtcaagagagccaggatgaggaggagtcaagcgaggaggagcgtgccagccccgctgggagtgaccatcggcacagaggctccctcgaacgcgaagcaaagagcagctttgacctccccgataccctgcaggtcccagggctgcaccgtacagcgtcagggcgcggatcggcttccgagcatcaggattgtaatggcaaatcggcttccggacgtctcgccagggcactgagacccgatgaccccccactggatggtgacgatgctgacgatgaaggtaatctgtccaagggtgagcgggttagagcttggattcgagccaggctaccagcttgctgccttgaacgcgactcctggtccgcatacatcttccccccacagtccaggtttagactactgtgtcatcgcatcatcacccataagatgtttgatcatgtggtgcttgtcattatttttctcaactgtattaccatagccatggaacggccaaagattgatccacactcagccgagcgaatcttcctaacgctgagtaactacattttcaccgccgtatttctggcggaaatgaccgtgaaggtggtggcccttgggtggtgtttcggagagcaagcttaccttaggtcctcctggaacgtgcttgatggtcttttagtcttaattagtgtgatcgatatcctggtgagcatggtttcagactcagggactaagattctagggatgcttagagttctccgactgctgagaacgctgcggcctctgagggtcatatctagagcccaggggctgaaactggtagtggaaaccctgatgagttcactgaaacctattggaaatatcgtggttatctgttgtgccttctttataatatttggaatcctgggcgtgcagttatttaaaggtaaattttttgtatgccagggcgaagatacacgcaatatcacaaacaagtctgattgcgctgaagcaagctacaggtgggtgcggcacaagtacaacttcgacaacctcggtcaggcactcatgtctcttttcgtcctggcgagcaaggatgggtgggtcgatattatgtatgatggactagacgcagtcggcgtcgatcagcagaacttccacaaatgcaggcagcaccaggaagaagaggaggccagacgaagggaagagaagcgtttgcggcggctggagaagaagcgtcgaaatctgatgcttgatgacgtgattgcatcagggtcttcggccagcgccgcgtccgaggcacagtgtaaaccatactactcagactactcaaggtttcgtctactcgtgcaccacttatgcacctcccattatcttgacttgtttattaccggagtcattgggctcaacgtcgtgacgatggctatggaacactatcagcagccccagatcttagacgaagcactgaaaatctgtaactacatctttacagttatctttgtcctggagtccgttttcaagttagttgcctttggatttaggcgcttcttccaggatcggtggaaccagctggacctcgcaatcgtgctgctgagtatcatgggaattacgctggaggagattgaggtcaatgccagccttcccattaatcccaccatcattcgtatcatgagggtcctgcgtatcgctcgggtgctgaagctacttaaaatggcagttgggatgagagcactcttagacactgttatgcaggcactgcctcaggtgggaaatctcgggctgctatttatgctgttgttcttcattttcgcagccttgggagtggaactgtttggtgatcttgagtgtgacgaaacacatccatgcgaaggactgggacgtcacgctacctttaggaattttgggatggctttcctgactctgttccgcgtcagtactggcgataattggaacggaatcatgaaggacactctcagagattgtgaccaggaatcaacctgttataacaccgtgatctccccaatttactttgtgtccttcgtgctgacagcccaattcgtccttgtgaatgttgtcatcgctgtgctaatgaagcatctcgaggagtcaaacaaggaagcgaaggaagaggcagagctcgaggccgaactggagctggagatgaagacactgagcccccaaccccactcaccactaggctctccgttcctttggcctggagtggagggtcctgactcaccagattccccgaaacctggcgcccttcaccccgcggcacacgctaggagcgcttctcattttagcttggaacatcctaccatgcagccgcatcccacagagctgccgggacctgatttactaactgtccgaaaaagcggcgtgagtcggacccacagcttaccaaatgacagttatatgtgtcgccacggatctactgctgagggtcccctgggacatagagggtggggactgcccaaggcccagtccggttcagtcctaagcgttcactcccagcccgcagacactagctatattctccagctcccaaaggatgccccgcatttactgcagccccacagcgcaccaacatggggcaccattcccaaactgcccccgcccggaagaagtccattggctcaacgcccacttaggcgccaggcagcaatccgtactgattctctggatgtccaggggctgggctctagagaagatctgctcgccgaagttagtggcccaagccccccacttgcacgtgcatatagcttctggggtcagagctcaacccaggcacagcagcactcccggtcgcatagcaaaatttcgaagcatatgacgccgcctgcaccgtgtcccgggcctgagccaaactggggtaaaggtccgccagaaaccaggtcttccctggaactcgacacagaactcagctggatttcaggcgacttattgcccccgggcggccaagaggagccgcctagcccacgcgatctgaagaaatgttactctgtagaagcccagagctgtcagagacgaccgacctcctggctcgacgaacagcggagacactccatagcggtgtcatgcctggatagcggcagtcagcctcacctgggtaccgaccccagtaacctcggagggcaacccctaggcgggcccggctctcgaccgaaaaaaaagctgtcccccccgtccataacaatcgacccacccgaatctcaaggcccccgcacacctccaagtcccgggatctgcctcaggcgtcgcgccccaagcagcgactccaaagaccccctggcaagcggacccccagattcaatggcagcatccccatctcccaagaaagatgtgctgtctctttccggcctctcttcagaccctgcagatctcgatccctag

SEQ ID NO: 90298 - DNA, 6752 bp, Artificial Sequence
  derived and/or modified sequence
atggatgaggaggaagacggggctggcgcagaagaatccggccagccaaggtccttcatgcgtctcaacgatctcagtggtgccggagggcgacccggaccgggaagtgcagagaaggatccaggatccgctgatagtgaagctgagggtctcccataccccgctctggccccagttgtattcttctatctaagccaggattcgcgaccccgttcgtggtgcctcagaacagtgtgcaacccctggtttgaacgaatcagcatgctcgtgatccttcttaactgtgtgaccctggggatgtttcgcccttgcgaggacatagcctgtgactcacaaagatgtcgcattctccaggcatttgatgactttatcttcgctttcttcgcagttgagatggttgtgaagatggtggcattagggatttttggcaagaaatgttacctgggcgacacatggaatagactagacttctttattgtcatcgccggaatgctggagtacagtctcgacctgcagaatgtgtcattttccgccgtgcggaccgttcgagtcctgcgcccactcagggccatcaaccgagtgcccagcatgcgaattctggtgaccctgttgctggacaccctcccgatgttaggtaatgtgctgctcctgtgtttcttcgtgttctttatctttggaatcgtaggggtgcaattgtgggctggtctcctcagaaatcgctgtttccttccagaaaacttcagtctgcctctgagcgttgacctcgagaggtattatcagaccgagaatgaagatgagtctccatttatatgcagccagcccagagaaaatgggatgcgcagctgtaggtcagtgccaaccctgcgcggagacggaggcggtggaccaccgtgtgggctggactatgaggcctataattccagttccaataccacttgtgtaaactggaatcagtactatactaattgctcagccggtgagcacaacccattcaaaggggctataaatttcgataatatcggctatgcctggatcgccattttccaggtgataactctggaggggtgggtcgatatcatgtacttcgtgatggatgcacacagcttctacaattttatttactttatcctacttatcatcgtgggctctttttttatgattaacctgtgcctggtggtgattgccactcaattttctgagactaagcagcgggaaagccaattgatgcgcgagcagagagttcgtttcttatctaatgctagtactctggcatctttttctgaacctggaagttgctacgaagagctgctcaaatacctggtatacatcttacgcaaggcagcgaggcggctagctcaggtgagtagagcggcaggcgtgcgtgtggggctgttgtccagtcctgctccgttagggggtcaagagactcagccatccagcagctgttcccggtctcaccgccgactcagtgtgcaccacttggtccaccatcatcaccatcatcatcatcattaccatctgggaaacgggacattgagagcaccaagggcatctccagaaattcaggatcgagatgccaacggctcccgtagacttatgctgccccctccctccacccccgctctgtcgggggctccccctgggggtgccgagtcggtgcactcattctaccacgccgactgccacctagagcctgtcaggtgtcaggccccacctccccgtagtccttctgaagcgagcggacgaacggtcggatccggcaaggtttaccccaccgtgcacacaagcccgccacctgagaccctcaaggaaaaggcattagtcgaagtggcagcaagttcaggaccccctaccctgacgagcctgaatatcccgccaggcccttattcttcaatgcataagttactggaaacgcagtccaccggagcttgtcagagttcctgcaaaatttcctctccttgtttgaaggccgacagcggcgcttgcggtcccgattcttgcccttactgcgcaagagccggagccggagaagtcgagctggctgacagggagatgccagatagtgactccgaagcagtctacgagttcactcaagacgcccagcattccgacctccgggatccccactcaagaaggcagagaagtctgggcccagatgcggagccttctagcgtgttggccttctggcgcctgatctgcgatactttcaggaagattgtcgatagtaaatactttgggagaggcatcatgatcgcgattctcgtgaacaccctgtccatgggtattgaatatcacgaacaacctgaagaactgaccaacgctttggaaatcagcaacatagtcttcacctctctgtttgcattggaaatgctcctgaagctcctggtgtacggcccatttggctacatcaaaaacccctataacatcttcgatggagtgatcgtcgtaatatcggtgtgggaaattgtgggacagcaagggggtggtctgtctgttctaagaacatttaggctgatgcgcgtcctgaaactggtacggttcctacccgctctgcagagacaactggttgttctgatgaaaactatggataatgtggccaccttctgcatgctccttatgctctttatcttcatcttttccattctgggaatgcatctgttcggatgtaaattcgcttcagaacgggacggagatacactacccgacaggaagaacttcgattccctcttatgggccatcgttacagtcttccagattttgacacaggaggactggaacaaggtgctctataatggaatggcctccacctctagctgggcagcactgtattttattgcactcatgacattcgggaactatgtgctgtttaacctgctcgtcgccatccttgtggaggggtttcaggcagaagaaatttccaagagagaggatgcatctgggcagctgtcatgcattcagctcccggttgattcgcagggaggggacgccaacaagtccgagtccgagccagattttttttccccatcccttgacggtgacggcgataggaaaaagtgcctcgccctggtgagtttgggggaacatccagaactacggaagtcccttctcccaccactgattatacacactgctgccacacctatgagcctcccaaaatctacgtccaccggcctgggcgaagccctggggccagccagtcggcgaacctccagctccgggagcgccgagcctggagccgcacacgaaatgaagtcccctcctagcgctagaagctccccgcattctccatggtccgctgcttcatcctggacctcccggaggtcctcccggaactccctgggcagggctccctcccttaagcgtcgctccccatcaggtgaacggagatccctcctgtcaggggagggacaggaatctcaggatgaagaggaaagtagtgaggaggaacgggcttcccccgctggcagcgatcaccgccatcgtggcagtttagagcgcgaagcgaagtcctcctttgatctgcctgataccctccaggtccccggtcttcacagaaccgcctccggcagagggtctgcctcagagcatcaggactgtaacggaaagtccgcctcgggtcggctcgccagagcgctgcgaccagatgatccccctctcgatggggatgatgctgacgacgagggcaatctatctaagggcgagagggtgcgagcctggatccgcgcacgtctgcccgcatgctgtttggaacgcgacagctggtctgcgtatatcttcccccctcagtcgcggtttaggctgttatgccatagaataattacacacaagatgtttgaccatgtggttctggttattatcttcctcaattgtattactattgccatggaacggcctaaaattgacccacactcagccgagagaattttcctaacactgtctaactatattttcacagctgtgttcctggctgaaatgacagtcaaagttgtagctctggggtggtgcttcggagagcaggcctatctgaggagcagctggaatgtgctggatggactgcttgttcttatttccgtcattgacatacttgtcagtatggtgtctgactccgggactaagatcctcggtatgttgcgcgtcttgaggttactcagaacgttgaggccgctacgtgtgataagccgagcccagggattaaagctcgttgtcgagacccttatgtcatcactgaaacctatcggcaatatagtcgtgatttgctgtgcatttttcataatatttggtattttgggcgtgcaactgttcaaggggaaatttttcgtgtgccagggggaagacacacggaatataacgaacaagtccgattgtgcggaggccagctatagatgggtgaggcataaatacaactttgacaaccttggccaggccttgatgtctttgttcgtcctggcctcaaaagatgggtgggtggatataatgtatgacgggctggatgctgttggagttgatcaacagaatttccacaagtgccgacagcaccaggaagaggaagaagcacgaaggagagaagagaagaggctgcgacgcctagagaaaaagcgtcgcaaccttatgttagatgatgtcatcgccagcggctctagcgcgtctgccgcatctgaggcgcagtgtaagccttactattctgactacagccgcttcagactgctagtgcaccatttgtgcacctctcattacttggatctctttattaccggagtgattggactgaatgttgtgacgatggccatggaacattaccagcagccacaaattctggacgaagcactgaaaatctgtaactatatcttcaccgtgattttcgttctcgagtctgtttttaagctggtggcgtttgggttccggaggtttttccaagaccgctggaatcagcttgacctggcaatcgtcctcctgagcattatgggaattactctggaagagatcgaggtaaacgcgtcactgcccattaatccgacaataataagaatcatgcgggtacttagaatagccagagtgctgaagctactgaagatggcagtaggcatgagagccttactggacacagtgatgcaggcgctccctcaggtggggaatctcgggctactttttatgctgctcttttttattttcgccgctctcggtgttgaactcttcggcgacctggaatgtgatgaaacccacccctgcgaggggctcggacgacacgccaccttccgaaatttcggcatggcatttcttaccctgtttagggtttccaccggcgataattggaacggcataatgaaagacactctacgagattgcgaccaggagtcaacgtgctataacactgttatttcccctatctacttcgtctccttcgtactgacggcacagtttgtattggtgaatgtggtgattgctgtgctcatgaagcatctggaggaaagcaataaagaggctaaggaggaagccgaactagaggctgagctggaactggagatgaagaccctgtccccacagccccacagccctctcgggagtcctttcctttggcccggagtggagggtcccgacagccctgactcgccaaaacctggtgcactgcaccctgctgcacacgcccgaagtgcctcccatttctcactcgagcatccaaccatgcagcctcaccctaccgaattaccaggaccagatctgctaacggtgcggaagtcgggggtgagccgaacgcattctcttccgaacgactcctacatgtgccggcatgggtccactgcagagggtcccctggggcatcggggttggggactgccaaaagcacagagtggctctgtactctctgtacatagtcaacctgctgatacttcctacatactacagctcccaaaagacgcacctcatttactacagccacatagcgctccaacctgggggaccattcccaaacttcctcctccaggcaggtcccccttagctcagagacctcttcgtagacaggcggcaatccggaccgatagtcttgacgtgcaggggctgggatccagagaggaccttttggcggaggtgagcgggcctagcccgccattggcacgcgcttactcattctgggggcaaagctctactcaagcacagcagcacagtcgctcccatagtaaaatttccaagcacatgacccccccagccccatgtccaggtccagaaccaaactggggaaaagggcctcctgagacacgcagttccctggagctggatacagagctctcctggatctccggggacctcttacctcccggaggccaggaggagcccccatctcccagagacttgaaaaagtgctattctgtggaagcccagagttgtcagcggaggcccacatcttggctcgacgaacagcggaggcattcaatcgccgtgtcatgtcttgattccggctcccagcctcacttgggaaccgaccccagtaacctggggggtcagcctctgggtgggcctggcagtcgcccaaagaagaagctgtccccacctagcatcacaatcgatcccccagagagccaagggcctagaaccccaccttctccgggtatctgtttacgccgtagggctccctcctccgatagcaaggacccattggcttctggccctccggatagtatggctgcctccccttcccctaagaaggacgtgttgtctttatcgggtctctccagtgatcccgcagacctggacccata

SEQ ID NO: 90299 - DNA, 6768 bp, Artificial Sequence
  derived and/or modified sequence
atggacgaggaggaggatggagcgggcgccgaggagtcgggacagccccggagcttcatgcggctcaacgacctgtcgggggccgggggccggccggggccggggtcagcagaaaaggacccgggcagcgcggactccgaggcggaggggctgccgtacccggcgctggccccggtggttttcttctacttgagccaggacagccgcccgcggagctggtgtctccgcacggtctgtaacccctggtttgagcgcatcagcatgttggtcatccttctcaactgcgtgaccctgggcatgttccggccatgcgaggacatcgcctgtgactcccagcgctgccggatcctgcaggcctttgatgacttcatctttgccttctttgccgtggagatggtggtgaagatggtggccttgggcatctttgggaaaaagtgttacctgggagacacttggaaccggcttgactttttcatcgtcatcgcagggatgctggagtactcgctggacctgcagaacgtcagcttctcagctgtcaggacagtccgtgtgctgcgaccgctcagggccattaaccgggtgcccagcatgcgcatccttgtcacgttgctgctggatacgctgcccatgctgggcaacgtcctgctgctctgcttcttcgtcttcttcatcttcggcatcgtcggcgtccagctgtgggcagggctgcttcggaaccgatgcttcctacctgagaatttcagcctccccctgagcgtggacctggagcgctattaccagacagagaacgaggatgagagccccttcatctgctcccagccacgcgagaacggcatgcggtcctgcagaagcgtgcccacgctgcgcggggacgggggcggtggcccaccttgcggtctggactatgaggcctacaacagctccagcaacaccacctgtgtcaactggaaccagtactacaccaactgctcagcgggggagcacaaccccttcaagggcgccatcaactttgacaacattggctatgcctggatcgccatcttccaggtcatcacgctggagggctgggtcgacatcatgtactttgtgatggatgctcattccttctacaatttcatctacttcatcctcctcatcatcgtgggctccttcttcatgatcaacctgtgcctggtggtgattgccacgcagttctcagagaccaagcagcgggaaagccagctgatgcgggagcagcgtgtgcggttcctgtccaacgccagcaccctggctagcttctctgagcccggcagctgctatgaggagctgctcaagtacctggtgtacatccttcgtaaggcagcccgcaggctggctcaggtctctcgggcagcaggtgtgcgggttgggctgctcagcagcccagcacccctcgggggccaggagacccagcccagcagcagctgctctcgctcccaccgccgcctatccgtccaccacctggtgcaccaccaccaccaccatcaccaccactaccacctgggcaatgggacgctcagggccccccgggccagcccggagatccaggacagggatgccaatgggtcccgccggctcatgctgccaccaccctcgacgcctgccctctccggggccccccctggtggcgcagagtctgtgcacagcttctaccatgccgactgccacttagagccagtccgctgccaggcgccccctcccaggtccccatctgaggcatccggcaggactgtgggcagcgggaaggtgtatcccaccgtgcacaccagccctccaccggagacgctgaaggagaaggcactagtagaggtggctgccagctctgggcccccaaccctcaccagcctcaacatcccacccgggccctacagctccatgcacaagctgctggagacacagagtacaggtgcctgccaaagctcttgcaagatctccagcccttgcttgaaagcagacagtggagcctgtggtccagacagctgcccctactgtgcccgggccggggcaggggaggtggagctcgccgaccgtgaaatgcctgactcagacagcgaggcagtttatgagttcacacaggatgcccagcacagcgacctccgggacccccacagccggcggcaacggagcctgggcccagatgcagagcccagctctgtgctggccttctggaggctaatctgtgacaccttccgaaagattgtggacagcaagtactttggccggggaatcatgatcgccatcctggtcaacacactcagcatgggcatcgaataccacgagcagcccgaggagcttaccaacgccctagaaatcagcaacatcgtcttcaccagcctctttgccctggagatgctgctgaagctgcttgtgtatggtccctttggctacatcaagaatccctacaacatcttcgatggtgtcattgtggtcatcagcgtgtgggagatcgtgggccagcaggggggcggcctgtcggtgctgcggaccttccgcctgatgcgtgtgctgaagctggtgcgcttcctgccggcgctgcagcggcagctggtggtgctcatgaagaccatggacaacgtggccaccttctgcatgctgcttatgctcttcatcttcatcttcagcatcctgggcatgcatctcttcggctgcaagtttgcctctgagcgggatggggacaccctgccagaccggaagaattttgactccttgctctgggccatcgtcactgtctttcagatcctgacccaggaggactggaacaaagtcctctacaatggtatggcctccacgtcgtcctgggcggccctttatttcattgccctcatgaccttcggcaactacgtgctcttcaatttgctggtcgccattctggtggagggcttccaggcggaggaaatcagcaaacgggaagatgcgagtggacagttaagctgtattcagctgcctgtcgactcccaggggggagatgccaacaagtccgaatcagagcccgatttcttctcacccagcctggatggtgatggggacaggaagaagtgcttggccttggtgtccctgggagagcacccggagctgcggaagagcctgctgccgcctctcatcatccacacggccgccacacccatgtcgctgcccaagagcaccagcacgggcctgggcgaggcgctgggccctgcgtcgcgccgcaccagcagcagcgggtcggcagagcctggggcggcccacgagatgaagtcaccgcccagcgcccgcagctctccgcacagcccctggagcgctgcaagcagctggaccagcaggcgctccagccggaacagcctcggccgtgcacccagcctgaagcggagaagcccaagtggagagcggcggtccctgttgtcgggagaaggccaggagagccaggatgaagaggagagctcagaagaggagcgggccagccctgcgggcagtgaccatcgccacagggggtccctggagcgggaggccaagagttcctttgacctgccagacacactgcaggtgccagggctgcatcgcactgccagtggccgagggtctgcttctgagcaccaggactgcaatggcaagtcggcttcagggcgcctggcccgggccctgcggcctgatgaccccccactggatggggatgacgccgatgacgagggcaacctgagcaaaggggaacgggtccgcgcgtggatccgagcccgactccctgcctgctgcctcgagcgagactcctggtcagcctacatcttccctcctcagtccaggttccgcctcctgtgtcaccggatcatcacccacaagatgttcgaccacgtggtccttgtcatcatcttccttaactgcatcaccatcgccatggagcgccccaaaattgacccccacagcgctgaacgcatcttcctgaccctctccaattacatcttcaccgcagtctttctggctgaaatgacagtgaaggtggtggcactgggctggtgcttcggggagcaggcgtacctgcggagcagttggaacgtgctggacgggctgttggtgctcatctccgtcatcgacattctggtgtccatggtctctgacagcggcaccaagatcctgggcatgctgagggtgctgcggctgctgcggaccctgcgcccgctcagggtgatcagccgggcgcaggggctgaagctggtggtggagacgctgatgtcctcactgaaacccatcggcaacattgtagtcatctgctgtgccttcttcatcattttcggcatcttgggggtgcagctcttcaaagggaagtttttcgtgtgccagggcgaggataccaggaacatcaccaataaatcggactgtgccgaggccagttaccggtgggtccggcacaagtacaactttgacaaccttggccaggccctgatgtccctgttcgttttggcctccaaggatggttgggtggacatcatgtacgatgggctggatgctgtgggcgtggaccagcagaacttccacaagtgtcggcagcaccaggaggaagaggaggcccggcggcgggaggagaagcgcctacgaagactggagaaaaagagaaggaatctaatgctggacgatgtaattgcttccggcagctcagccagcgctgcgtcagaagcccagtgcaaaccttactactccgactactcccgcttccggctcctcgtccaccacttgtgcaccagccactacctggacctcttcatcacaggtgtcatcgggctgaacgtggtcaccatggccatggagcactaccagcagccccagattctggatgaggctctgaagatctgcaactacatcttcactgtcatctttgtcttggagtcagttttcaaacttgtggcctttggtttccgtcggttcttccaggacaggtggaaccagctggacctggccattgtgctgctgtccatcatgggcatcacgctggaggaaatcgaggtcaacgcctcgctgcccatcaaccccaccatcatccgcatcatgagggtgctgcgcattgcccgagtgctgaagctgctgaagatggctgtgggcatgcgggcgctgctggacacggtgatgcaggccctgccccaggtggggaacctgggacttctcttcatgttgttgtttttcatctttgcagctctgggcgtggagctctttggagacctggagtgtgacgagacacacccctgtgagggcctgggccgtcatgccacctttcggaactttggcatggccttcctaaccctcttccgagtctccacaggtgacaattggaatggcattatgaaggacaccctccgggactgtgaccaggagtccacctgctacaacacggtcatctcgcctatctactttgtgtccttcgtgctgacggcccagttcgtgctagtcaacgtggtgatcgccgtgctgatgaagcacctggaggagagcaacaaggaggccaaggaggaggccgagctagaggctgagctggagctggagatgaagaccctcagcccccagccccactcgccactgggcagccccttcctctggcctggggtcgagggccccgacagccccgacagccccaagcctggggctctgcacccagcggcccacgcgagatcagcctcccacttttccctggagcaccccacgatgcagccccaccccacggagctgccaggaccagacttactgactgtgcggaagtctggggtcagccgaacgcactctctgcccaatgacagctacatgtgtcggcatgggagcactgccgaggggcccctgggacacaggggctgggggctccccaaagctcagtcaggctccgtcttgtccgttcactcccagccagcagataccagctacatcctgcagcttcccaaagatgcacctcatctgctccagccccacagcgccccaacctggggcaccatccccaaactgcccccaccaggacgctcccctttggctcagaggccactcaggcgccaggcagcaataaggactgactccttggacgttcagggtctgggcagccgggaagacctgctggcagaggtgagtgggccctccccgcccctggcccgggcctactctttctggggccagtcaagtacccaggcacagcagcactcccgcagccacagcaagatctccaagcacatgaccccgccagccccttgcccaggcccagaacccaactggggcaagggccctccagagaccagaagcagcttagagttggacacggagctgagctggatttcaggagacctcctgccccctggcggccaggaggagcccccatccccacgggacctgaagaagtgctacagcgtggaggcccagagctgccagcgccggcctacgtcctggctggatgagcagaggagacactctatcgccgtcagctgcctggacagcggctcccaaccccacctgggcacagacccctctaaccttgggggccagcctcttggggggcctgggagccggcccaagaaaaaactcagcccgcctagtatcaccatagacccccccgagagccaaggtcctcggaccccgcccagccctggtatctgcctccggaggagggctccgtccagcgactccaaggatcccttggcctctggcccccctgacagcatggctgcctcgccctccccaaagaaagatgtgctgagtctctccggtttatcctctgacccagcagacctggacccctgagtcctgccccacttt

SEQ ID NO: 90300 - protein, 2239 aa, Artificial Sequence
  derived and/or modified sequence
MDEEEDGAGAEESGQPRSFMRLNDLSGAGGRPGPGSAEKDPGSADSEAEGLPYPALAPVVFFYLSQDSRPRSWCLRTVCNPWFERISMLVILLNCVTLGMFRPCEDIACDSQRCRILQAFDDFIFAFFAVEMVVKMVALGIFGKKCYLGDTWNRLDFFIVIAGMLEYSLDLQNVSFSAVRTVRVLRPLRAINRVPSMRILVTLLLDTLPMLGNVLLLCFFVFFIFGIVGVQLWAGLLRNRCFLPENFSLPLSVDLERYYQTENEDESPFICSQPRENGMRSCRSVPTLRGDGGGGPPCGLDYEAYNSSSNTTCVNWNQYYTNCSAGEHNPFKGAINFDNIGYAWIAIFQVITLEGWVDIMYFVMDAHSFYNFIYFILLIIVGSFFMINLCLVVIATQFSETKQRESQLMREQRVRFLSNASTLASFSEPGSCYEELLKYLVYILRKAARRLAQVSRAAGVRVGLLSSPAPLGGQETQPSSSCSRSHRRLSVHHLVHHHHHHHHHYHLGNGTLRAPRASPEIQDRDANGSRRLMLPPPSTPALSGAPPGGAESVHSFYHADCHLEPVRCQAPPPRSPSEASGRTVGSGKVYPTVHTSPPPETLKEKALVEVAASSGPPTLTSLNIPPGPYSSMHKLLETQSTGACQSSCKISSPCLKADSGACGPDSCPYCARAGAGEVELADREMPDSDSEAVYEFTQDAQHSDLRDPHSRRQRSLGPDAEPSSVLAFWRLICDTFRKIVDSKYFGRGIMIAILVNTLSMGIEYHEQPEELTNALEISNIVFTSLFALEMLLKLLVYGPFGYIKNPYNIFDGVIVVISVWEIVGQQGGGLSVLRTFRLMRVLKLVRFLPALQRQLVVLMKTMDNVATFCMLLMLFIFIFSILGMHLFGCKFASERDGDTLPDRKNFDSLLWAIVTVFQILTQEDWNKVLYNGMASTSSWAALYFIALMTFGNYVLFNLLVAILVEGFQAEEISKREDASGQLSCIQLPVDSQGGDANKSESEPDFFSPSLDGDGDRKKCLALVSLGEHPELRKSLLPPLIIHTAATPMSLPKSTSTGLGEALGPASRRTSSSGSAEPGAAHEMKSPPSARSSPHSPWSAASSWTSRRSSRNSLGRAPSLKRRSPSGERRSLLSGEGQESQDEEESSEEERASPAGSDHRHRGSLEREAKSSFDLPDTLQVPGLHRTASGRGSASEHQDCNGKSASGRLARALRPDDPPLDGDDADDEGNLSKGERVRAWIRARLPACCLERDSWSAYIFPPQSRFRLLCHRIITHKMFDHVVLVIIFLNCITIAMERPKIDPHSAERIFLTLSNYIFTAVFLAEMTVKVVALGWCFGEQAYLRSSWNVLDGLLVLISVIDILVSMVSDSGTKILGMLRVLRLLRTLRPLRVISRAQGLKLVVETLMSSLKPIGNIVVICCAFFIIFGILGVQLFKGKFFVCQGEDTRNITNKSDCAEASYRWVRHKYNFDNLGQALMSLFVLASKDGWVDIMYDGLDAVGVDQQNFHKCRQHQEEEEARRREEKRLRRLEKKRRSKEKQMAEAQCKPYYSDYSRFRLLVHHLCTSHYLDLFITGVIGLNVVTMAMEHYQQPQILDEALKICNYIFTVIFVLESVFKLVAFGFRRFFQDRWNQLDLAIVLLSIMGITLEEIEVNASLPINPTIIRIMRVLRIARVLKLLKMAVGMRALLDTVMQALPQVGNLGLLFMLLFFIFAALGVELFGDLECDETHPCEGLGRHATFRNFGMAFLTLFRVSTGDNWNGIMKDTLRDCDQESTCYNTVISPIYFVSFVLTAQFVLVNVVIAVLMKHLEESNKEAKEEAELEAELELEMKTLSPQPHSPLGSPFLWPGVEGPDSPDSPKPGALHPAAHARSASHFSLEHPTMQPHPTELPGPDLLTVRKSGVSRTHSLPNDSYMCRHGSTAEGPLGHRGWGLPKAQSGSVLSVHSQPADTSYILQLPKDAPHLLQPHSAPTWGTIPKLPPPGRSPLAQRPLRRQAAIRTDSLDVQGLGSREDLLAEVSGPSPPLARAYSFWGQSSTQAQQHSRSHSKISKHMTPPAPCPGPEPNWGKGPPETRSSLELDTELSWISGDLLPPGGQEEPPSPRDLKKCYSVEAQSCQRRPTSWLDEQRRHSIAVSCLDSGSQPHLGTDPSNLGGQPLGGPGSRPKKKLSPPSITIDPPESQGPRTPPSPGICLRRRAPSSDSKDPLASGPPDSMAASPSPKKDVLSLSGLSSDPADLDP

SEQ ID NO: 90301 - DNA, 6720 bp, Artificial Sequence
  derived and/or modified sequence
atggacgaggaggaggacggcgccggcgccgaggagagcggccagcccagaagcttcatgagactgaacgacctgagcggcgccggcggcagacccggccccggcagcgccgagaaggaccccggcagcgccgacagcgaggccgagggcctgccctaccccgccctggcccccgtggtgttcttctacctgagccaggacagcagacccagaagctggtgcctgagaaccgtgtgcaacccctggttcgagagaatcagcatgctggtgatcctgctgaactgcgtgaccctgggcatgttcagaccctgcgaggacatcgcctgcgacagccagagatgcagaatcctgcaggccttcgacgacttcatcttcgccttcttcgccgtggagatggtggtgaagatggtggccctgggcatcttcggcaagaagtgctacctgggcgacacctggaacagactggacttcttcatcgtgatcgccggcatgctggagtacagcctggacctgcagaacgtgagcttcagcgccgtgagaaccgtgagagtgctgagacccctgagagccatcaacagagtgcccagcatgagaatcctggtgaccctgctgctggacaccctgcccatgctgggcaacgtgctgctgctgtgcttcttcgtgttcttcatcttcggcatcgtgggcgtgcagctgtgggccggcctgctgagaaacagatgcttcctgcccgagaacttcagcctgcccctgagcgtggacctggagagatactaccagaccgagaacgaggacgagagccccttcatctgcagccagcccagagagaacggcatgagaagctgcagaagcgtgcccaccctgagaggcgacggcggcggcggccccccctgcggcctggactacgaggcctacaacagcagcagcaacaccacctgcgtgaactggaaccagtactacaccaactgcagcgccggcgagcacaaccccttcaagggcgccatcaacttcgacaacatcggctacgcctggatcgccatcttccaggtgatcaccctggagggctgggtggacatcatgtacttcgtgatggacgcccacagcttctacaacttcatctacttcatcctgctgatcatcgtgggcagcttcttcatgatcaacctgtgcctggtggtgatcgccacccagttcagcgagaccaagcagagagagagccagctgatgagagagcagagagtgagattcctgagcaacgccagcaccctggccagcttcagcgagcccggcagctgctacgaggagctgctgaagtacctggtgtacatcctgagaaaggccgccagaagactggcccaggtgagcagagccgccggcgtgagagtgggcctgctgagcagccccgcccccctgggcggccaggagacccagcccagcagcagctgcagcagaagccacagaagactgagcgtgcaccacctggtgcaccaccaccaccaccaccaccaccactaccacctgggcaacggcaccctgagagcccccagagccagccccgagatccaggacagagacgccaacggcagcagaagactgatgctgcccccccccagcacccccgccctgagcggcgccccccccggcggcgccgagagcgtgcacagcttctaccacgccgactgccacctggagcccgtgagatgccaggcccccccccccagaagccccagcgaggccagcggcagaaccgtgggcagcggcaaggtgtaccccaccgtgcacaccagccccccccccgagaccctgaaggagaaggccctggtggaggtggccgccagcagcggcccccccaccctgaccagcctgaacatcccccccggcccctacagcagcatgcacaagctgctggagacccagagcaccggcgcctgccagagcagctgcaagatcagcagcccctgcctgaaggccgacagcggcgcctgcggccccgacagctgcccctactgcgccagagccggcgccggcgaggtggagctggccgacagagagatgcccgacagcgacagcgaggccgtgtacgagttcacccaggacgcccagcacagcgacctgagagacccccacagcagaagacagagaagcctgggccccgacgccgagcccagcagcgtgctggccttctggagactgatctgcgacaccttcagaaagatcgtggacagcaagtacttcggcagaggcatcatgatcgccatcctggtgaacaccctgagcatgggcatcgagtaccacgagcagcccgaggagctgaccaacgccctggagatcagcaacatcgtgttcaccagcctgttcgccctggagatgctgctgaagctgctggtgtacggccccttcggctacatcaagaacccctacaacatcttcgacggcgtgatcgtggtgatcagcgtgtgggagatcgtgggccagcagggcggcggcctgagcgtgctgagaaccttcagactgatgagagtgctgaagctggtgagattcctgcccgccctgcagagacagctggtggtgctgatgaagaccatggacaacgtggccaccttctgcatgctgctgatgctgttcatcttcatcttcagcatcctgggcatgcacctgttcggctgcaagttcgccagcgagagagacggcgacaccctgcccgacagaaagaacttcgacagcctgctgtgggccatcgtgaccgtgttccagatcctgacccaggaggactggaacaaggtgctgtacaacggcatggccagcaccagcagctgggccgccctgtacttcatcgccctgatgaccttcggcaactacgtgctgttcaacctgctggtggccatcctggtggagggcttccaggccgaggagatcagcaagagagaggacgccagcggccagctgagctgcatccagctgcccgtggacagccagggcggcgacgccaacaagagcgagagcgagcccgacttcttcagccccagcctggacggcgacggcgacagaaagaagtgcctggccctggtgagcctgggcgagcaccccgagctgagaaagagcctgctgccccccctgatcatccacaccgccgccacccccatgagcctgcccaagagcaccagcaccggcctgggcgaggccctgggccccgccagcagaagaaccagcagcagcggcagcgccgagcccggcgccgcccacgagatgaagagcccccccagcgccagaagcagcccccacagcccctggagcgccgccagcagctggaccagcagaagaagcagcagaaacagcctgggcagagcccccagcctgaagagaagaagccccagcggcgagagaagaagcctgctgagcggcgagggccaggagagccaggacgaggaggagagcagcgaggaggagagagccagccccgccggcagcgaccacagacacagaggcagcctggagagagaggccaagagcagcttcgacctgcccgacaccctgcaggtgcccggcctgcacagaaccgccagcggcagaggcagcgccagcgagcaccaggactgcaacggcaagagcgccagcggcagactggccagagccctgagacccgacgacccccccctggacggcgacgacgccgacgacgagggcaacctgagcaagggcgagagagtgagagcctggatcagagccagactgcccgcctgctgcctggagagagacagctggagcgcctacatcttccccccccagagcagattcagactgctgtgccacagaatcatcacccacaagatgttcgaccacgtggtgctggtgatcatcttcctgaactgcatcaccatcgccatggagagacccaagatcgacccccacagcgccgagagaatcttcctgaccctgagcaactacatcttcaccgccgtgttcctggccgagatgaccgtgaaggtggtggccctgggctggtgcttcggcgagcaggcctacctgagaagcagctggaacgtgctggacggcctgctggtgctgatcagcgtgatcgacatcctggtgagcatggtgagcgacagcggcaccaagatcctgggcatgctgagagtgctgagactgctgagaaccctgagacccctgagagtgatcagcagagcccagggcctgaagctggtggtggagaccctgatgagcagcctgaagcccatcggcaacatcgtggtgatctgctgcgccttcttcatcatcttcggcatcctgggcgtgcagctgttcaagggcaagttcttcgtgtgccagggcgaggacaccagaaacatcaccaacaagagcgactgcgccgaggccagctacagatgggtgagacacaagtacaacttcgacaacctgggccaggccctgatgagcctgttcgtgctggccagcaaggacggctgggtggacatcatgtacgacggcctggacgccgtgggcgtggaccagcagaacttccacaagtgcagacagcaccaggaggaggaggaggccagaagaagagaggagaagagactgagaagactggagaagaagagaagaagcaaggagaagcagatggccgaggcccagtgcaagccctactacagcgactacagcagattcagactgctggtgcaccacctgtgcaccagccactacctggacctgttcatcaccggcgtgatcggcctgaacgtggtgaccatggccatggagcactaccagcagccccagatcctggacgaggccctgaagatctgcaactacatcttcaccgtgatcttcgtgctggagagcgtgttcaagctggtggccttcggcttcagaagattcttccaggacagatggaaccagctggacctggccatcgtgctgctgagcatcatgggcatcaccctggaggagatcgaggtgaacgccagcctgcccatcaaccccaccatcatcagaatcatgagagtgctgagaatcgccagagtgctgaagctgctgaagatggccgtgggcatgagagccctgctggacaccgtgatgcaggccctgccccaggtgggcaacctgggcctgctgttcatgctgctgttcttcatcttcgccgccctgggcgtggagctgttcggcgacctggagtgcgacgagacccacccctgcgagggcctgggcagacacgccaccttcagaaacttcggcatggccttcctgaccctgttcagagtgagcaccggcgacaactggaacggcatcatgaaggacaccctgagagactgcgaccaggagagcacctgctacaacaccgtgatcagccccatctacttcgtgagcttcgtgctgaccgcccagttcgtgctggtgaacgtggtgatcgccgtgctgatgaagcacctggaggagagcaacaaggaggccaaggaggaggccgagctggaggccgagctggagctggagatgaagaccctgagcccccagccccacagccccctgggcagccccttcctgtggcccggcgtggagggccccgacagccccgacagccccaagcccggcgccctgcaccccgccgcccacgccagaagcgccagccacttcagcctggagcaccccaccatgcagccccaccccaccgagctgcccggccccgacctgctgaccgtgagaaagagcggcgtgagcagaacccacagcctgcccaacgacagctacatgtgcagacacggcagcaccgccgagggccccctgggccacagaggctggggcctgcccaaggcccagagcggcagcgtgctgagcgtgcacagccagcccgccgacaccagctacatcctgcagctgcccaaggacgccccccacctgctgcagccccacagcgcccccacctggggcaccatccccaagctgcccccccccggcagaagccccctggcccagagacccctgagaagacaggccgccatcagaaccgacagcctggacgtgcagggcctgggcagcagagaggacctgctggccgaggtgagcggccccagcccccccctggccagagcctacagcttctggggccagagcagcacccaggcccagcagcacagcagaagccacagcaagatcagcaagcacatgaccccccccgccccctgccccggccccgagcccaactggggcaagggcccccccgagaccagaagcagcctggagctggacaccgagctgagctggatcagcggcgacctgctgccccccggcggccaggaggagccccccagccccagagacctgaagaagtgctacagcgtggaggcccagagctgccagagaagacccaccagctggctggacgagcagagaagacacagcatcgccgtgagctgcctggacagcggcagccagccccacctgggcaccgaccccagcaacctgggcggccagcccctgggcggccccggcagcagacccaagaagaagctgagcccccccagcatcaccatcgacccccccgagagccagggccccagaaccccccccagccccggcatctgcctgagaagaagagcccccagcagcgacagcaaggaccccctggccagcggcccccccgacagcatggccgccagccccagccccaagaaggacgtgctgagcctgagcggcctgagcagcgaccccgccgacctggacccctag

SEQ ID NO: 90302 - DNA, 6720 bp, Artificial Sequence
  derived and/or modified sequence
atggacgaggaggaggatggagcaggagcagaagaatcaggacagccacgctcgtttatgcgactgaacgatctgtccggagccggcgggcgaccgggccccgggtccgcagaaaaagatcctggcagcgccgattctgaagccgaaggcttgccctaccccgcactcgcgcccgtcgtgttcttttatttatcgcaggactcacggccccgatcgtggtgtttgaggaccgtgtgcaacccttggtttgaacgaatatctatgctcgtgattctccttaattgtgttaccctgggcatgttcaggccctgcgaggatatcgcatgtgattcacaacgctgcagaatcttgcaagcatttgatgactttatcttcgccttctttgcggtcgagatggtggtcaaaatggtggcacttggaatcttcggaaaaaaatgttacttgggagacacctggaaccgccttgacttcttcatagttattgccggaatgctcgaatatagtctcgacctgcagaatgtgtcattttctgctgtgcgcaccgtgcgcgtactgcgacctctcagggccatcaacagagttcccagtatgcgaatcctggtgactttgctgttggacacactgccgatgctgggtaacgtcctgctgctgtgctttttcgtgttctttatttttggcatagtgggcgtgcaactgtgggctggactcttgagaaatcgatgcttcctacctgagaatttttctctgcccctgagcgtggacctcgaacgttactatcagacagaaaacgaagatgagagccctttcatctgtagtcagcctagggaaaacggtatgcgaagctgccggagcgttccaactctcaggggcgatggcgggggtgggcccccatgtggtctagattacgaggcctacaacagcagctcgaacactacctgtgtgaattggaaccagtactatacaaattgcagcgctggcgaacataacccgttcaagggtgccattaacttcgataacatcggatacgcctggatagctatcttccaggttatcacattagaagggtgggtggatataatgtatttcgtgatggacgcgcattcattttataattttatctacttcatcctccttatcattgtgggtagcttcttcatgattaacttatgccttgtcgtaatcgcaacccaattttccgagactaaacagagggagagtcagcttatgcgtgagcagagggtgagattcctgagtaacgcaagcacactagcaagcttttctgagccggggtcttgctacgaagaactgctgaaatatttggtgtatattttaagaaaagccgccagacggctggcacaagtgagcagagcagcaggagtccgtgtcggactgcttagcagcccagcgcccctggggggccaggaaacgcagccatcctcctcatgtagccgttcccaccgcaggttatccgtgcatcacctggtacaccaccaccaccatcatcaccaccattatcacctgggtaatggaactctgagggccccccgcgcatctcccgaaatacaggaccgggacgccaacgggtctaggcggctcatgttgccgccaccttcaacccccgccctgtctggagcaccgccaggtggggctgaaagcgtccactccttttatcacgccgattgtcatttagaacctgtccggtgccaggcacctcctccgagatcaccatctgaggcttctgggagaacagttgggtctggcaaggtatatcctacagttcatacttcaccccccccagagacgctgaaggaaaaagctctcgttgaggtagccgcttcatccgggccccctacacttacaagtttaaacatccctcccggtccatatagttcaatgcacaagctgctagagacacagagcactggagcctgccagtcgtcctgcaaaatttcttccccgtgcctgaaggcggactctggggcatgcgggcctgattcctgtccatattgcgctcgggctggagcaggcgaggtagaactcgcggacagggaaatgcccgactccgattccgaggccgtgtatgagttcactcaggatgcacaacattctgatctgcgcgatcctcactcgagacgtcagaggtccctgggacccgacgccgaaccttcttctgttcttgccttctggcgtctgatctgcgacacattccggaaaattgtggattccaagtatttcgggcggggaattatgatcgccatccttgttaataccctgagtatgggaatcgaataccatgagcagccagaagagctcaccaatgccctggagatcagcaatatcgtcttcactagtctcttcgcactagaaatgcttttgaagctactggtttatggaccatttgggtatatcaagaacccttacaacatattcgatggagtgatcgtggtcatcagcgtgtgggaaatcgtcggacagcaaggcggcgggctcagtgtactgagaacattcaggctcatgcgcgtcctgaagttggtccgatttctgcccgccctgcaaagacagctcgtggttctgatgaaaactatggataacgtggctacgttttgtatgctccttatgctgttcatattcatcttcagcattcttggaatgcatctgtttggctgtaagtttgctagcgaaagggacggggatactctgcccgatcgaaaaaacttcgattccttgctttgggccatcgtgactgtcttccagattctgactcaggaggattggaacaaagttctgtataatggtatggcgtccacctctagctgggcagccctgtactttatcgcgcttatgacattcggaaactatgtgttgttcaatctgctggtggccattctagtcgaagggttccaggctgaagagatttcaaagcgggaagacgcttcaggtcagctcagctgtattcagctgccggtcgatagccaaggtggcgatgctaataagagcgagtcggagcctgactttttctccccgagcttggatggtgatggagaccggaaaaagtgcctcgcgctcgtgtccttaggcgagcatcctgaactgcgtaagagtctgctgcccccacttatcatccacacagccgccactcctatgtccctgccaaaaagtacatcaactggactcggcgaggctctgggaccagcatcccgacggacatccagttcaggctccgccgagccgggagctgctcacgaaatgaagagtcctccttctgctcgctcttctccccactccccatggagcgccgcatcctcctggacatcaaggcggtcttctcgcaactccctcggaagagccccttctcttaagcgaaggagcccatcaggggaacgccgcagtctcctgagcggggaaggccaggaatcgcaagatgaggaggagagttccgaggaggagagagcgagccccgcaggatccgatcaccgacacagaggctcactggaaagggaagccaagtcctccttcgacctacccgataccctacaggtgcccggccttcacagaacagcgagcggacgagggtcagcgtcagaacatcaggactgtaacggaaaatcagcatctggacggctggccagagccctgcggccggacgaccctcccctcgacggtgacgatgctgacgatgaggggaatctgtccaagggggagagagtacgtgcttggatccgtgcgcgactgcccgcctgctgcctggagagagactcctggtcagcgtacatctttcccccccagagtagatttcggctgctttgccatcggatcataacccacaagatgtttgaccacgtagtcctcgtaataatcttcttaaactgtatcacgatcgccatggaaaggcccaaaatcgacccccattccgcggaaagaatcttcctaaccctgagcaattacatattcactgctgtttttctggcagaaatgacagtcaaagtggtcgcactgggctggtgtttcggagagcaggcttacctccgttcgagctggaacgtcctcgacggtcttttggttctgatttctgtcatcgacattctggtgtccatggtctctgactctggtaccaagatactgggcatgctgcgcgttctgcggctcctgaggaccctgcgtccgttgcgcgtgatatcgcgagcccagggactgaagctggtggtggagaccctcatgtcatctcttaagcctatcgggaatatcgttgtgatatgttgtgcattttttatcatttttggcatcctgggggttcaactcttcaaaggaaaattttttgtgtgccagggggaggatacacggaacattaccaacaagtcagactgtgccgaagccagctaccggtgggttaggcataagtataactttgacaatcttggccaagccctcatgtcactatttgtcctggcatctaaggatggttgggttgacataatgtacgacggactggatgccgtgggggtagaccagcaaaacttccataagtgccgacagcatcaagaagaggaggaagccaggaggagggaagagaaacgcttacggcggttagaaaagaagaggcgctcgaaggagaaacaaatggcagaggcacaatgcaaaccttactattctgactattcccgttttcgtctcctggttcaccatctatgcaccagccactatctggacctttttattacaggggtgataggccttaatgtggtcacgatggctatggaacactatcaacaaccccagatcttggacgaagcactcaagatctgcaattacatttttacggttatcttcgtcttggaatccgtgtttaagttagtcgcattcggctttcgccgattttttcaggatcggtggaaccagttggacctggcaatcgtactcctgtctatcatgggcattaccctggaagaaatagaggtgaacgccagtttacctataaatccaacaatcattagaatcatgagggtcctccgaatcgcaagggtactcaagttattgaaaatggcagttgggatgagggcgctcctggacacagtgatgcaggctcttccccaagttgggaacctggggttgctctttatgctattgttttttatttttgccgcccttggtgtggagctgttcggcgatctggaatgtgatgagacccatccatgtgaaggtctggggaggcacgccacctttaggaactttggtatggcttttttaacactttttcgggtctctactggagacaactggaacggaatcatgaaggatacgctgagggactgcgatcaagaatccacctgctataataccgtgatatcgcctatttactttgtgtcattcgtattgaccgcacaattcgtattagttaacgtggtcatcgccgtgctgatgaaacatctggaagaatccaataaggaggccaaagaggaggctgaactcgaggcagagcttgagcttgagatgaaaactctctccccacaaccccattcccccctcggcagcccttttctgtggcccggggtcgaggggccggatagccccgatagtcctaaacctggcgccctccaccccgccgcacacgctaggagcgcctctcatttttcattggaacaccccaccatgcagcctcaccccactgaactcccaggccccgatctcctgaccgtgagaaaaagcggagtgtctcgcactcactctttaccaaatgatagctatatgtgtcgccatggatccacagctgaagggcccctgggccaccgaggctggggtctcccaaaagcccagtctgggagtgtactgagtgtccactcacagcctgccgacaccagctacatcctgcagctgccaaaagatgcaccccatctgcttcagccacatagcgcaccaacatggggaactattccaaaactgccgccgccagggcggtcaccactcgcccagcgaccgctgagacgacaggccgcaattagaactgattccctggatgtgcaggggcttgggtcccgagaagatctcctggccgaggtgtctgggccttccccgcctctggcacgggcctactctttctggggtcagtcatccacccaggcccagcagcatagcaggtcccatagtaaaatcagcaaacacatgacacctcccgccccatgtcccgggccagagccaaactggggcaaggggccaccagagactaggagtagcttggaacttgatactgagttgtcatggataagcggcgatctattgcctccaggcggacaagaagaaccaccatcaccgcgagatctgaagaaatgttatagcgtcgaagcccaatcatgtcagagacggcccacaagctggctggacgaacagaggcggcatagtatcgccgtttcctgtctggactccggaagccaaccacacctggggactgacccgtccaatcttgggggacaacctctcggcgggcctggatcacgacccaaaaaaaaactttcacctccctcaatcacaatagacccaccagaaagccagggaccaaggaccccaccctccccggggatatgcctcaggcgccgagccccctcctccgactccaaggatcccctggcctccggccccccggattccatggctgcatcccctagtcctaagaaggacgtactgagcctgagtggattgagctccgatccagccgacttggatccttag

SEQ ID NO: 90303 - DNA, 6720 bp, Artificial Sequence
  derived and/or modified sequence
atggatgaggaggaggatggagctggagctgaggagagcggccagcccaggagcttcatgaggctgaatgacctgagcggggccggcggccggcccggccctggcagcgctgagaaggaccccggcagcgctgacagcgaggccgagggcctgccctacccagccctggcccctgtggtgttcttctacctgagccaggacagccggcccaggtcctggtgcctgaggacagtgtgcaacccctggtttgagcgcatctccatgctggtgatcctgctgaactgtgtgaccctgggcatgttccggccctgtgaagatattgcctgtgacagccagcgctgccgcatcctgcaggcctttgatgacttcatctttgccttctttgctgtggagatggtggtgaagatggtggccctgggcatctttgggaagaagtgctacctgggggacacctggaaccggctggacttcttcatcgtgattgctggcatgctggagtacagcctggacctgcagaatgtgtccttctctgctgtgaggacagtgcgggtgctgcggcccctgcgggccatcaacagagtgcccagcatgaggatcctggtgaccctgctgctggacaccctgcccatgctgggcaatgtgctgctgctgtgcttctttgtgttcttcatctttggaattgtgggcgtgcagctgtgggccggcctgctgaggaaccgctgcttcctgcctgagaacttcagcctgcccctgtctgtggacctggagcgctactaccagacagaaaatgaagatgagagccccttcatctgcagccagccccgggagaatggcatgaggagctgccgctctgtgcccaccctgcggggagatggcggcggcggccccccctgtggcctggactatgaggcctacaacagcagcagcaacaccacctgtgtgaactggaaccagtactacaccaactgcagcgctggggagcacaaccccttcaagggggccatcaactttgacaacatcggctacgcctggatcgccatcttccaggtgatcaccctggagggctgggtggacatcatgtactttgtgatggatgcccacagcttctacaacttcatctacttcatcctgctgatcatcgtgggcagcttcttcatgatcaacctgtgcctggtggtgattgccacccagttcagcgagaccaagcagcgggagagccagctgatgagggagcagagggtgcgcttcctgagcaatgccagcaccctggccagcttcagcgagcccggcagctgctatgaggagctgctgaagtacctggtgtacatcctgaggaaggccgcccggcggctggcccaggtgtccagagctgctggggtgcgggtgggcctgctgagcagccctgcccccctgggcggccaggagacccagcccagcagcagctgcagccgcagccaccggcggctgtctgtgcaccacctggtgcaccaccaccaccaccaccaccaccactaccacctgggcaatggcaccctgcgggccccccgggccagccctgagatccaggacagagatgccaacggcagccggcggctgatgctgcccccacccagcaccccagccctgagcggggcccctcctggaggagctgagagcgtgcacagcttctaccacgccgactgccacctggagcctgtgcgctgccaggcccccccacccaggagccccagcgaggccagcggccgcacagtgggcagcggcaaggtgtaccccaccgtgcacaccagccccccacctgagaccctgaaggagaaggccctggtggaggtggccgccagcagcggcccccccaccctgaccagcctgaacatccccccaggcccctacagctccatgcacaagctgctggagacccagagcactggagcctgccagagcagctgcaagatcagcagcccctgcctgaaggctgacagcggggcctgtggccctgacagctgcccctactgtgcccgggccggggccggggaggtggagctggccgaccgggagatgccagacagcgacagcgaggccgtgtatgagttcacccaggatgcccagcacagcgacctgcgggacccccacagccggcggcagaggagcctgggcccagatgctgagcccagctctgtgctggccttctggaggctcatctgtgacaccttcaggaagatcgtggacagcaagtacttcggccggggcatcatgattgccatcctggtgaacaccctgtccatgggcatcgagtaccacgagcagcctgaggagctgaccaatgccctggagatcagcaacatcgtgttcaccagcctgtttgccctggagatgctgctgaagctgctggtgtatggccccttcggctacatcaagaacccctacaacatctttgatggagtcatcgtggtgatctctgtgtgggagatcgtgggccagcagggcggcggcctgtctgtgctgcggaccttccggctgatgagggtgctgaagctggtgcgcttcctgcctgccctgcagaggcagctggtggtgctgatgaagaccatggacaacgtggccaccttctgcatgctgctgatgctgttcatcttcatcttcagcatcctgggcatgcacctgtttggctgcaagtttgccagcgagagagatggagacaccctgcctgacaggaagaactttgacagcctgctgtgggccatcgtgacagtgttccagatcctgacccaggaggactggaacaaggtgctgtacaacggcatggccagcaccagctcctgggccgccctgtacttcatcgccctgatgaccttcggcaactacgtgctcttcaacctgctggtggccatcctggtggagggcttccaggccgaggagatcagcaagcgggaggatgccagcggccagctgagctgcatccagctgcctgtggacagccagggcggagatgccaacaagtctgagagcgagccagacttcttcagccccagcctggatggagatggagacaggaagaagtgcctggccctggtgtccctgggggagcaccctgagctgaggaagagcctgctgcccccactcatcatccacacagctgccacccccatgagcctgcccaagagcaccagcacaggcctgggggaggccctgggccctgccagcaggaggaccagcagcagcggcagcgctgagcctggagctgcccacgagatgaagagcccccccagcgcccggagcagcccccacagcccctggagcgctgccagctcctggaccagccgccgcagcagcaggaacagcctgggccgggcccccagcctgaagagaagaagccccagcggggagcggcgcagcctgctgtctggagagggccaggagagccaggatgaggaggagagcagcgaggaggagcgggccagccctgctggcagtgaccaccgccaccggggcagcctggagcgggaggccaagagcagctttgacctgcctgacaccctgcaggtgcccggcctgcacaggacagccagcggccggggcagcgccagcgagcaccaggactgcaatggcaagagcgccagcggccgcctggcccgggccctgcggccagatgatcctcccctggatggagatgatgctgatgatgagggcaacctgagcaagggggagcgggtgcgggcctggatccgggcccggctgcctgcctgctgcctggagcgggacagctggagcgcctacatcttccccccccagagccgcttccggctgctgtgccaccgcatcatcacccacaagatgtttgaccacgtggtgctggtgatcatcttcctgaactgcatcaccatcgccatggagcggcccaagattgacccccacagcgctgagcgcatcttcctgaccctgagcaactacatcttcaccgctgtgttcctggccgagatgacagtgaaggtggtggccctgggctggtgcttcggggagcaggcctacctgcggagctcctggaatgtgctggatggcctgctggtgctgatctctgtgattgacatcctggtgtccatggtgtctgattctggcaccaagatcctgggcatgctgcgggtgctgcggctgctgcggaccctgcggcccctgcgggtcatcagccgggcccagggcctgaagctggtggtggagaccctgatgagcagcctgaagcccatcggcaacatcgtggtgatctgctgtgccttcttcatcatcttcggcatcctgggcgtgcagctgttcaagggcaagttctttgtgtgccagggcgaggacaccaggaacatcaccaacaagagtgactgtgccgaggccagctaccgctgggtgcgccacaagtacaactttgacaacctgggccaggccctgatgagcctgtttgtgctggccagcaaggatggctgggtggacatcatgtatgatggcctggatgctgtgggcgtggaccagcagaacttccacaagtgccggcagcaccaggaggaggaggaggcccggcggcgggaggagaagaggctgcggcggctggagaagaagagaagaagcaaggagaagcagatggccgaggcccagtgcaagccctactacagcgactacagccgcttccggctgctggtgcaccacctgtgcaccagccactacctggacctcttcatcactggagtcatcggcctgaatgtggtgaccatggccatggagcactaccagcagccccagatcctggatgaggccctgaagatctgcaactacatcttcaccgtcatctttgtgctggagagcgtcttcaagctggtggccttcggcttccgccgcttcttccaggaccgctggaaccagctggacctggccatcgtgctgctgagcatcatgggcatcaccctggaggagattgaggtgaatgccagcctgcccatcaaccccaccatcatccgcatcatgagggtgctgagaattgcccgggtgctgaagctgctgaagatggctgtgggcatgagggccctgctggacacagtgatgcaggccctgccccaggtgggcaacctgggcctgctcttcatgctgctcttcttcatctttgctgccctgggcgtggagctgtttggagacctggagtgtgatgagacccacccctgtgagggcctgggcagacatgccaccttcaggaactttggcatggccttcctgaccctcttccgggtgtccactggagacaactggaatggcatcatgaaggacaccctgcgggactgtgaccaggagagcacctgctacaacacagtcatcagccccatctactttgtgtcctttgtgctgacagcccagtttgtgctggtgaatgtggtgattgctgtgctgatgaagcacctggaggagagcaacaaggaggccaaggaggaggccgagctggaggccgagctggagctggagatgaagaccctgagcccccagccccacagccccctgggcagccccttcctgtggccaggagtggagggccctgacagcccagacagccccaagccaggggccctgcaccctgctgcccacgcccggagcgccagccacttcagcctggagcaccccaccatgcagccccaccccacagagctgcccggccctgacctgctgactgtgaggaagtctggagtgtccaggacccacagcctgcccaatgacagctacatgtgccgccacggcagcacagctgagggccccctgggccaccggggctggggcctgcccaaggcccagagcggctctgtgctgtctgtgcacagccagcctgctgacaccagctacatcctgcagctgcccaaggatgccccccacctgctgcagccccacagcgcccccacctggggcaccatccccaagctgcccccacctggccgcagccccctggcccagaggcccctgcggcggcaggccgccatcagaacagacagcctggatgtgcagggcctgggcagccgggaggacctgctggccgaggtgtctggccccagcccccccctggcccgggcctacagcttctggggccagagcagcacccaggcccagcagcacagccgcagccacagcaagatcagcaagcacatgaccccaccagccccctgccccggccctgagcccaactggggcaagggccccccagagaccaggagcagcctggagctggacacagagctgtcctggatcagcggggacctgctgcccccaggcggccaggaggagccccccagcccccgggacctgaagaagtgctacagcgtggaggcccagagctgccagaggcggcccacctcctggctggatgagcagaggaggcacagcattgctgtgtcctgcctggacagcggcagccagccccacctgggcacagaccccagcaacctgggcggccagcccctgggcggccctggcagccggcccaagaagaagctgagcccccccagcatcaccattgatcctcctgagagccagggccccaggaccccacccagccctggcatctgcctgcggcggcgggcccccagcagtgacagcaaggaccccctggccagcggccccccagacagcatggccgccagccccagccccaagaaggatgtgctgagcctgagcggcctgagcagtgaccctgctgacctggacccctag

SEQ ID NO: 90304 - DNA, 6720 bp, Artificial Sequence
  derived and/or modified sequence
atggacgaggaggaggacggcgccggcgccgaggagagcggccagcctagatctttcatgcgcttgaacgacctgagtggtgctggcgggcgcccaggccccgggtctgccgaaaaggaccccgggagcgccgattcggaggctgaagggttgccttaccctgcactagcgcctgtggtgtttttttacttgagccaagattctcgccccagaagctggtgtctgcgcactgtatgcaacccctggtttgagaggatctccatgctggtcatccttctcaattgcgttaccttaggcatgttcagaccctgcgaggacattgcctgcgatagccaaaggtgtcgtatcctccaggcctttgacgacttcatattcgcgttctttgctgtcgagatggtggttaagatggtggcactcggaatattcggcaagaagtgttatttgggcgatacctggaaccgtctggacttttttattgtaattgccgggatgttggagtactctctggaccttcagaatgtgtcatttagtgccgtgcgtacagtgagggttttgcgaccactgcgggccattaacagagtgccgtcaatgaggatcttagtgactcttctgctcgacacgttacccatgctgggaaatgttcttctgctgtgtttttttgtgtttttcatcttcggtattgttggcgtacaactatgggccgggctgttaagaaatcggtgttttctccccgaaaatttctctctacccctgagcgtcgatctcgagagatattaccagaccgagaatgaggatgaatccccgttcatctgttcccagcctcgcgagaacggtatgcgctcatgtcgctccgtgccaacgctgaggggcgacgggggaggcggccctccatgcgggttggactatgaagcatacaacagcagttctaacaccacctgtgtgaactggaatcagtattatactaattgtagcgccggtgagcataacccctttaaaggggctatcaactttgataacatcggatacgcatggatcgcaatcttccaggtgataactctggagggatgggttgatattatgtactttgtgatggatgcacactcattctacaattttatctatttcatcctgctcatcattgttggaagctttttcatgatcaacctttgtcttgtggtaattgccacccaattcagtgagactaagcagcgcgagtctcaattgatgcgcgaacagagggtgagattcctgtctaacgcttctactctcgctagcttttctgaaccgggatcttgttacgaggagctacttaagtatttggtctatattctgaggaaagctgctcgacgtctcgcccaggtatcacgagccgctggagtgagggtcggtctgctatcctcaccagctcctctgggcgggcaggagactcagccttcatccagctgctcacgctcgcaccggcgcctgagtgtgcaccaccttgtccatcaccaccatcatcatcatcaccattaccatctcggaaatggtactttgcgggccccaagagcctctccggaaattcaggatagggacgcaaacgggtctagacggttgatgttaccacctccgtccacacctgctctgagcggcgcgccacctggtggcgccgagagtgtacacagtttctaccacgcggattgtcacttagaacccgtccggtgtcaagctcctcctcctaggagtccaagtgaagcatcggggagaaccgtcggaagcggcaaagtctaccccaccgtacacacaagtccacccccagaaactctgaaagaaaaggcactcgtggaagtcgcagcctccagtggccctcctacactgacgtccttaaacattcctcctgggccatacagctcaatgcacaaactcttggagacccagtcaactggcgcctgtcagtcctcctgtaagattagctcaccttgtctcaaagccgactcaggagcatgcgggccagactcatgcccatactgcgcccgcgccggagctggcgaggtggaactcgccgaccgtgagatgccagatagcgactcagaggccgtgtatgagtttacacaggatgcccaacactccgacctgcgggacccccacagcaggagacagcgaagcctgggcccagatgccgagcccagctctgtgctcgccttttggaggctcatctgcgacaccttccggaaaatcgtcgactctaagtacttcggaagaggcatcatgattgccatcctcgttaatactctgtctatgggcatcgaatatcatgagcagcctgaggaactgacgaacgctctggagatttccaacatcgtttttacctcactgttcgccctggaaatgctgctgaagttgctcgtttatggcccctttgggtatataaagaacccttataatatattcgacggcgttatcgtggtgattagtgtatgggaaattgtcggccagcaaggcggcggactatctgtgctccgtacctttcggctgatgagggtattgaaattggtgagattcctccctgcgctacagaggcaactcgttgtcctcatgaaaaccatggacaacgtggcaactttttgcatgctgctcatgttgtttatctttatattttcaatcctgggcatgcacctttttggttgcaaatttgcctccgagagagacggcgatactctgcctgacagaaaaaatttcgatagcctgctgtgggcaattgtgaccgtatttcagatattgactcaggaagattggaacaaggttctttacaatggaatggcaagcacatctagctgggcagccctgtactttattgccctgatgaccttcggtaactatgtgctctttaatttgctcgtggctattttggtggaaggatttcaggcggaggagatttccaagagggaagatgcgagcggccagctaagctgtatccagctgccagtggacagtcaaggtggagacgcaaacaagtcagaaagcgagccagacttcttttcaccgtcacttgatggagacggggaccggaaaaaatgcctggcacttgtttcgctgggggagcatcctgagctgcgcaaatctttactgccgccattaatcatccacaccgccgccacccctatgtctctgccgaaaagtaccagcacaggcttgggcgaagcccttggacccgcctcacgaagaacatcatccagtgggtctgccgaacccggcgcggcacatgagatgaaatcaccacccagcgcaagaagttccccacactctccatggagtgcggcgagtagctggacttcccgaagatcaagtcgaaacagtttgggtagggcaccctccctcaaacgccgtagccccagcggagagcgacggtccctgctttctggggagggccaagagtcacaggatgaagaggagagtagcgaagaagagagggccagccccgcaggctcagaccatcgccaccgcggctctcttgagcgggaggcaaaaagttcctttgatctcccagatacacttcaggtgcctgggctgcatagaacagcttccggccgcggctccgcaagtgagcaccaggattgtaacggaaaaagcgcctctggacgtctggcccgcgccctgcggccagatgaccctcccctggacggggatgacgccgatgatgaaggtaatttgtcgaagggcgagcgcgtgagggcctggattcgggcgcgtctcccagcctgctgccttgagcgcgatagctggtctgcgtacattttccctcctcagagccggttccggttgctgtgccacagaattattactcacaaaatgttcgaccacgtggtgctggttattatttttctgaactgtatcactattgctatggagcggccaaagatcgacccccactctgctgaacggatcttccttacgttgtctaattatatcttcaccgccgttttcctggctgagatgacagtgaaggttgtggccctgggctggtgctttggtgagcaggcatacctccgctcatcttggaatgtgctcgacggactcctggttctgatttctgtgatcgatatcctggtaagcatggtaagtgacagcgggactaaaattctgggaatgctccgggtgctgcggttgttgcgcacgttaagacccctccgcgtgatatctcgggcccagggactcaagcttgtagttgagaccctaatgtccagcctgaaacccattggcaacatagttgtgatttgctgtgctttctttattatattcggaatccttggggtgcagctgttcaagggcaaattttttgtatgccagggcgaggacactcgcaacatcaccaacaagagtgattgtgctgaggcttcttacaggtgggtccgccacaagtataactttgataatttggggcaagcactgatgtcactcttcgtgttggcgagtaaagacgggtgggttgacattatgtacgacgggctcgacgccgtcggcgtggatcagcaaaacttccacaagtgtcgacagcaccaagaagaagaggaggcgcggcgaagggaggaaaaaagattgcggagactcgaaaaaaaacgaagaagcaaggagaagcagatggctgaggcccaatgcaagccatattacagcgattatagtagatttcgattgttggtgcaccacttgtgcactagccactatctggacctcttcattaccggcgtgataggcctcaacgtggtaactatggctatggagcactaccagcagccccaaatattagatgaagccttaaaaatttgtaactacatctttactgtgatatttgtgctggaaagtgtatttaaacttgtggctttcggttttcgcaggttttttcaggatcggtggaaccagctcgacctggcaatcgtactgctgtcaataatgggaattacgctggaagaaattgaagtgaacgcctctctgcccatcaaccccacaattatcaggatcatgcgagtactgagaatcgcaagggtcctcaaattgttgaagatggcagtgggcatgcgggccctcctcgatactgtcatgcaagctctgccacaggtgggaaacttagggctgttgttcatgcttctcttcttcattttcgccgctctgggggttgagttgtttggagacctggagtgcgacgagactcacccttgtgaagggctaggtcgccatgcgacatttagaaattttggaatggcatttttgacgctgtttagggtgtccactggcgataattggaatggcatcatgaaggacaccctgcgcgactgtgaccaggagtcaacctgctacaatacggtgatctcacctatttacttcgtgtcctttgtactaactgctcaatttgttctggttaacgtcgtaatagccgtacttatgaagcatctggaggaatccaataaggaggccaaggaggaggcggagctcgaagccgagcttgaactggagatgaagaccctgtcacctcagcctcacagtccacttggttccccattcctttggccaggcgtggagggccccgattctccagatagtcctaaacccggggccctgcatcctgccgctcatgcccgatctgcttcgcatttttccctggagcaccctacaatgcagccccacccgacagaacttccaggtcctgacctgctgaccgtgcgaaaatccggcgtgtcacgcactcatagcttgcccaacgattcctacatgtgtcggcacggcagtacggccgaagggccactgggccatagggggtggggactcccaaaggcgcaatctggatctgtgctaagcgttcactctcaacctgccgacacctcctacattctgcagctgccaaaagatgccccccacctgctgcagccacacagtgctcccacgtggggcacaattcctaaactgccacctccagggcggtctcctctcgctcagaggcccctccgacggcaagcggcaatccggaccgattcgttagatgtgcagggactcggcagccgcgaagacttattggccgaggtctccggtccctctccccccctagctagagcttactctttttggggccagtcctctactcaggctcagcaacattctcggtctcacagtaaaatttccaagcatatgactcctcctgccccttgtcctgggccagaacccaactggggcaagggtccaccagagaccaggtcttctctcgagctggataccgagctctcttggatttccggggacttgctgccaccaggggggcaggaggagccccccagccctcgggacttaaagaagtgttactcagtggaggcccagtcgtgccagaggagacctacctcttggctggatgagcagagaagacactctatcgctgtgagttgcctcgatagcggctcccagccacatctcggcactgacccatcaaatctcggaggacagccactgggagggccgggcagtcgtcccaagaaaaagttgtcacccccttcaataaccatagacccccctgagagccaggggccaaggacccccccaagccccggaatctgtctccgccgccgggctccctctagcgattcaaaggaccctctggccagtggccctcccgacagcatggccgcttccccatcacccaaaaaggatgtactgtctcttagtggtctctccagcgacccggccgatttggatccatag

SEQ ID NO: 90305 - DNA, 6719 bp, Artificial Sequence
  derived and/or modified sequence
atggacgaggaggaggatggtgccggagcggaagaaagcggccagcccaggagcttcatgcgcttaaacgaccttagcggcgcaggcggacgcccaggccctggatccgctgaaaaggaccccggtagtgcggactccgaagccgagggactcccctatcctgccctcgcccctgtggtttttttctacctgagtcaggatagcaggccgcgatcgtggtgtttgaggacagtgtgtaatccatggtttgagcggattagcatgctcgtcatactgttaaattgtgtcacactcggaatgtttcgtccctgtgaagacattgcctgcgattctcagaggtgcagaatcctgcaggccttcgacgacttcatttttgcatttttcgccgttgagatggttgttaaaatggtagctctgggtatcttcgggaagaagtgttacctgggcgatacctggaacaggttagactttttcatagttattgccggaatgctcgaatatagcctggacctccagaacgtctcgttcagcgccgtgagaacagtgcgggtgctacgccctctgcgggcaattaatagagtgccctcgatgcgaattctggtgactttactgcttgataccctgccgatgctcggcaatgttctgttgctctgtttttttgtgttttttatttttggcatcgttggagtgcaactgtgggcaggtcttttgagaaacaggtgcttcctgcccgaaaacttttctttacccctcagtgtggatttagagaggtattatcagacagagaacgaagatgagtctccattcatttgttcccaaccccgtgagaatgggatgagaagttgtcggtctgtcccaacccttaggggagatggaggtggtggacccccatgtggcctcgattacgaagcctacaatagctcctccaacaccacatgtgttaattggaatcagtattacacaaactgtagtgcaggtgaacataacccttttaaaggcgctatcaactttgacaatattggttacgcgtggatcgctatctttcaagtcattactctcgaaggctgggttgacattatgtattttgttatggatgcccactcgttctataacttcatttattttatcctgctcatcatcgtagggtccttctttatgattaatctgtgcctggtggtaatagccacacagttttctgagacaaagcagagagagtctcagctgatgagagagcagcgagtcagattcctcagcaacgccagcacgttagcatcgtttagcgagcccggatcctgctacgaagaacttctgaaatacctcgtgtacatactgaggaaggcagcaagacgcctggcacaggtgagtagagccgcaggggtgagggttggactgctaagctctccggctccactgggaggccaggaaactcagcctagttccagttgctccagatctcacaggaggttgagtgtgcaccatctggtgcaccaccatcaccaccatcatcaccattatcacctgggtaacggcacccttagggcccctcgggcttccccagagattcaggatcgcgacgcgaacggcagccgcaggctgatgctccctccgccaagtacaccagcactctcaggagccccacccggaggcgcagaaagtgtgcactccttttaccatgcagactgtcaccttgagcccgtccggtgtcaagctcccccaccaagaagcccctccgaagctagcggacggactgttggttctggaaaggtgtacccgaccgtgcacaccagcccaccccctgaaacccttaaggaaaaggctctggtcgaagttgctgcttcttcaggccctccgacattaacgagcttgaatatcccacccggtccctactcctccatgcacaagctcctggagacgcagtcaacgggcgcttgccagtcatcttgcaaaattagcagtccgtgcttgaaagcagactccggggcatgtggcccagactcatgtccttactgtgctagagcaggagccggagaggtggagctagcagacagagaaatgcccgacagcgatagcgaggcagtgtacgaattcacgcaggacgcccagcatagtgatttgcgagatccccatagccgcagacagaggagcctcgggccagacgccgaacccagcagcgtactggccttctggaggttgatctgtgatacattcaggaagattgtggacagcaaatacttcggcagaggcattatgatcgctatcctggtcaacactttgagtatggggatcgagtatcacgagcagccagaagagttaactaacgcactggagatttccaatatcgtgttcacctccctctttgccctggagatgctactgaaactgctggtgtatggaccatttggttacataaagaacccctacaatatattcgacggcgttatagtagtgatctccgtctgggagattgtgggccagcaaggcggagggctgtctgttctacgtacatttaggctgatgcgcgtgctgaagcttgtccggttcctgccagcgctacaacggcagctggtggtgctgatgaaaaccatggacaacgttgcgaccttttgcatgctgctgatgcttttcattttcattttcagcatcttaggcatgcatttattcggttgcaagtttgcatccgaaagagacggggacaccctccctgaccggaagaactttgattcgttactttgggcaattgtgactgttttccagattctgacccaggaagactggaataaagtactctacaatggaatggcctctacttcaagctgggccgcactctattttatcgccctcatgacttttggaaactatgtgctcttcaaccttctggtcgccatcttagtggagggctttcaagccgaagagattagcaagcgcgaggatgcatcaggtcagctgagctgcatacagctaccagttgactcccaggggggagatgcgaacaagtctgagtctgagcccgatttttttagcccatccctagatggagatggagacaggaagaagtgcctcgcacttgtctctctgggggagcaccccgagctaaggaagagcctgcttcctccactgatcatccacaccgccgcaacgcccatgtctctccctaaatccacatctaccggtctgggggaagctctggggccagcatcaaggcgaacttcctctagcggatcagctgagcccggagccgcacacgaaatgaagtcacctccctcagcgaggtcgagtccacactccccctggagcgccgctagctcatggacatcccggagatcttcccgaaacagcctagggagggcaccctcactcaagcgcagaagtcccagtggtgagcggaggagtctgctgtctggcgaagggcaggagtctcaagacgaggaggagtcctcggaagaggaacgagccagccccgcagggagcgaccacaggcacaggggctctcttgagagagaggccaaaagcagttttgacctcccggacacgctgcaggttcctggcttgcacagaaccgccagcggccgtggaagtgcctctgaacaccaagactgtaacggcaaaagcgccagcggacgccttgctagggccctcaggcctgacgaccctccgctggacggtgatgatgccgacgatgaagggaatctatccaagggcgaacgggtccgggcatggatcagggccaggctgcctgcctgctgtctcgaaagggacagctggagtgcctatatcttcccacctcagtcaaggttcagactcctttgtcaccggataattactcataaaatgttcgatcatgttgtgttagtcatcatattccttaattgcattacaattgccatggaacgccctaaaatcgatccccactccgcagaacggatttttcttaccctgtccaactatatctttaccgcagtttttctagccgagatgaccgtcaaagtggtggcactggggtggtgtttcggtgagcaagcctatttacgctcgagctggaatgtgctcgatggcttgctcgtactgatctcagtgattgatattctagtgtccatggtgagtgattcaggtacaaaaattctggggatgctgcgggttctccggctcttgcgaacattgcgcccactcagggtcatttccagagctcaaggtttgaagttggtggtggaaactctgatgtctagtcttaagcccattggcaacatcgtggtcatttgttgtgcattctttataatcttcggcatcttgggcgtacagctgttcaagggcaaattctttgtgtgtcagggcgaagacacaagaaatattaccaataagtctgattgtgctgaagcctcttatcgctgggtaaggcacaagtataacttcgataatctgggccaggctctgatgagcctgttcgtgctggctagcaaagacggatgggtggacattatgtatgacggattagacgccgtcggcgtcgaccaacaaaattttcataagtgtcgccagcaccaggaggaggaggaagccaggcgcagagaggaaaagaggctacgcagactggaaaagaaacggcgttcaaaagagaaacagatggcagaagctcagtgcaaaccatactattctgattattctaggttcaggctgttagtgcaccacctgtgcacctctcattatttagatctgttcataactggcgtcatcgggttaaacgtggtcacgatggccatggagcactatcaacaaccccaaattctcgacgaggctctgaaaatttgcaactacatttttacggtcatttttgtactggaatcagtgttcaaactggtcgctttcggctttagacgattttttcaggatcgttggaatcagctcgatctggccattgtcctgctaagtattatgggaatcacactcgaggaaattgaagtcaatgcgtccttgcctatcaacccaaccatcattagaatcatgagagtcttgagaatcgcccgagtgctgaaattgttaaaaatggcagtcggaatgcgtgcgctcttagatacggtgatgcaggctctcccacaggtaggaaacttggggctgctcttcatgcttctcttttttatcttcgccgctctgggcgtcgaactgttcggcgatttagagtgtgacgaaactcacccttgtgaggggctgggccgacacgcgacttttcgcaacttcggaatggccttcttaactctctttcgcgtgagcacgggggataactggaatggtattatgaaggatacactgagagattgcgatcaggagagtacgtgctacaatacagtcatttctcccatttactttgtgagctttgttttaactgcacagtttgtcctggtgaacgttgtgatcgcggtattgatgaaacacctagaggagagcaataaagaggcaaaggaggaggctgagctcgaggctgaactagaacttgagatgaaaactttatcaccgcaaccacactcacccctggggtctccattcttatggccaggggtggaaggcccagattcccccgactctcccaagcctggtgctctgcaccccgctgcacacgctcggtctgcctctcacttctcactggagcacccaaccatgcagccccatccaacggagctgccgggacccgatttgctgacggttcgaaagtccggagtgtctcgcacccactcccttcccaatgacagttacatgtgtcggcatggctctaccgccgaaggccctctcggccatcgcggatggggtctgccaaaggctcaaagcggctcagtgctgtccgtgcactcacagcctgctgatacctcttacatattgcagctgcccaaggacgcaccccatttgctgcaaccccatagcgccccaacatggggaacgattccgaaactccctccgcctggcaggagtcccctcgctcagagacccttaaggcgccaggcagctatccgcacagattcgctggatgtgcaggggttaggatcccgcgaggaccttctggccgaggtgagcgggccatcaccacctctggctcgcgcttattccttctggggtcagtcgtcgacgcaagcccagcagcactctcgttctcactccaaaatttctaagcatatgacccccccagcaccttgtcctgggccagaacctaactggggcaagggccctccagaaaccagatcctcattagaattagataccgagttatcctggatcagtggagacttgctgcctcctggaggacaggaagaacctcctagtcctagagatcttaagaaatgctactcagtggaggcccagagttgtcagagacgcccaaccagctggctagacgagcaacggcgtcactcaatcgcggtttcctgcctcgactctggctctcaaccccacctcggaacagatccgagcaatctgggtgggcagccactagggggacccggtagtcgaccgaaaaaaaagttgtcgccgccatccattaccattgatcctcctgaaagccagggccctcggacacctcctagtcctgggatttgcctgagaaggcgagcccctagttctgattccaaggatcccttagctagtgggcctcctgacagtatggcagcctccccatccccaaagaaggacgttctgtccctctcggggctgtcttctgatcccgctgatctcgatcctta

SEQ ID NO: 90306 - DNA, 6735 bp, Artificial Sequence
  derived and/or modified sequence
atggacgaggaggaggatggagcgggcgccgaggagtcgggacagccccggagcttcatgcggctcaacgacctgtcgggggccgggggccggccggggccggggtcagcagaaaaggacccgggcagcgcggactccgaggcggaggggctgccgtacccggcgctggccccggtggttttcttctacttgagccaggacagccgcccgcggagctggtgtctccgcacggtctgtaacccctggtttgagcgcatcagcatgttggtcatccttctcaactgcgtgaccctgggcatgttccggccatgcgaggacatcgcctgtgactcccagcgctgccggatcctgcaggcctttgatgacttcatctttgccttctttgccgtggagatggtggtgaagatggtggccttgggcatctttgggaaaaagtgttacctgggagacacttggaaccggcttgactttttcatcgtcatcgcagggatgctggagtactcgctggacctgcagaacgtcagcttctcagctgtcaggacagtccgtgtgctgcgaccgctcagggccattaaccgggtgcccagcatgcgcatccttgtcacgttgctgctggatacgctgcccatgctgggcaacgtcctgctgctctgcttcttcgtcttcttcatcttcggcatcgtcggcgtccagctgtgggcagggctgcttcggaaccgatgcttcctacctgagaatttcagcctccccctgagcgtggacctggagcgctattaccagacagagaacgaggatgagagccccttcatctgctcccagccacgcgagaacggcatgcggtcctgcagaagcgtgcccacgctgcgcggggacgggggcggtggcccaccttgcggtctggactatgaggcctacaacagctccagcaacaccacctgtgtcaactggaaccagtactacaccaactgctcagcgggggagcacaaccccttcaagggcgccatcaactttgacaacattggctatgcctggatcgccatcttccaggtcatcacgctggagggctgggtcgacatcatgtactttgtgatggatgctcattccttctacaatttcatctacttcatcctcctcatcatcgtgggctccttcttcatgatcaacctgtgcctggtggtgattgccacgcagttctcagagaccaagcagcgggaaagccagctgatgcgggagcagcgtgtgcggttcctgtccaacgccagcaccctggctagcttctctgagcccggcagctgctatgaggagctgctcaagtacctggtgtacatccttcgtaaggcagcccgcaggctggctcaggtctctcgggcagcaggtgtgcgggttgggctgctcagcagcccagcacccctcgggggccaggagacccagcccagcagcagctgctctcgctcccaccgccgcctatccgtccaccacctggtgcaccaccaccaccaccatcaccaccactaccacctgggcaatgggacgctcagggccccccgggccagcccggagatccaggacagggatgccaatgggtcccgccggctcatgctgccaccaccctcgacgcctgccctctccggggccccccctggtggcgcagagtctgtgcacagcttctaccatgccgactgccacttagagccagtccgctgccaggcgccccctcccaggtccccatctgaggcatccggcaggactgtgggcagcgggaaggtgtatcccaccgtgcacaccagccctccaccggagacgctgaaggagaaggcactagtagaggtggctgccagctctgggcccccaaccctcaccagcctcaacatcccacccgggccctacagctccatgcacaagctgctggagacacagagtacaggtgcctgccaaagctcttgcaagatctccagcccttgcttgaaagcagacagtggagcctgtggtccagacagctgcccctactgtgcccgggccggggcaggggaggtggagctcgccgaccgtgaaatgcctgactcagacagcgaggcagtttatgagttcacacaggatgcccagcacagcgacctccgggacccccacagccggcggcaacggagcctgggcccagatgcagagcccagctctgtgctggccttctggaggctaatctgtgacaccttccgaaagattgtggacagcaagtactttggccggggaatcatgatcgccatcctggtcaacacactcagcatgggcatcgaataccacgagcagcccgaggagcttaccaacgccctagaaatcagcaacatcgtcttcaccagcctctttgccctggagatgctgctgaagctgcttgtgtatggtccctttggctacatcaagaatccctacaacatcttcgatggtgtcattgtggtcatcagcgtgtgggagatcgtgggccagcaggggggcggcctgtcggtgctgcggaccttccgcctgatgcgtgtgctgaagctggtgcgcttcctgccggcgctgcagcggcagctggtggtgctcatgaagaccatggacaacgtggccaccttctgcatgctgcttatgctcttcatcttcatcttcagcatcctgggcatgcatctcttcggctgcaagtttgcctctgagcgggatggggacaccctgccagaccggaagaattttgactccttgctctgggccatcgtcactgtctttcagatcctgacccaggaggactggaacaaagtcctctacaatggtatggcctccacgtcgtcctgggcggccctttatttcattgccctcatgaccttcggcaactacgtgctcttcaatttgctggtcgccattctggtggagggcttccaggcggaggaaatcagcaaacgggaagatgcgagtggacagttaagctgtattcagctgcctgtcgactcccaggggggagatgccaacaagtccgaatcagagcccgatttcttctcacccagcctggatggtgatggggacaggaagaagtgcttggccttggtgtccctgggagagcacccggagctgcggaagagcctgctgccgcctctcatcatccacacggccgccacacccatgtcgctgcccaagagcaccagcacgggcctgggcgaggcgctgggccctgcgtcgcgccgcaccagcagcagcgggtcggcagagcctggggcggcccacgagatgaagtcaccgcccagcgcccgcagctctccgcacagcccctggagcgctgcaagcagctggaccagcaggcgctccagccggaacagcctcggccgtgcacccagcctgaagcggagaagcccaagtggagagcggcggtccctgttgtcgggagaaggccaggagagccaggatgaagaggagagctcagaagaggagcgggccagccctgcgggcagtgaccatcgccacagggggtccctggagcgggaggccaagagttcctttgacctgccagacacactgcaggtgccagggctgcatcgcactgccagtggccgagggtctgcttctgagcaccaggactgcaatggcaagtcggcttcagggcgcctggcccgggccctgcggcctgatgaccccccactggatggggatgacgccgatgacgagggcaacctgagcaaaggggaacgggtccgcgcgtggatccgagcccgactccctgcctgctgcctcgagcgagactcctggtcagcctacatcttccctcctcagtccaggttccgcctcctgtgtcaccggatcatcacccacaagatgttcgaccacgtggtccttgtcatcatcttccttaactgcatcaccatcgccatggagcgccccaaaattgacccccacagcgctgaacgcatcttcctgaccctctccaattacatcttcaccgcagtctttctggctgaaatgacagtgaaggtggtggcactgggctggtgcttcggggagcaggcgtacctgcggagcagttggaacgtgctggacgggctgttggtgctcatctccgtcatcgacattctggtgtccatggtctctgacagcggcaccaagatcctgggcatgctgagggtgctgcggctgctgcggaccctgcgcccgctcagggtgatcagccgggcgcaggggctgaagctggtggtggagacgctgatgtcctcactgaaacccatcggcaacattgtagtcatctgctgtgccttcttcatcattttcggcatcttgggggtgcagctcttcaaagggaagtttttcgtgtgccagggcgaggataccaggaacatcaccaataaatcggactgtgccgaggccagttaccggtgggtccggcacaagtacaactttgacaaccttggccaggccctgatgtccctgttcgttttggcctccaaggatggttgggtggacatcatgtacgatgggctggatgctgtgggcgtggaccagcagaacttccacaagtgtcggcagcaccaggaggaagaggaggcccggcggcgggaggagaagcgcctacgaagactggagaaaaagagaaggagtaaggagaagcagatggctgaagcccagtgcaaaccttactactccgactactcccgcttccggctcctcgtccaccacttgtgcaccagccactacctggacctcttcatcacaggtgtcatcgggctgaacgtggtcaccatggccatggagcactaccagcagccccagattctggatgaggctctgaagatctgcaactacatcttcactgtcatctttgtcttggagtcagttttcaaacttgtggcctttggtttccgtcggttcttccaggacaggtggaaccagctggacctggccattgtgctgctgtccatcatgggcatcacgctggaggaaatcgaggtcaacgcctcgctgcccatcaaccccaccatcatccgcatcatgagggtgctgcgcattgcccgagtgctgaagctgctgaagatggctgtgggcatgcgggcgctgctggacacggtgatgcaggccctgccccaggtggggaacctgggacttctcttcatgttgttgtttttcatctttgcagctctgggcgtggagctctttggagacctggagtgtgacgagacacacccctgtgagggcctgggccgtcatgccacctttcggaactttggcatggccttcctaaccctcttccgagtctccacaggtgacaattggaatggcattatgaaggacaccctccgggactgtgaccaggagtccacctgctacaacacggtcatctcgcctatctactttgtgtccttcgtgctgacggcccagttcgtgctagtcaacgtggtgatcgccgtgctgatgaagcacctggaggagagcaacaaggaggccaaggaggaggccgagctagaggctgagctggagctggagatgaagaccctcagcccccagccccactcgccactgggcagccccttcctctggcctggggtcgagggccccgacagccccgacagccccaagcctggggctctgcacccagcggcccacgcgagatcagcctcccacttttccctggagcaccccacgatgcagccccaccccacggagctgccaggaccagacttactgactgtgcggaagtctggggtcagccgaacgcactctctgcccaatgacagctacatgtgtcggcatgggagcactgccgaggggcccctgggacacaggggctgggggctccccaaagctcagtcaggctccgtcttgtccgttcactcccagccagcagataccagctacatcctgcagcttcccaaagatgcacctcatctgctccagccccacagcgccccaacctggggcaccatccccaaactgcccccaccaggacgctcccctttggctcagaggccactcaggcgccaggcagcaataaggactgactccttggacgttcagggtctgggcagccgggaagacctgctggcagaggtgagtgggccctccccgcccctggcccgggcctactctttctggggccagtcaagtacccaggcacagcagcactcccgcagccacagcaagatctccaagcacatgaccccgccagccccttgcccaggcccagaacccaactggggcaagggccctccagagaccagaagcagcttagagttggacacggagctgagctggatttcaggagacctcctgccccctggcggccaggaggagcccccatccccacgggacctgaagaagtgctacagcgtggaggcccagagctgccagcgccggcctacgtcctggctggatgagcagaggagacactctatcgccgtcagctgcctggacagcggctcccaaccccacctgggcacagacccctctaaccttgggggccagcctcttggggggcctgggagccggcccaagaaaaaactcagcccgcctagtatcaccatagacccccccgagagccaaggtcctcggaccccgcccagccctggtatctgcctccggaggagggctccgtccagcgactccaaggatcccttggcctctggcccccctgacagcatggctgcctcgccctccccaaagaaagatgtgctgagtctctccggtttatcctctgacccagcagacctggacccctgagtcctgccccacttt

SEQ ID NO: 90307 - protein, 2232 aa, Artificial Sequence
  derived and/or modified sequence
MDEEEDGAGAEESGQPRSFMRLNDLSGAGGRPGPGSAEKDPGSADSEAEGLPYPALAPVVFFYLSQDSRPRSWCLRTVCNPWFERISMLVILLNCVTLGMFRPCEDIACDSQRCRILQAFDDFIFAFFAVEMVVKMVALGIFGKKCYLGDTWNRLDFFIVIAGMLEYSLDLQNVSFSAVRTVRVLRPLRAINRVPSMRILVTLLLDTLPMLGNVLLLCFFVFFIFGIVGVQLWAGLLRNRCFLPENFSLPLSVDLERYYQTENEDESPFICSQPRENGMRSCRSVPTLRGDGGGGPPCGLDYEAYNSSSNTTCVNWNQYYTNCSAGEHNPFKGAINFDNIGYAWIAIFQVITLEGWVDIMYFVMDAHSFYNFIYFILLIIVGSFFMINLCLVVIATQFSETKQRESQLMREQRVRFLSNASTLASFSEPGSCYEELLKYLVYILRKAARRLAQVSRAAGVRVGLLSSPAPLGGQETQPSSSCSRSHRRLSVHHLVHHHHHHHHHYHLGNGTLRAPRASPEIQDRDANGSRRLMLPPPSTPALSGAPPGGAESVHSFYHADCHLEPVRCQAPPPRSPSEASGRTVGSGKVYPTVHTSPPPETLKEKALVEVAASSGPPTLTSLNIPPGPYSSMHKLLETQSTGACQSSCKISSPCLKADSGACGPDSCPYCARAGAGEVELADREMPDSDSEAVYEFTQDAQHSDLRDPHSRRQRSLGPDAEPSSVLAFWRLICDTFRKIVDSKYFGRGIMIAILVNTLSMGIEYHEQPEELTNALEISNIVFTSLFALEMLLKLLVYGPFGYIKNPYNIFDGVIVVISVWEIVGQQGGGLSVLRTFRLMRVLKLVRFLPALQRQLVVLMKTMDNVATFCMLLMLFIFIFSILGMHLFGCKFASERDGDTLPDRKNFDSLLWAIVTVFQILTQEDWNKVLYNGMASTSSWAALYFIALMTFGNYVLFNLLVAILVEGFQAEEISKREDASGQLSCIQLPVDSQGGDANKSESEPDFFSPSLDGDGDRKKCLALVSLGEHPELRKSLLPPLIIHTAATPMSLPKSTSTGLGEALGPASRRTSSSGSAEPGAAHEMKSPPSARSSPHSPWSAASSWTSRRSSRNSLGRAPSLKRRSPSGERRSLLSGEGQESQDEEESSEEERASPAGSDHRHRGSLEREAKSSFDLPDTLQVPGLHRTASGRGSASEHQDCNGKSASGRLARALRPDDPPLDGDDADDEGNLSKGERVRAWIRARLPACCLERDSWSAYIFPPQSRFRLLCHRIITHKMFDHVVLVIIFLNCITIAMERPKIDPHSAERIFLTLSNYIFTAVFLAEMTVKVVALGWCFGEQAYLRSSWNVLDGLLVLISVIDILVSMVSDSGTKILGMLRVLRLLRTLRPLRVISRAQGLKLVVETLMSSLKPIGNIVVICCAFFIIFGILGVQLFKGKFFVCQGEDTRNITNKSDCAEASYRWVRHKYNFDNLGQALMSLFVLASKDGWVDIMYDGLDAVGVDQQNFHKCRQHQEEEEARRREEKRLRRLEKKRRKAQCKPYYSDYSRFRLLVHHLCTSHYLDLFITGVIGLNVVTMAMEHYQQPQILDEALKICNYIFTVIFVLESVFKLVAFGFRRFFQDRWNQLDLAIVLLSIMGITLEEIEVNASLPINPTIIRIMRVLRIARVLKLLKMAVGMRALLDTVMQALPQVGNLGLLFMLLFFIFAALGVELFGDLECDETHPCEGLGRHATFRNFGMAFLTLFRVSTGDNWNGIMKDTLRDCDQESTCYNTVISPIYFVSFVLTAQFVLVNVVIAVLMKHLEESNKEAKEEAELEAELELEMKTLSPQPHSPLGSPFLWPGVEGPDSPDSPKPGALHPAAHARSASHFSLEHPTMQPHPTELPGPDLLTVRKSGVSRTHSLPNDSYMCRHGSTAEGPLGHRGWGLPKAQSGSVLSVHSQPADTSYILQLPKDAPHLLQPHSAPTWGTIPKLPPPGRSPLAQRPLRRQAAIRTDSLDVQGLGSREDLLAEVSGPSPPLARAYSFWGQSSTQAQQHSRSHSKISKHMTPPAPCPGPEPNWGKGPPETRSSLELDTELSWISGDLLPPGGQEEPPSPRDLKKCYSVEAQSCQRRPTSWLDEQRRHSIAVSCLDSGSQPHLGTDPSNLGGQPLGGPGSRPKKKLSPPSITIDPPESQGPRTPPSPGICLRRRAPSSDSKDPLASGPPDSMAASPSPKKDVLSLSGLSSDPADLDP

SEQ ID NO: 90308 - DNA, 6699 bp, Artificial Sequence
  derived and/or modified sequence
atggacgaggaggaggacggcgccggcgccgaggagagcggccagcccagaagcttcatgagactgaacgacctgagcggcgccggcggcagacccggccccggcagcgccgagaaggaccccggcagcgccgacagcgaggccgagggcctgccctaccccgccctggcccccgtggtgttcttctacctgagccaggacagcagacccagaagctggtgcctgagaaccgtgtgcaacccctggttcgagagaatcagcatgctggtgatcctgctgaactgcgtgaccctgggcatgttcagaccctgcgaggacatcgcctgcgacagccagagatgcagaatcctgcaggccttcgacgacttcatcttcgccttcttcgccgtggagatggtggtgaagatggtggccctgggcatcttcggcaagaagtgctacctgggcgacacctggaacagactggacttcttcatcgtgatcgccggcatgctggagtacagcctggacctgcagaacgtgagcttcagcgccgtgagaaccgtgagagtgctgagacccctgagagccatcaacagagtgcccagcatgagaatcctggtgaccctgctgctggacaccctgcccatgctgggcaacgtgctgctgctgtgcttcttcgtgttcttcatcttcggcatcgtgggcgtgcagctgtgggccggcctgctgagaaacagatgcttcctgcccgagaacttcagcctgcccctgagcgtggacctggagagatactaccagaccgagaacgaggacgagagccccttcatctgcagccagcccagagagaacggcatgagaagctgcagaagcgtgcccaccctgagaggcgacggcggcggcggccccccctgcggcctggactacgaggcctacaacagcagcagcaacaccacctgcgtgaactggaaccagtactacaccaactgcagcgccggcgagcacaaccccttcaagggcgccatcaacttcgacaacatcggctacgcctggatcgccatcttccaggtgatcaccctggagggctgggtggacatcatgtacttcgtgatggacgcccacagcttctacaacttcatctacttcatcctgctgatcatcgtgggcagcttcttcatgatcaacctgtgcctggtggtgatcgccacccagttcagcgagaccaagcagagagagagccagctgatgagagagcagagagtgagattcctgagcaacgccagcaccctggccagcttcagcgagcccggcagctgctacgaggagctgctgaagtacctggtgtacatcctgagaaaggccgccagaagactggcccaggtgagcagagccgccggcgtgagagtgggcctgctgagcagccccgcccccctgggcggccaggagacccagcccagcagcagctgcagcagaagccacagaagactgagcgtgcaccacctggtgcaccaccaccaccaccaccaccaccactaccacctgggcaacggcaccctgagagcccccagagccagccccgagatccaggacagagacgccaacggcagcagaagactgatgctgcccccccccagcacccccgccctgagcggcgccccccccggcggcgccgagagcgtgcacagcttctaccacgccgactgccacctggagcccgtgagatgccaggcccccccccccagaagccccagcgaggccagcggcagaaccgtgggcagcggcaaggtgtaccccaccgtgcacaccagccccccccccgagaccctgaaggagaaggccctggtggaggtggccgccagcagcggcccccccaccctgaccagcctgaacatcccccccggcccctacagcagcatgcacaagctgctggagacccagagcaccggcgcctgccagagcagctgcaagatcagcagcccctgcctgaaggccgacagcggcgcctgcggccccgacagctgcccctactgcgccagagccggcgccggcgaggtggagctggccgacagagagatgcccgacagcgacagcgaggccgtgtacgagttcacccaggacgcccagcacagcgacctgagagacccccacagcagaagacagagaagcctgggccccgacgccgagcccagcagcgtgctggccttctggagactgatctgcgacaccttcagaaagatcgtggacagcaagtacttcggcagaggcatcatgatcgccatcctggtgaacaccctgagcatgggcatcgagtaccacgagcagcccgaggagctgaccaacgccctggagatcagcaacatcgtgttcaccagcctgttcgccctggagatgctgctgaagctgctggtgtacggccccttcggctacatcaagaacccctacaacatcttcgacggcgtgatcgtggtgatcagcgtgtgggagatcgtgggccagcagggcggcggcctgagcgtgctgagaaccttcagactgatgagagtgctgaagctggtgagattcctgcccgccctgcagagacagctggtggtgctgatgaagaccatggacaacgtggccaccttctgcatgctgctgatgctgttcatcttcatcttcagcatcctgggcatgcacctgttcggctgcaagttcgccagcgagagagacggcgacaccctgcccgacagaaagaacttcgacagcctgctgtgggccatcgtgaccgtgttccagatcctgacccaggaggactggaacaaggtgctgtacaacggcatggccagcaccagcagctgggccgccctgtacttcatcgccctgatgaccttcggcaactacgtgctgttcaacctgctggtggccatcctggtggagggcttccaggccgaggagatcagcaagagagaggacgccagcggccagctgagctgcatccagctgcccgtggacagccagggcggcgacgccaacaagagcgagagcgagcccgacttcttcagccccagcctggacggcgacggcgacagaaagaagtgcctggccctggtgagcctgggcgagcaccccgagctgagaaagagcctgctgccccccctgatcatccacaccgccgccacccccatgagcctgcccaagagcaccagcaccggcctgggcgaggccctgggccccgccagcagaagaaccagcagcagcggcagcgccgagcccggcgccgcccacgagatgaagagcccccccagcgccagaagcagcccccacagcccctggagcgccgccagcagctggaccagcagaagaagcagcagaaacagcctgggcagagcccccagcctgaagagaagaagccccagcggcgagagaagaagcctgctgagcggcgagggccaggagagccaggacgaggaggagagcagcgaggaggagagagccagccccgccggcagcgaccacagacacagaggcagcctggagagagaggccaagagcagcttcgacctgcccgacaccctgcaggtgcccggcctgcacagaaccgccagcggcagaggcagcgccagcgagcaccaggactgcaacggcaagagcgccagcggcagactggccagagccctgagacccgacgacccccccctggacggcgacgacgccgacgacgagggcaacctgagcaagggcgagagagtgagagcctggatcagagccagactgcccgcctgctgcctggagagagacagctggagcgcctacatcttccccccccagagcagattcagactgctgtgccacagaatcatcacccacaagatgttcgaccacgtggtgctggtgatcatcttcctgaactgcatcaccatcgccatggagagacccaagatcgacccccacagcgccgagagaatcttcctgaccctgagcaactacatcttcaccgccgtgttcctggccgagatgaccgtgaaggtggtggccctgggctggtgcttcggcgagcaggcctacctgagaagcagctggaacgtgctggacggcctgctggtgctgatcagcgtgatcgacatcctggtgagcatggtgagcgacagcggcaccaagatcctgggcatgctgagagtgctgagactgctgagaaccctgagacccctgagagtgatcagcagagcccagggcctgaagctggtggtggagaccctgatgagcagcctgaagcccatcggcaacatcgtggtgatctgctgcgccttcttcatcatcttcggcatcctgggcgtgcagctgttcaagggcaagttcttcgtgtgccagggcgaggacaccagaaacatcaccaacaagagcgactgcgccgaggccagctacagatgggtgagacacaagtacaacttcgacaacctgggccaggccctgatgagcctgttcgtgctggccagcaaggacggctgggtggacatcatgtacgacggcctggacgccgtgggcgtggaccagcagaacttccacaagtgcagacagcaccaggaggaggaggaggccagaagaagagaggagaagagactgagaagactggagaagaagagaagaaaggcccagtgcaagccctactacagcgactacagcagattcagactgctggtgcaccacctgtgcaccagccactacctggacctgttcatcaccggcgtgatcggcctgaacgtggtgaccatggccatggagcactaccagcagccccagatcctggacgaggccctgaagatctgcaactacatcttcaccgtgatcttcgtgctggagagcgtgttcaagctggtggccttcggcttcagaagattcttccaggacagatggaaccagctggacctggccatcgtgctgctgagcatcatgggcatcaccctggaggagatcgaggtgaacgccagcctgcccatcaaccccaccatcatcagaatcatgagagtgctgagaatcgccagagtgctgaagctgctgaagatggccgtgggcatgagagccctgctggacaccgtgatgcaggccctgccccaggtgggcaacctgggcctgctgttcatgctgctgttcttcatcttcgccgccctgggcgtggagctgttcggcgacctggagtgcgacgagacccacccctgcgagggcctgggcagacacgccaccttcagaaacttcggcatggccttcctgaccctgttcagagtgagcaccggcgacaactggaacggcatcatgaaggacaccctgagagactgcgaccaggagagcacctgctacaacaccgtgatcagccccatctacttcgtgagcttcgtgctgaccgcccagttcgtgctggtgaacgtggtgatcgccgtgctgatgaagcacctggaggagagcaacaaggaggccaaggaggaggccgagctggaggccgagctggagctggagatgaagaccctgagcccccagccccacagccccctgggcagccccttcctgtggcccggcgtggagggccccgacagccccgacagccccaagcccggcgccctgcaccccgccgcccacgccagaagcgccagccacttcagcctggagcaccccaccatgcagccccaccccaccgagctgcccggccccgacctgctgaccgtgagaaagagcggcgtgagcagaacccacagcctgcccaacgacagctacatgtgcagacacggcagcaccgccgagggccccctgggccacagaggctggggcctgcccaaggcccagagcggcagcgtgctgagcgtgcacagccagcccgccgacaccagctacatcctgcagctgcccaaggacgccccccacctgctgcagccccacagcgcccccacctggggcaccatccccaagctgcccccccccggcagaagccccctggcccagagacccctgagaagacaggccgccatcagaaccgacagcctggacgtgcagggcctgggcagcagagaggacctgctggccgaggtgagcggccccagcccccccctggccagagcctacagcttctggggccagagcagcacccaggcccagcagcacagcagaagccacagcaagatcagcaagcacatgaccccccccgccccctgccccggccccgagcccaactggggcaagggcccccccgagaccagaagcagcctggagctggacaccgagctgagctggatcagcggcgacctgctgccccccggcggccaggaggagccccccagccccagagacctgaagaagtgctacagcgtggaggcccagagctgccagagaagacccaccagctggctggacgagcagagaagacacagcatcgccgtgagctgcctggacagcggcagccagccccacctgggcaccgaccccagcaacctgggcggccagcccctgggcggccccggcagcagacccaagaagaagctgagcccccccagcatcaccatcgacccccccgagagccagggccccagaaccccccccagccccggcatctgcctgagaagaagagcccccagcagcgacagcaaggaccccctggccagcggcccccccgacagcatggccgccagccccagccccaagaaggacgtgctgagcctgagcggcctgagcagcgaccccgccgacctggacccctag

SEQ ID NO: 90309 - DNA, 6699 bp, Artificial Sequence
  derived and/or modified sequence
atggacgaggaggaagacggtgccggcgccgaggagtctgggcaaccaaggagctttatgaggttgaacgacctgtccggggccggtggtagaccagggcccggcagtgccgaaaaagatccagggtccgccgactccgaagctgaggggcttccatacccagcccttgccccagtagtcttcttctaccttagccaggatagtcgaccaaggtcttggtgcctccggacagtgtgtaatccctggttcgaaaggatctccatgctcgtcatcctactgaactgcgtcaccctcggcatgtttcgcccatgtgaggatattgcctgcgatagtcagaggtgcagaatattgcaagcctttgatgattttatattcgcttttttcgctgtggagatggttgtcaagatggtggctttagggattttcgggaaaaaatgctatctcggtgacacttggaatcggctggatttctttatagttatcgccggcatgctggagtactccttagacttgcaaaacgtcagttttagcgccgtccgaacagttcgtgtgcttcggcccttgagagctatcaatagagtgccaagtatgagaatcctggtgaccttgttgctagatactctcccgatgctcggcaacgtcctcctcctgtgcttctttgttttctttatctttgggattgtaggagtccaactctgggcaggactgctccgcaaccggtgtttcctgccagaaaacttcagcctacccttgtcggtagatctggaacgctattaccagacagaaaatgaagacgaatcaccttttatctgtagccaaccacgggaaaatggcatgcgctcctgtcgttccgtgcccacactacggggtgacgggggaggaggccccccctgcgggctggattacgaggcttacaacagctcaagtaacaccacatgtgtcaactggaaccaatattatacaaactgctctgccggcgaacacaacccttttaaaggagcaattaacttcgataatataggctatgcctggatagccatcttccaagtgataaccttggagggttgggttgacattatgtacttcgtgatggacgcccatagcttctacaattttatttactttatattactcatcatcgttggttcattcttcatgattaatctctgcctagtggtgatagccacgcagttctccgaaaccaaacaacgggaatcacagcttatgcgtgagcagcgagtgcgtttcctgtccaatgccagcaccctggcctccttcagcgagccgggatcatgctacgaggagcttctaaagtacctggtgtacatactcagaaaggccgcgcgtcgcttagctcaagtgtctcgggcagctggagtcagagtgggactgctgagctcaccagccccgctgggaggacaggaaacacagcccagctcttcctgctctagatcgcacaggcggctgagcgtccaccacctggtgcaccatcaccatcaccaccaccaccattaccacctgggcaatgggacgcttcgagccccaagagcatcaccggagattcaagacagggacgcaaatgggtcgcgccgcctgatgctcccaccgccttctacccctgctcttagtggggctccccccgggggggcggaaagtgtccactccttttaccatgccgactgccacctggaacctgtccgttgccaggccccacctcctcgttctccctctgaggccagtgggaggactgtgggcagcgggaaagtatatccaactgttcacacaagcccccctcctgagacactaaaagaaaaagctctggtagaagttgctgcatctagcgggccccccacactgacttcactaaacattcccccagggccatattcatccatgcataaactccttgagacccaatctaccggagcctgccagtcctcctgtaaaattagttccccctgcttaaaggcggattccggcgcctgcggaccagactcatgcccctactgtgctagggctggggccggggaggttgaattggctgatcgggagatgcctgatagtgacagtgaagcagtgtatgagttcacacaggatgcacagcacagtgacttgcgcgacccccactctaggcgccagcgctcactggggccagacgctgagccctcttctgtccttgctttttggcggctaatctgcgacacatttaggaaaattgttgacagcaaatatttcggaaggggcattatgatcgcaatcttagtgaacacattatcaatgggcattgagtatcacgagcagcccgaagagctaacaaatgccttagagatctcaaacattgtttttacttctctattcgcactcgagatgctactaaaacttctagtctacgggccctttggctacatcaagaatccatacaacatcttcgatggcgttattgtcgtaatcagtgtgtgggagatcgtcggccagcagggcgggggactctctgtgttgcgaacctttagactgatgcgagtgttgaagctcgtgcgtttcttgcctgccctgcagcgccagcttgtcgtattgatgaaaactatggataacgttgccactttttgcatgctcttgatgctgttcattttcatcttttctatcctggggatgcacctgtttggatgtaagttcgcttctgagagggacggggacacactgcctgatagaaagaattttgacagcctcctgtgggctattgtgacagtgtttcaaatcttgacacaggaggattggaataaggtactgtataatgggatggcttcaacttcctcctgggcagctctgtattttatcgctctcatgacatttggcaactacgtactattcaaccttctcgttgctatattggtggagggcttccaggctgaagagattagcaaaagagaagatgccagtgggcagctctcgtgtatccagctgccagtggactcacaggggggcgatgcaaataagagtgagtcagagcctgacttcttctcaccctcattggacggggacggggacagaaagaaatgcctcgctctagtgtcactgggggagcaccctgaactgagaaagagcctactccccccactgatcatccacacagccgcaacccctatgtccctgcctaaatcaacttcgacaggcctgggggaggccttaggcccggcttcacgccgcacttcatcgagtggatcagctgaaccaggcgccgcacacgaaatgaagagcccaccatccgcgaggagttcccctcactccccttggtctgctgcaagttcttggacatccaggaggagttcacggaactcacttggcagagcgcctagtctgaagcggcgcagcccctcaggtgagcgaagatccctgttgtcgggcgaaggccaggagtctcaagacgaagaggagagctctgaggaagaacgcgcatcacccgctggctccgatcatagacacagaggatcgctcgagcgtgaggctaagtccagcttcgatctacccgacacgctccaggtgcctggcctgcacaggacggccagtggcagagggtcagcctctgaacaccaggactgcaacggaaagtctgctagtggtcggctggcccgcgccctcaggcccgatgacccccctctggacggcgatgatgcagacgatgaggggaacctctcaaaaggcgaacgtgttagagcatggatccgtgctcggctgcccgcctgctgcttagaacgggattcttggtctgcttatatatttccccctcaaagtcggtttaggctgctgtgtcacagaatcattactcataaaatgtttgaccacgttgttttggtaattattttcctcaattgtattactatcgctatggaacggcccaaaatcgacccccatagcgccgaaaggatctttctcactctttcaaattacatatttacagccgtcttcctggccgaaatgacagttaaggtggtggccttaggatggtgtttcggcgagcaggcctacctcaggagctcctggaacgtgctcgacggactactggtcctgattagcgttattgacattctggtaagcatggttagcgactctggaaccaaaatcctcggcatgctgcgagtgcttcgcttgctcaggacccttcggcccctgcgggtgatttcgcgcgcacagggactcaaactggtagtggaaactctgatgtcatcattgaaaccaataggcaatatcgtcgtgatctgttgcgccttctttatcatcttcggaattcttggtgtccaactcttcaaggggaaattctttgtgtgtcaaggcgaagatacacggaacataacaaacaaatccgattgcgcagaggcaagttaccgctgggtgagacacaaatacaattttgataatcttgggcaggcccttatgagcctgttcgtgctggcttcaaaggatggctgggttgatataatgtacgatggtctggatgctgttggcgtcgatcagcagaacttccacaagtgccgtcaacatcaggaagaagaggaggcaagacggcgtgaggagaagcgcctgcgccggctggaaaagaagcggagaaaagcccagtgtaaaccttattacagcgattacagcaggtttagactgctcgttcatcatctctgtacatcgcattacctggacctgttcataaccggcgtgattggacttaacgtggtgaccatggcaatggagcactaccagcagccgcaaatactggacgaagccttgaagatctgcaattacatattcaccgtaatatttgtcctggagagtgtttttaagctcgtcgcctttggattccgcaggttcttccaggataggtggaaccagctagatctcgcaattgtgctcctgtctatcatgggaatcactctggaagaaatcgaagtgaacgcctctctgccaataaatccgaccattatccgcatcatgagagtactgcgcatagctcgcgtattaaagttgctcaagatggcagtaggcatgcgcgcccttctcgacacggtgatgcaggcacttccgcaggtcggaaatctggggttgctgttcatgctgctgttttttatttttgcagcactgggcgtggaactgttcggagatctggaatgtgacgaaactcatccctgtgagggcctcggcagacacgcgacattccggaattttgggatggctttcttaaccctgtttcgtgtgtccacaggcgataactggaatgggatcatgaaagacactcttagggattgcgatcaggaaagcacatgttataacacggtgatttctcccatatatttcgtttccttcgttctaaccgcccagtttgttttggtgaacgttgtgatcgcagttctaatgaaacacctggaggagagtaataaggaggccaaagaggaagccgagctggaggcagaacttgaattggagatgaagactttgtcaccccagccacattcacctctgggatctccatttctgtggcccggtgtggaagggccagacagcccagacagtcctaaacccggggcattacaccccgctgcccatgcccggtctgcctcccattttagtttggaacacccaacaatgcaacctcaccctacagaacttccaggtcccgacctgctcaccgtgcgtaaatctggcgtctcacggacacactcgcttccaaacgattcatatatgtgtagacacggatccacagccgaagggccactggggcatcgcgggtggggcctgcccaaggcccagagtgggtcagtactttctgttcacagtcagcccgccgacactagctatattctgcagctgccaaaggacgcacctcaccttctgcagccccatagtgctcctacctggggcacaattccaaagctccctcctcccgggaggtctcctctggcccaaagacccctgcgccgacaggccgcaattcggacggatagcttagatgtccaagggctcggctcccgggaggatctcctcgctgaagtctccggtccttctccccctctggcccgggcatattccttttggggccagagctctacccaagcccaacaacattcgaggtcacatagcaagattagcaagcatatgacgccccctgctccatgcccaggccccgaacccaactggggcaagggcccccccgaaacacgtagctctctggaactggataccgaactgagttggatctcaggcgacctgctaccccccggcggtcaggaggagccaccttccccccgggatctcaagaaatgttattcggtggaagcccaaagctgccagcgccgtcccacgtcatggttggatgaacagagacgccactcaatcgctgtttcttgcctggatagcggtagccagccccatctgggtaccgaccctagcaacttgggcgggcaaccactgggcgggcctggcagcaggcccaagaagaagctgtcacccccgtcaattactatagatcccccagaaagccaagggccccgcaccccacccagtcccggcatatgcctaagacggcgcgcaccatcgtcggattctaaggaccccctggcaagtggccctccagattcaatggcagcatccccctcccctaagaaagatgtgctgtcattatccggcctctcttctgatcctgccgatctggacccctag

SEQ ID NO: 90310 - DNA, 6699 bp, Artificial Sequence
  derived and/or modified sequence
atggatgaggaggaggatggagctggagctgaggagagcggccagcccaggagcttcatgaggctgaatgacctgagcggggccggcggccggcccggccctggcagcgctgagaaggaccccggcagcgctgacagcgaggccgagggcctgccctacccagccctggcccctgtggtgttcttctacctgagccaggacagccggcccaggtcctggtgcctgaggacagtgtgcaacccctggtttgagcgcatctccatgctggtgatcctgctgaactgtgtgaccctgggcatgttccggccctgtgaagatattgcctgtgacagccagcgctgccgcatcctgcaggcctttgatgacttcatctttgccttctttgctgtggagatggtggtgaagatggtggccctgggcatctttgggaagaagtgctacctgggggacacctggaaccggctggacttcttcatcgtgattgctggcatgctggagtacagcctggacctgcagaatgtgtccttctctgctgtgaggacagtgcgggtgctgcggcccctgcgggccatcaacagagtgcccagcatgaggatcctggtgaccctgctgctggacaccctgcccatgctgggcaatgtgctgctgctgtgcttctttgtgttcttcatctttggaattgtgggcgtgcagctgtgggccggcctgctgaggaaccgctgcttcctgcctgagaacttcagcctgcccctgtctgtggacctggagcgctactaccagacagaaaatgaagatgagagccccttcatctgcagccagccccgggagaatggcatgaggagctgccgctctgtgcccaccctgcggggagatggcggcggcggccccccctgtggcctggactatgaggcctacaacagcagcagcaacaccacctgtgtgaactggaaccagtactacaccaactgcagcgctggggagcacaaccccttcaagggggccatcaactttgacaacatcggctacgcctggatcgccatcttccaggtgatcaccctggagggctgggtggacatcatgtactttgtgatggatgcccacagcttctacaacttcatctacttcatcctgctgatcatcgtgggcagcttcttcatgatcaacctgtgcctggtggtgattgccacccagttcagcgagaccaagcagcgggagagccagctgatgagggagcagagggtgcgcttcctgagcaatgccagcaccctggccagcttcagcgagcccggcagctgctatgaggagctgctgaagtacctggtgtacatcctgaggaaggccgcccggcggctggcccaggtgtccagagctgctggggtgcgggtgggcctgctgagcagccctgcccccctgggcggccaggagacccagcccagcagcagctgcagccgcagccaccggcggctgtctgtgcaccacctggtgcaccaccaccaccaccaccaccaccactaccacctgggcaatggcaccctgcgggccccccgggccagccctgagatccaggacagagatgccaacggcagccggcggctgatgctgcccccacccagcaccccagccctgagcggggcccctcctggaggagctgagagcgtgcacagcttctaccacgccgactgccacctggagcctgtgcgctgccaggcccccccacccaggagccccagcgaggccagcggccgcacagtgggcagcggcaaggtgtaccccaccgtgcacaccagccccccacctgagaccctgaaggagaaggccctggtggaggtggccgccagcagcggcccccccaccctgaccagcctgaacatccccccaggcccctacagctccatgcacaagctgctggagacccagagcactggagcctgccagagcagctgcaagatcagcagcccctgcctgaaggctgacagcggggcctgtggccctgacagctgcccctactgtgcccgggccggggccggggaggtggagctggccgaccgggagatgccagacagcgacagcgaggccgtgtatgagttcacccaggatgcccagcacagcgacctgcgggacccccacagccggcggcagaggagcctgggcccagatgctgagcccagctctgtgctggccttctggaggctcatctgtgacaccttcaggaagatcgtggacagcaagtacttcggccggggcatcatgattgccatcctggtgaacaccctgtccatgggcatcgagtaccacgagcagcctgaggagctgaccaatgccctggagatcagcaacatcgtgttcaccagcctgtttgccctggagatgctgctgaagctgctggtgtatggccccttcggctacatcaagaacccctacaacatctttgatggagtcatcgtggtgatctctgtgtgggagatcgtgggccagcagggcggcggcctgtctgtgctgcggaccttccggctgatgagggtgctgaagctggtgcgcttcctgcctgccctgcagaggcagctggtggtgctgatgaagaccatggacaacgtggccaccttctgcatgctgctgatgctgttcatcttcatcttcagcatcctgggcatgcacctgtttggctgcaagtttgccagcgagagagatggagacaccctgcctgacaggaagaactttgacagcctgctgtgggccatcgtgacagtgttccagatcctgacccaggaggactggaacaaggtgctgtacaacggcatggccagcaccagctcctgggccgccctgtacttcatcgccctgatgaccttcggcaactacgtgctcttcaacctgctggtggccatcctggtggagggcttccaggccgaggagatcagcaagcgggaggatgccagcggccagctgagctgcatccagctgcctgtggacagccagggcggagatgccaacaagtctgagagcgagccagacttcttcagccccagcctggatggagatggagacaggaagaagtgcctggccctggtgtccctgggggagcaccctgagctgaggaagagcctgctgcccccactcatcatccacacagctgccacccccatgagcctgcccaagagcaccagcacaggcctgggggaggccctgggccctgccagcaggaggaccagcagcagcggcagcgctgagcctggagctgcccacgagatgaagagcccccccagcgcccggagcagcccccacagcccctggagcgctgccagctcctggaccagccgccgcagcagcaggaacagcctgggccgggcccccagcctgaagagaagaagccccagcggggagcggcgcagcctgctgtctggagagggccaggagagccaggatgaggaggagagcagcgaggaggagcgggccagccctgctggcagtgaccaccgccaccggggcagcctggagcgggaggccaagagcagctttgacctgcctgacaccctgcaggtgcccggcctgcacaggacagccagcggccggggcagcgccagcgagcaccaggactgcaatggcaagagcgccagcggccgcctggcccgggccctgcggccagatgatcctcccctggatggagatgatgctgatgatgagggcaacctgagcaagggggagcgggtgcgggcctggatccgggcccggctgcctgcctgctgcctggagcgggacagctggagcgcctacatcttccccccccagagccgcttccggctgctgtgccaccgcatcatcacccacaagatgtttgaccacgtggtgctggtgatcatcttcctgaactgcatcaccatcgccatggagcggcccaagattgacccccacagcgctgagcgcatcttcctgaccctgagcaactacatcttcaccgctgtgttcctggccgagatgacagtgaaggtggtggccctgggctggtgcttcggggagcaggcctacctgcggagctcctggaatgtgctggatggcctgctggtgctgatctctgtgattgacatcctggtgtccatggtgtctgattctggcaccaagatcctgggcatgctgcgggtgctgcggctgctgcggaccctgcggcccctgcgggtcatcagccgggcccagggcctgaagctggtggtggagaccctgatgagcagcctgaagcccatcggcaacatcgtggtgatctgctgtgccttcttcatcatcttcggcatcctgggcgtgcagctgttcaagggcaagttctttgtgtgccagggcgaggacaccaggaacatcaccaacaagagtgactgtgccgaggccagctaccgctgggtgcgccacaagtacaactttgacaacctgggccaggccctgatgagcctgtttgtgctggccagcaaggatggctgggtggacatcatgtatgatggcctggatgctgtgggcgtggaccagcagaacttccacaagtgccggcagcaccaggaggaggaggaggcccggcggcgggaggagaagaggctgcggcggctggagaagaagaggaggaaggcccagtgcaagccctactacagcgactacagccgcttccggctgctggtgcaccacctgtgcaccagccactacctggacctcttcatcaccggggtgattggcctgaatgtggtgaccatggccatggagcactaccagcagccccagatcctggatgaggccctgaagatctgcaactacatcttcaccgtcatctttgtgctggagagcgtcttcaagctggtggccttcggcttccgccgcttcttccaggaccgctggaaccagctggacctggccatcgtgctgctgagcatcatgggcatcaccctggaggagattgaggtgaatgccagcctgcccatcaaccccaccatcatccgcatcatgagggtgctgcgcatcgcccgggtgctgaagctgctgaagatggctgtgggcatgagggccctgctggacacagtgatgcaggccctgccccaggtgggcaacctgggcctgctcttcatgctgctcttcttcatctttgctgccctgggcgtggagctgtttggagacctggagtgtgatgagacccacccctgtgagggcctgggcagacatgccaccttcaggaactttggcatggccttcctgaccctcttccgggtgtccactggagacaactggaatggcatcatgaaggacaccctgcgggactgtgaccaggagagcacctgctacaacacagtcatcagccccatctactttgtgtcctttgtgctgacagcccagtttgtgctggtgaatgtggtgattgctgtgctgatgaagcacctggaggagagcaacaaggaggccaaggaggaggccgagctggaggccgagctggagctggagatgaagaccctgagcccccagccccacagccccctgggcagccccttcctgtggccaggagtggagggccctgacagcccagacagccccaagccaggggccctgcaccctgctgcccacgcccggagcgccagccacttcagcctggagcaccccaccatgcagccccaccccacagagctgcccggccctgacctgctgactgtgaggaagagcggcgtgtccaggacccacagcctgcccaatgacagctacatgtgcagacatggcagcacagctgagggccccctgggccaccggggctggggcctgcccaaggcccagagcggctctgtgctgtctgtgcacagccagcctgctgacaccagctacatcctgcagctgcccaaggatgccccccacctgctgcagccccacagcgcccccacctggggcaccatccccaagctgcccccacctggccgcagccccctggcccagaggcccctgcggcggcaggccgccatcagaacagacagcctggatgtgcagggcctgggcagccgggaggacctgctggccgaggtgtctggccccagcccccccctggcccgggcctacagcttctggggccagagcagcacccaggcccagcagcacagccgcagccacagcaagatcagcaagcacatgaccccaccagccccctgccccggccctgagcccaactggggcaaaggacctcctgagaccaggagcagcctggagctggacacagagctgtcctggatcagcggggacctgctgcccccaggcggccaggaggagccccccagcccccgggacctgaagaagtgctacagcgtggaggcccagagctgccagaggcggcccacctcctggctggatgagcagaggaggcacagcattgctgtgtcctgcctggacagcggcagccagccccacctgggcacagaccccagcaacctgggcggccagcccctgggcggccctggcagccggcccaagaagaagctgagccccccatccatcaccatcgaccccccagagagccagggccccaggaccccacccagccctggcatctgcctgcggcggcgggcccccagcagtgacagcaaggaccccctggccagcggccccccagacagcatggccgccagccccagccccaagaaggatgtgctgagcctgagcggcctgagcagtgaccctgctgacctggacccctag

SEQ ID NO: 90311 - DNA, 6699 bp, Artificial Sequence
  derived and/or modified sequence
atggacgaggaggaggacggcgccggcgccgaggagagcggccagcccaggagcttcatgcgactaaatgacctttccggggctgggggaagacccgggcctgggagcgcagaaaaggatccaggttccgcagacagcgaagcggaggggctgccatacccagcactagcccctgtcgtattcttctacctctcccaggactcccgcccccgaagttggtgtctgaggaccgtttgtaacccatggttcgaacggatttcgatgctggttatcctcctaaattgcgtgaccctggggatgttccgtccttgtgaagatatcgcatgcgatagccagcgttgcaggatattacaggcctttgatgactttatctttgccttttttgccgttgaaatggtagtcaaaatggtggccctgggaatctttggaaagaagtgctatcttggcgatacctggaataggcttgacttttttatcgttattgctggcatgctagagtattcgctggatcttcagaatgtgtctttcagcgctgtccggactgtccgcgtattgcggcccttgagagccataaacagagtaccatcgatgaggatcttggtgacgctgttgctcgatactctcccaatgctgggtaacgtacttctgctctgtttctttgtctttttcattttcggcatagtcggagtacagttgtgggctggattgttaagaaatagatgtttccttccagaaaatttctctttacccttgagcgtggacctggagcgttactatcaaaccgagaatgaggacgagtccccgtttatctgcagccagcctagggagaatggcatgcgatcctgcaggtccgtgcctaccttgcgaggtgatggcggcggaggcccgccttgcggtctggattacgaagcttacaactctagctccaacacgacgtgtgtgaactggaatcagtactacacaaactgttctgcaggcgaacacaaccccttcaagggagccatcaattttgacaacatcggatatgcttggatcgcaattttccaagtcataaccctcgaaggctgggtagacatcatgtatttcgtgatggacgcccattctttctacaacttcatttacttcatcctcctgatcattgtaggatccttcttcatgataaacctgtgccttgtcgtgatcgccactcaattttccgaaacaaagcagcgggaaagccagctgatgcgtgagcagagggttcggtttttgtctaatgcttctacgctagcttctttcagcgagccaggtagctgttatgaggagcttctgaagtatttggtgtatatcctgcggaaggccgcccggaggttggctcaggtctcccgcgcagccggcgtgagagttggactcctctcctctccagccccactgggtggccaggagacgcagccatcttccagttgcagcaggagccatcggagactgtctgttcaccacttagttcatcaccaccaccatcaccatcaccattaccacctaggaaatgggaccctgcgcgctcccagagcgtcacccgagattcaggatagagatgcaaatggcagccggaggcttatgttgcctcccccttcaacacccgccctttccggggctccacccggtggggccgagtccgtacactccttttatcacgccgattgccacttagaaccagtgagatgtcaggccccccctccccggtccccatctgaggcatctggtaggacagttggatcaggcaaggtttacccgacagtgcatacttccccgccgccagaaacgctcaaagaaaaggcgctcgtcgaggtggcagcgtcaagcgggccgcctacactgaccagtcttaacattcctcccggcccctacagctccatgcacaaactcttggagacgcagtctactggagcatgccagagcagctgtaaaatttcaagtccatgtcttaaggccgatagcggggcgtgtggtccagattcctgcccttattgcgcaagagccggagccggcgaggtggagctggctgacagggagatgccggattctgactctgaagcagtttacgaattcacgcaagacgcccaacacagcgacctgcgggacccccattcgaggcgccagcgcagtttaggcccagacgctgaaccgtcatcagtgctggccttctggcgattaatctgtgacacgttcagaaaaattgttgactctaaatactttggacgaggaataatgattgccatcttggtgaacaccctatcgatgggcattgagtaccatgagcagcctgaggagctcaccaacgccctcgaaataagcaatattgtttttacaagcttgtttgcgctggaaatgctgcttaagctgctggtctacggcccatttggttacatcaagaacccctacaatattttcgatggcgtgatagtggtgatctcagtctgggagattgtcggtcagcaagggggaggtctgtcagttctgcggacctttaggcttatgcgtgtactcaaacttgtgcggtttctgccggctctgcaaagacagctcgtggtactgatgaagacaatggataacgtagcgaccttctgtatgctgcttatgttgttcatattcatctttagtatcctgggcatgcacctttttggatgtaagttcgcttcagagcgtgacggggatacactccccgatcgtaagaattttgactctctgttgtgggccatcgtgaccgtgttccagattctcacccaggaagactggaataaggttttatacaacggcatggcgtcaacttccagctgggctgccctctatttcattgcattgatgacgtttggcaactacgtactgtttaacttgctcgtggccattctggtcgaagggttccaagccgaagagattagtaagcgagaggatgcctccggacaactgagttgtatccagcttcccgtggattcccaaggcggagacgctaataagtctgagtccgaacccgatttcttctctccttcactggatggcgacggagatcgaaaaaaatgcctggcgttagtttctttgggagaacaccccgaactgcgcaagtccctgctccctcccctgatcatccacactgctgccactcctatgtcactccccaaatccacttctacaggtctcggcgaggcactcggaccggcctcaaggaggacctctagttccgggtcggccgaacccggggcagcccatgaaatgaagagccccccgtccgccagatcctctccgcattcaccatggtcagcagcatcttcatggaccagccggcggtcgtcccgcaattctttaggacgtgcacccagtctcaagcgccgttctccaagcggggagcgaaggtctctcctgtcaggggaaggccaggagtcccaagatgaagaggaaagcagtgaagaggaaagagcatcacctgccggctctgatcatcgacaccgaggcagcctcgagcgggaagccaagagcagtttcgacttgcctgatacgcttcaggtgcctggactccacaggaccgctagtggaagagggagcgcttcagagcatcaggactgtaatggaaaatccgcgagcgggaggctcgcaagggcacttagacctgacgacccccccctagatggcgatgacgcagacgacgaaggcaacctctcgaagggagaaagagtgcgtgcatggattagggctcgtttaccagcttgctgtctcgagcgggattcatggagcgcatatatattcccgcctcagtcaaggtttaggttgctttgccatcgcatcattacccacaaaatgttcgaccatgtcgttttggtgatcatctttctcaactgcatcaccatcgcaatggaaaggccaaaaatagatccccatagcgccgagcggattttcctgacacttagcaactacatatttacagcggtcttcctcgccgaaatgacagtgaaagtggtggccttgggctggtgcttcggcgaacaggcctatttgcgatcttcctggaacgttttagacggcctcctggttctcatttctgtgatcgacatactcgtgagtatggtttctgactccggtaccaaaatcctcggaatgctgagggtgctacgtctgctgcgcacactgcgcccactaagagttatttctcgcgctcagggactaaaattggtcgtggagactcttatgtcaagtctgaagcctatcggaaatatcgtagttatctgctgcgccttctttattatatttggaattttgggcgtccagttgtttaagggcaaattttttgtctgtcaaggggaggatactaggaacatcaccaacaaaagcgactgcgctgaggctagttatcgttgggttcgtcacaagtacaattttgacaacctaggccaggcgctaatgagtctgtttgttttagctagtaaggatggatgggtggatattatgtacgacggcctggacgccgttggggtggatcaacagaactttcacaaatgcagacagcaccaggaggaagaggaggctcgtaggagagaggaaaagaggctaaggagactggaaaagaaacgacggaaagctcaatgtaagccatattactcagactattctagatttcgactccttgtacatcatctgtgtacgtcccactacctggatctgtttattactggtgtgataggcttgaacgttgtaaccatggccatggagcactaccagcagccgcagatcctggatgaggccttaaaaatttgtaattatatatttaccgtgatatttgtccttgagtcggtgttcaagctggtcgcttttgggtttcgaagattcttccaggacaggtggaaccagctcgaccttgctatcgtattgctgtctattatgggaatcacgctggaggagattgaggtcaacgcaagcctgccaataaacccaactatcatcagaatcatgagggtgctcaggatcgccagggttctgaagctcctgaagatggccgtcgggatgagagctcttttagacaccgtgatgcaggctctgccacaggtcggcaacttgggcctcctgttcatgttgctgtttttcatcttcgccgctctaggggttgagttgttcggagaccttgagtgcgatgaaacccatccctgcgaagggttggggagacacgctacctttcgcaacttcggaatggctttcctgactctgtttagggtatctactggagacaattggaacggaatcatgaaggatactctgagagattgcgaccaggagtcgacttgctataacaccgtgattagccccatttatttcgtctcctttgttctgaccgctcagttcgtgctcgtcaacgtcgttatcgcagtgttgatgaagcacctcgaggaaagcaataaagaagcaaaagaagaggcagagctggaagccgagttggagcttgagatgaaaaccctctctcctcaacctcactcacctttaggtagcccttttctctggcctggagtagagggcccagatagccctgactcacccaaacctggcgccttgcatcccgccgcccacgctcggagcgctagtcatttttctctggagcatccgactatgcagccgcatcccacggagctgccaggaccggacctcctgactgtgcggaaatccggggtttctcgcactcattcactccccaatgactcatatatgtgccgtcacgggagcacagctgaggggcctcttggtcatagggggtgggggctccccaaggctcagtctggcagcgttttgtccgtccattcccagcctgccgatacaagttacattctccagctgccaaaggatgcgccgcatctgttacagccccactcagcgcctacttgggggacaatacccaagcttccccccccggggcgcagtccacttgcgcagaggccattgcgaagacaggccgctattagaaccgattctctggacgttcaaggcctgggaagtagagaagatctgctcgccgaggtttctggcccaagtcctcccctcgcacgcgcgtactctttttggggacaaagtagcacccaagcccagcagcattcccgatcccacagcaaaataagcaagcatatgaccccccccgcaccttgtccaggcccagagccaaattggggcaaaggcccaccagagactaggagctcccttgaactcgatacggagctgtcttggatttcaggcgacctgctgccgcccggagggcaggaagagcctccgagtcccagggatctaaagaaatgctatagtgtggaagcgcaatcatgtcagaggagacctacgtcgtggctcgacgaacagaggagacatagtatcgcagtaagctgcctggactcagggagtcaaccacatctgggaaccgatcctagcaacctagggggtcagcccttaggaggcccaggaagccggcccaagaaaaagctgagccctccatccataacgatcgatcccccggagagtcaagggccccggacacccccatctccgggaatttgcctgcggcgtagagccccttcctcggattctaaggatccccttgcctcaggcccacccgattcaatggccgcatctccatcgcccaaaaaagatgtcctgagcctctctgggctgagtagcgatcccgctgacctcgacccttag

SEQ ID NO: 90312 - DNA, 6698 bp, Artificial Sequence
  derived and/or modified sequence
atggatgaggaggaggatggcgctggtgcggaagagtccgggcagccgaggtcattcatgcgacttaacgatctgtcaggcgctggaggcagaccgggtccgggaagtgctgagaaagatccaggatccgctgacagcgaagctgaaggcttaccatacccagctctcgctccggtggtgttcttctacctttctcaggactccaggccccgttcttggtgcctgcggaccgtgtgtaacccctggttcgagagaatcagtatgttggtaatcttgctcaactgcgtgaccctgggtatgtttcggccttgcgaagacatcgcttgtgactcacagcgatgtagaatcctgcaggcttttgacgactttattttcgcattcttcgctgtggagatggtggtgaaaatggtcgccttgggtatcttcggaaagaagtgctacctgggcgacacgtggaacagactggattttttcatcgtgatcgctgggatgctggagtacagcctggatctgcagaatgtatcgttcagtgcagtgcggacggttcgagtgctaagaccgttgcgagcaatcaatagggtgccctccatgcgtattctggttacgttgctccttgatacactgcctatgttgggaaacgtactgctcctgtgtttttttgtattctttatcttcggcatcgtcggtgtgcagctctgggctgggctgcttaggaatcgatgtttcctgcctgagaacttttcccttcctctgtccgtagatcttgagaggtattatcaaacagagaacgaagacgaatcacccttcatctgtagccaaccacgagaaaacggaatgcgtagttgccgttctgtgcctacgctccgaggcgacggaggaggaggaccgccttgtggtctggactacgaggcctacaactcttccagcaacacgacctgtgttaactggaaccagtattacaccaactgctcagctggcgaacataacccgtttaaaggagctatcaactttgacaatattggctacgcctggatcgctatatttcaggtcattaccttagagggatgggttgatatcatgtattttgtgatggacgcccacagcttctataatttcatctatttcatcctattgatcattgttggtagtttcttcatgatcaatttatgccttgtggtgatcgcaacgcagttctctgagacgaagcagagagagtcccagctcatgcgagagcagagagtgaggtttctgtctaacgctagtaccctggccagtttctcagagccagggtcttgttacgaggaactgctgaagtaccttgtgtatatcctccgtaaggcagctcggcgactggctcaggtctctcgggcagctggagtgcgagtgggcttgcttagtagcccagcccctctgggcggtcaggagacacagccctcttcttcttgttcacggtcacaccgtcggctgtcggtacaccatctggtgcatcatcatcatcaccatcaccaccattatcacttgggcaatgggacgttgagagcgccaagggcctcaccagagattcaggaccgagatgctaatggcagtaggagactcatgttgccacctccctcaaccccagccctctccggggctccgccaggaggcgcagagtctgtgcattctttctaccacgcagactgtcatctggaaccagtgcggtgccaagcccctcccccaaggagcccaagcgaggccagcggaaggacagtgggcagcgggaaggtgtacccgacggtccacaccagcccgcctccagagacactcaaagagaaagccctggtagaagtggctgcttccagcggccctcctactctgacaagtctgaatatcccacccggaccgtatagcagcatgcacaagctgctggagacgcaatccacaggcgcttgtcagtccagttgtaaaatttcatctccgtgtctcaaagccgattcaggcgcatgtgggccagacagttgtccctactgtgctcgagcgggagcaggcgaggttgagttagctgacagggagatgcccgactcagatagcgaggccgtgtatgagttcacccaggatgctcagcattctgatcttcgggacccccattctcggaggcagcggagtctggggccagatgctgagcctagcagcgtgctcgccttctggcggctgatttgcgatacatttcgcaagattgtggactccaaatattttggccgtggtattatgattgctattctggtaaataccttaagtatgggcatcgagtatcatgaacagcctgaagaattgactaacgctctggagatttctaacattgtctttacatcccttttcgcactcgagatgctgttgaaactgcttgtgtacggacccttcggttatatcaaaaacccatacaacattttcgatggcgtgatcgttgtgataagtgtgtgggaaattgtcgggcagcagggtggcggattgagcgtgctgaggacgtttcgcctgatgcgcgtccttaagctggttagattcctgcccgcattgcaacgacaattggtggtattgatgaagaccatggataatgtagccactttttgtatgctactcatgctcttcatctttatatttagtattttgggcatgcatctatttgggtgcaagtttgcatccgaaagggacggcgacacactgcccgaccgcaaaaatttcgatagcctgttgtgggctatcgtgacagtgttccagatactgacgcaggaggactggaataaagtgctttataacggcatggccagcacctcttcttgggcggcactgtattttattgcactcatgacatttggtaactacgtgcttttcaatttactcgtggctatcctggttgaaggctttcaggccgaagaaatctccaaaagggaggatgctagcggacagctcagttgtatccagctgcccgttgatagccaagggggtgatgcgaacaaatctgaatctgagccagacttcttctccccgagtctcgacggagacggagaccgcaaaaaatgtctggcactggtgtcccttggtgaacaccccgaacttcggaaatctctgcttcccccactgatcatccataccgctgctacccctatgagcctgcccaaatccacctctaccggcctaggagaagcattgggccctgcttcaaggaggacatcatcctccggaagcgcggagccaggagctgcgcacgagatgaagtctcccccatccgctaggagctccccacactccccttggagtgctgcctctagctggacctctagaagaagctccaggaatagcttgggacgggctccttccctgaagaggcggtcgcccagcggggagcgcagaagcctgctttccggtgaagggcaggagtctcaggatgaagaagagtccagcgaggaagaacgcgcatcacccgcaggctcagaccatagacacagaggatcactggaacgggaggcaaaaagcagtttcgatcttccagacacactgcaagtcccagggctacaccggacagctagtgggagggggtctgccagcgagcaccaagactgtaacggtaaaagcgcctcggggaggctcgctcgcgctttacggcctgatgatcctcctctggatggggatgacgccgacgacgaggggaatctgagcaaaggtgaacgagtaagagcatggatcagagcgcgacttccagcatgctgtctggaacgggacagctggtcagcctatattttccccccacaatcacggttccgcctgctttgccacaggataataactcacaaaatgttcgatcacgtggtcctcgtgatcatcttccttaattgcattaccatcgcgatggaacggccaaagatcgacccacactcagcagaaagaatctttctgactctgagcaactatatcttcacagctgtgttcctcgcagaaatgacagtgaaagtggtggccctgggctggtgcttcggcgaacaggcctatctgcgctcttcttggaatgtgctggacggcttactggtcctcatatccgtgatagacatcctggtatcgatggtttcagattctggcacgaaaatactcggcatgctccgggtgctaaggcttctgcgcaccttgcgccctttaagggtaatatcgcgtgcccagggtctgaagttggtggtggaaaccctgatgagttcgttgaagcctattgggaacatcgtcgttatctgctgcgctttttttatcatcttcggtatcctcggcgtccagcttttcaaggggaagttcttcgtgtgccagggagaggataccagaaacattacaaataaaagtgattgcgcagaggctagttacagatgggtccgacataaatacaactttgacaatctgggtcaagccctgatgagcctgtttgttcttgccagcaaggacgggtgggtggacatcatgtatgacgggttagacgcagtaggcgtggaccaacagaactttcataaatgtcggcaacaccaggaagaggaggaagcccgacgacgggaggaaaaaagactccggcgactggaaaagaagcggaggaaggcacagtgcaaaccctattactcagattatagcaggtttagacttctggttcatcatctttgcacttcacactatctagatctgtttatcaccggggttatcggactcaacgtggtcaccatggccatggagcactaccagcaacctcagattttggacgaggctctcaaaatctgcaactatatctttacggtgatattcgtgttggaatccgtcttcaagctcgtggcttttgggtttcgccgttttttccaggaccgatggaaccagctagatctggccattgtgctgctttcgataatgggcattacactagaggagattgaagttaatgcttcactccccataaacccgaccataattaggataatgcgtgtgcttagaatcgccagggttctcaagttgctcaaaatggcggtgggcatgagagccttgcttgacacggtgatgcaggctctcccgcaggtcggcaacttgggcttactctttatgcttctgttctttattttcgccgctctcggcgtggaactgtttggagatctggaatgtgacgaaacccatccatgtgagggcctgggacgacatgccaccttcagaaactttggaatggcttttctaaccctgttccgtgtgtccacaggagacaattggaacggtataatgaaggataccttacgcgattgtgatcaggaaagcacatgctacaatacagtcatttcccccatctatttcgtgagcttcgtcctgacagctcagtttgtcttagttaacgtggtaatcgcggtactcatgaagcacctcgaggagagtaacaaggaggccaaggaggaggcagagctcgaggccgaactggaattggagatgaaaaccctctccccacagccccactcacccttgggcagcccgtttctgtggccaggcgtagaggggcctgattcaccggattcaccaaagccaggtgcactgcatcccgctgcccatgccagaagcgcaagccacttctcactcgagcaccctacaatgcagccacatcccacggaactgccgggaccagatctcctgacagttcgcaagtctggggtctctcgtactcactccctcccgaacgatagctacatgtgccgccatggctctaccgctgaaggtcccctgggccatcgtggctggggactgccaaaagcacagtcggggtccgttctatcagtccattcccagcccgcagacacctcatacattcttcagctccctaaagacgctccccacctgttacaaccccatagtgcacccacttggggaactattccaaagttgcctccacccggtaggagccccctcgcccagcggcctctaagacgccaggctgccatcagaactgattctttggatgtgcagggcctgggttcacgggaagatctgctggctgaagtcagcgggcctagtccccctcttgcaagagcctacagcttctggggtcagagcagcactcaggcccagcaacactcccggtcccatagcaagataagcaaacacatgacgccccctgccccatgtcctggcccagagcccaactgggggaaggggccaccagagactaggtcctctctggagctggatactgagctcagctggatctctggcgatctgctcccaccaggcggtcaggaagagccgccaagtccaagagatctaaagaaatgttatagcgtggaagcccaaagctgccagagacgtcccacctcctggctggacgaacagcggcgacattcgatcgcagtctcttgcctggattcaggcagccaaccacacctggggaccgatccaagcaacctgggcggacaaccacttggcggaccgggatcccgcccaaagaagaagctcagccctccctcgataaccatcgacccacccgaatcccaggggcctcgcaccccaccatcacccggaatctgtttacggcgtcgcgctccaagttccgactctaaagatcccctggcctccgggccaccagactcaatggccgcttcaccatccccaaagaaggatgtgctctcactcagcggactgtcctccgatccggctgatctggaccccta

SEQ ID NO: 90313 - DNA, 6714 bp, Artificial Sequence
  derived and/or modified sequence
atggacgaggaggaggatggagcgggcgccgaggagtcgggacagccccggagcttcatgcggctcaacgacctgtcgggggccgggggccggccggggccggggtcagcagaaaaggacccgggcagcgcggactccgaggcggaggggctgccgtacccggcgctggccccggtggttttcttctacttgagccaggacagccgcccgcggagctggtgtctccgcacggtctgtaacccctggtttgagcgcatcagcatgttggtcatccttctcaactgcgtgaccctgggcatgttccggccatgcgaggacatcgcctgtgactcccagcgctgccggatcctgcaggcctttgatgacttcatctttgccttctttgccgtggagatggtggtgaagatggtggccttgggcatctttgggaaaaagtgttacctgggagacacttggaaccggcttgactttttcatcgtcatcgcagggatgctggagtactcgctggacctgcagaacgtcagcttctcagctgtcaggacagtccgtgtgctgcgaccgctcagggccattaaccgggtgcccagcatgcgcatccttgtcacgttgctgctggatacgctgcccatgctgggcaacgtcctgctgctctgcttcttcgtcttcttcatcttcggcatcgtcggcgtccagctgtgggcagggctgcttcggaaccgatgcttcctacctgagaatttcagcctccccctgagcgtggacctggagcgctattaccagacagagaacgaggatgagagccccttcatctgctcccagccacgcgagaacggcatgcggtcctgcagaagcgtgcccacgctgcgcggggacgggggcggtggcccaccttgcggtctggactatgaggcctacaacagctccagcaacaccacctgtgtcaactggaaccagtactacaccaactgctcagcgggggagcacaaccccttcaagggcgccatcaactttgacaacattggctatgcctggatcgccatcttccaggtcatcacgctggagggctgggtcgacatcatgtactttgtgatggatgctcattccttctacaatttcatctacttcatcctcctcatcatcgtgggctccttcttcatgatcaacctgtgcctggtggtgattgccacgcagttctcagagaccaagcagcgggaaagccagctgatgcgggagcagcgtgtgcggttcctgtccaacgccagcaccctggctagcttctctgagcccggcagctgctatgaggagctgctcaagtacctggtgtacatccttcgtaaggcagcccgcaggctggctcaggtctctcgggcagcaggtgtgcgggttgggctgctcagcagcccagcacccctcgggggccaggagacccagcccagcagcagctgctctcgctcccaccgccgcctatccgtccaccacctggtgcaccaccaccaccaccatcaccaccactaccacctgggcaatgggacgctcagggccccccgggccagcccggagatccaggacagggatgccaatgggtcccgccggctcatgctgccaccaccctcgacgcctgccctctccggggccccccctggtggcgcagagtctgtgcacagcttctaccatgccgactgccacttagagccagtccgctgccaggcgccccctcccaggtccccatctgaggcatccggcaggactgtgggcagcgggaaggtgtatcccaccgtgcacaccagccctccaccggagacgctgaaggagaaggcactagtagaggtggctgccagctctgggcccccaaccctcaccagcctcaacatcccacccgggccctacagctccatgcacaagctgctggagacacagagtacaggtgcctgccaaagctcttgcaagatctccagcccttgcttgaaagcagacagtggagcctgtggtccagacagctgcccctactgtgcccgggccggggcaggggaggtggagctcgccgaccgtgaaatgcctgactcagacagcgaggcagtttatgagttcacacaggatgcccagcacagcgacctccgggacccccacagccggcggcaacggagcctgggcccagatgcagagcccagctctgtgctggccttctggaggctaatctgtgacaccttccgaaagattgtggacagcaagtactttggccggggaatcatgatcgccatcctggtcaacacactcagcatgggcatcgaataccacgagcagcccgaggagcttaccaacgccctagaaatcagcaacatcgtcttcaccagcctctttgccctggagatgctgctgaagctgcttgtgtatggtccctttggctacatcaagaatccctacaacatcttcgatggtgtcattgtggtcatcagcgtgtgggagatcgtgggccagcaggggggcggcctgtcggtgctgcggaccttccgcctgatgcgtgtgctgaagctggtgcgcttcctgccggcgctgcagcggcagctggtggtgctcatgaagaccatggacaacgtggccaccttctgcatgctgcttatgctcttcatcttcatcttcagcatcctgggcatgcatctcttcggctgcaagtttgcctctgagcgggatggggacaccctgccagaccggaagaattttgactccttgctctgggccatcgtcactgtctttcagatcctgacccaggaggactggaacaaagtcctctacaatggtatggcctccacgtcgtcctgggcggccctttatttcattgccctcatgaccttcggcaactacgtgctcttcaatttgctggtcgccattctggtggagggcttccaggcggaggaaatcagcaaacgggaagatgcgagtggacagttaagctgtattcagctgcctgtcgactcccaggggggagatgccaacaagtccgaatcagagcccgatttcttctcacccagcctggatggtgatggggacaggaagaagtgcttggccttggtgtccctgggagagcacccggagctgcggaagagcctgctgccgcctctcatcatccacacggccgccacacccatgtcgctgcccaagagcaccagcacgggcctgggcgaggcgctgggccctgcgtcgcgccgcaccagcagcagcgggtcggcagagcctggggcggcccacgagatgaagtcaccgcccagcgcccgcagctctccgcacagcccctggagcgctgcaagcagctggaccagcaggcgctccagccggaacagcctcggccgtgcacccagcctgaagcggagaagcccaagtggagagcggcggtccctgttgtcgggagaaggccaggagagccaggatgaagaggagagctcagaagaggagcgggccagccctgcgggcagtgaccatcgccacagggggtccctggagcgggaggccaagagttcctttgacctgccagacacactgcaggtgccagggctgcatcgcactgccagtggccgagggtctgcttctgagcaccaggactgcaatggcaagtcggcttcagggcgcctggcccgggccctgcggcctgatgaccccccactggatggggatgacgccgatgacgagggcaacctgagcaaaggggaacgggtccgcgcgtggatccgagcccgactccctgcctgctgcctcgagcgagactcctggtcagcctacatcttccctcctcagtccaggttccgcctcctgtgtcaccggatcatcacccacaagatgttcgaccacgtggtccttgtcatcatcttccttaactgcatcaccatcgccatggagcgccccaaaattgacccccacagcgctgaacgcatcttcctgaccctctccaattacatcttcaccgcagtctttctggctgaaatgacagtgaaggtggtggcactgggctggtgcttcggggagcaggcgtacctgcggagcagttggaacgtgctggacgggctgttggtgctcatctccgtcatcgacattctggtgtccatggtctctgacagcggcaccaagatcctgggcatgctgagggtgctgcggctgctgcggaccctgcgcccgctcagggtgatcagccgggcgcaggggctgaagctggtggtggagacgctgatgtcctcactgaaacccatcggcaacattgtagtcatctgctgtgccttcttcatcattttcggcatcttgggggtgcagctcttcaaagggaagtttttcgtgtgccagggcgaggataccaggaacatcaccaataaatcggactgtgccgaggccagttaccggtgggtccggcacaagtacaactttgacaaccttggccaggccctgatgtccctgttcgttttggcctccaaggatggttgggtggacatcatgtacgatgggctggatgctgtgggcgtggaccagcagaacttccacaagtgtcggcagcaccaggaggaagaggaggcccggcggcgggaggagaagcgcctacgaagactggagaaaaagagaaggaaagcccagtgcaaaccttactactccgactactcccgcttccggctcctcgtccaccacttgtgcaccagccactacctggacctcttcatcacaggtgtcatcgggctgaacgtggtcaccatggccatggagcactaccagcagccccagattctggatgaggctctgaagatctgcaactacatcttcactgtcatctttgtcttggagtcagttttcaaacttgtggcctttggtttccgtcggttcttccaggacaggtggaaccagctggacctggccattgtgctgctgtccatcatgggcatcacgctggaggaaatcgaggtcaacgcctcgctgcccatcaaccccaccatcatccgcatcatgagggtgctgcgcattgcccgagtgctgaagctgctgaagatggctgtgggcatgcgggcgctgctggacacggtgatgcaggccctgccccaggtggggaacctgggacttctcttcatgttgttgtttttcatctttgcagctctgggcgtggagctctttggagacctggagtgtgacgagacacacccctgtgagggcctgggccgtcatgccacctttcggaactttggcatggccttcctaaccctcttccgagtctccacaggtgacaattggaatggcattatgaaggacaccctccgggactgtgaccaggagtccacctgctacaacacggtcatctcgcctatctactttgtgtccttcgtgctgacggcccagttcgtgctagtcaacgtggtgatcgccgtgctgatgaagcacctggaggagagcaacaaggaggccaaggaggaggccgagctagaggctgagctggagctggagatgaagaccctcagcccccagccccactcgccactgggcagccccttcctctggcctggggtcgagggccccgacagccccgacagccccaagcctggggctctgcacccagcggcccacgcgagatcagcctcccacttttccctggagcaccccacgatgcagccccaccccacggagctgccaggaccagacttactgactgtgcggaagtctggggtcagccgaacgcactctctgcccaatgacagctacatgtgtcggcatgggagcactgccgaggggcccctgggacacaggggctgggggctccccaaagctcagtcaggctccgtcttgtccgttcactcccagccagcagataccagctacatcctgcagcttcccaaagatgcacctcatctgctccagccccacagcgccccaacctggggcaccatccccaaactgcccccaccaggacgctcccctttggctcagaggccactcaggcgccaggcagcaataaggactgactccttggacgttcagggtctgggcagccgggaagacctgctggcagaggtgagtgggccctccccgcccctggcccgggcctactctttctggggccagtcaagtacccaggcacagcagcactcccgcagccacagcaagatctccaagcacatgaccccgccagccccttgcccaggcccagaacccaactggggcaagggccctccagagaccagaagcagcttagagttggacacggagctgagctggatttcaggagacctcctgccccctggcggccaggaggagcccccatccccacgggacctgaagaagtgctacagcgtggaggcccagagctgccagcgccggcctacgtcctggctggatgagcagaggagacactctatcgccgtcagctgcctggacagcggctcccaaccccacctgggcacagacccctctaaccttgggggccagcctcttggggggcctgggagccggcccaagaaaaaactcagcccgcctagtatcaccatagacccccccgagagccaaggtcctcggaccccgcccagccctggtatctgcctccggaggagggctccgtccagcgactccaaggatcccttggcctctggcccccctgacagcatggctgcctcgccctccccaaagaaagatgtgctgagtctctccggtttatcctctgacccagcagacctggacccctgagtcctgccccacttt

SEQ ID NO: 90314 - protein, 2227 aa, Artificial Sequence
  derived and/or modified sequence
MDEEEDGAGAEESGQPRSFMRLNDLSGAGGRPGPGSAEKDPGSADSEAEGLPYPALAPVVFFYLSQDSRPRSWCLRTVCNPWFERISMLVILLNCVTLGMFRPCEDIACDSQRCRILQAFDDFIFAFFAVEMVVKMVALGIFGKKCYLGDTWNRLDFFIVIAGMLEYSLDLQNVSFSAVRTVRVLRPLRAINRVPSMRILVTLLLDTLPMLGNVLLLCFFVFFIFGIVGVQLWAGLLRNRCFLPENFSLPLSVDLERYYQTENEDESPFICSQPRENGMRSCRSVPTLRGDGGGGPPCGLDYEAYNSSSNTTCVNWNQYYTNCSAGEHNPFKGAINFDNIGYAWIAIFQVITLEGWVDIMYFVMDAHSFYNFIYFILLIIVGSFFMINLCLVVIATQFSETKQRESQLMREQRVRFLSNASTLASFSEPGSCYEELLKYLVYILRKAARRLAQVSRAAGVRVGLLSSPAPLGGQETQPSSSCSRSHRRLSVHHLVHHHHHHHHHYHLGNGTLRAPRASPEIQDRDANGSRRLMLPPPSTPALSGAPPGGAESVHSFYHADCHLEPVRCQAPPPRSPSEASGRTVGSGKVYPTVHTSPPPETLKEKALVEVAASSGPPTLTSLNIPPGPYSSMHKLLETQSTGACQSSCKISSPCLKADSGACGPDSCPYCARAGAGEVELADREMPDSDSEAVYEFTQDAQHSDLRDPHSRRQRSLGPDAEPSSVLAFWRLICDTFRKIVDSKYFGRGIMIAILVNTLSMGIEYHEQPEELTNALEISNIVFTSLFALEMLLKLLVYGPFGYIKNPYNIFDGVIVVISVWEIVGQQGGGLSVLRTFRLMRVLKLVRFLPALQRQLVVLMKTMDNVATFCMLLMLFIFIFSILGMHLFGCKFASERDGDTLPDRKNFDSLLWAIVTVFQILTQEDWNKVLYNGMASTSSWAALYFIALMTFGNYVLFNLLVAILVEGFQAEGDANKSESEPDFFSPSLDGDGDRKKCLALVSLGEHPELRKSLLPPLIIHTAATPMSLPKSTSTGLGEALGPASRRTSSSGSAEPGAAHEMKSPPSARSSPHSPWSAASSWTSRRSSRNSLGRAPSLKRRSPSGERRSLLSGEGQESQDEEESSEEERASPAGSDHRHRGSLEREAKSSFDLPDTLQVPGLHRTASGRGSASEHQDCNGKSASGRLARALRPDDPPLDGDDADDEGNLSKGERVRAWIRARLPACCLERDSWSAYIFPPQSRFRLLCHRIITHKMFDHVVLVIIFLNCITIAMERPKIDPHSAERIFLTLSNYIFTAVFLAEMTVKVVALGWCFGEQAYLRSSWNVLDGLLVLISVIDILVSMVSDSGTKILGMLRVLRLLRTLRPLRVISRAQGLKLVVETLMSSLKPIGNIVVICCAFFIIFGILGVQLFKGKFFVCQGEDTRNITNKSDCAEASYRWVRHKYNFDNLGQALMSLFVLASKDGWVDIMYDGLDAVGVDQQNFHKCRQHQEEEEARRREEKRLRRLEKKRRNLMLDDVIASGSSASAASEAQCKPYYSDYSRFRLLVHHLCTSHYLDLFITGVIGLNVVTMAMEHYQQPQILDEALKICNYIFTVIFVLESVFKLVAFGFRRFFQDRWNQLDLAIVLLSIMGITLEEIEVNASLPINPTIIRIMRVLRIARVLKLLKMAVGMRALLDTVMQALPQVGNLGLLFMLLFFIFAALGVELFGDLECDETHPCEGLGRHATFRNFGMAFLTLFRVSTGDNWNGIMKDTLRDCDQESTCYNTVISPIYFVSFVLTAQFVLVNVVIAVLMKHLEESNKEAKEEAELEAELELEMKTLSPQPHSPLGSPFLWPGVEGPDSPDSPKPGALHPAAHARSASHFSLEHPTMQPHPTELPGPDLLTVRKSGVSRTHSLPNDSYMCRHGSTAEGPLGHRGWGLPKAQSGSVLSVHSQPADTSYILQLPKDAPHLLQPHSAPTWGTIPKLPPPGRSPLAQRPLRRQAAIRTDSLDVQGLGSREDLLAEVSGPSPPLARAYSFWGQSSTQAQQHSRSHSKISKHMTPPAPCPGPEPNWGKGPPETRSSLELDTELSWISGDLLPPGGQEEPPSPRDLKKCYSVEAQSCQRRPTSWLDEQRRHSIAVSCLDSGSQPHLGTDPSNLGGQPLGGPGSRPKKKLSPPSITIDPPESQGPRTPPSPGICLRRRAPSSDSKDPLASGPPDSMAASPSPKKDVLSLSGLSSDPADLDP

SEQ ID NO: 90315 - DNA, 6684 bp, Artificial Sequence
  derived and/or modified sequence
atggacgaggaggaggacggcgccggcgccgaggagagcggccagcccagaagcttcatgagactgaacgacctgagcggcgccggcggcagacccggccccggcagcgccgagaaggaccccggcagcgccgacagcgaggccgagggcctgccctaccccgccctggcccccgtggtgttcttctacctgagccaggacagcagacccagaagctggtgcctgagaaccgtgtgcaacccctggttcgagagaatcagcatgctggtgatcctgctgaactgcgtgaccctgggcatgttcagaccctgcgaggacatcgcctgcgacagccagagatgcagaatcctgcaggccttcgacgacttcatcttcgccttcttcgccgtggagatggtggtgaagatggtggccctgggcatcttcggcaagaagtgctacctgggcgacacctggaacagactggacttcttcatcgtgatcgccggcatgctggagtacagcctggacctgcagaacgtgagcttcagcgccgtgagaaccgtgagagtgctgagacccctgagagccatcaacagagtgcccagcatgagaatcctggtgaccctgctgctggacaccctgcccatgctgggcaacgtgctgctgctgtgcttcttcgtgttcttcatcttcggcatcgtgggcgtgcagctgtgggccggcctgctgagaaacagatgcttcctgcccgagaacttcagcctgcccctgagcgtggacctggagagatactaccagaccgagaacgaggacgagagccccttcatctgcagccagcccagagagaacggcatgagaagctgcagaagcgtgcccaccctgagaggcgacggcggcggcggccccccctgcggcctggactacgaggcctacaacagcagcagcaacaccacctgcgtgaactggaaccagtactacaccaactgcagcgccggcgagcacaaccccttcaagggcgccatcaacttcgacaacatcggctacgcctggatcgccatcttccaggtgatcaccctggagggctgggtggacatcatgtacttcgtgatggacgcccacagcttctacaacttcatctacttcatcctgctgatcatcgtgggcagcttcttcatgatcaacctgtgcctggtggtgatcgccacccagttcagcgagaccaagcagagagagagccagctgatgagagagcagagagtgagattcctgagcaacgccagcaccctggccagcttcagcgagcccggcagctgctacgaggagctgctgaagtacctggtgtacatcctgagaaaggccgccagaagactggcccaggtgagcagagccgccggcgtgagagtgggcctgctgagcagccccgcccccctgggcggccaggagacccagcccagcagcagctgcagcagaagccacagaagactgagcgtgcaccacctggtgcaccaccaccaccaccaccaccaccactaccacctgggcaacggcaccctgagagcccccagagccagccccgagatccaggacagagacgccaacggcagcagaagactgatgctgcccccccccagcacccccgccctgagcggcgccccccccggcggcgccgagagcgtgcacagcttctaccacgccgactgccacctggagcccgtgagatgccaggcccccccccccagaagccccagcgaggccagcggcagaaccgtgggcagcggcaaggtgtaccccaccgtgcacaccagccccccccccgagaccctgaaggagaaggccctggtggaggtggccgccagcagcggcccccccaccctgaccagcctgaacatcccccccggcccctacagcagcatgcacaagctgctggagacccagagcaccggcgcctgccagagcagctgcaagatcagcagcccctgcctgaaggccgacagcggcgcctgcggccccgacagctgcccctactgcgccagagccggcgccggcgaggtggagctggccgacagagagatgcccgacagcgacagcgaggccgtgtacgagttcacccaggacgcccagcacagcgacctgagagacccccacagcagaagacagagaagcctgggccccgacgccgagcccagcagcgtgctggccttctggagactgatctgcgacaccttcagaaagatcgtggacagcaagtacttcggcagaggcatcatgatcgccatcctggtgaacaccctgagcatgggcatcgagtaccacgagcagcccgaggagctgaccaacgccctggagatcagcaacatcgtgttcaccagcctgttcgccctggagatgctgctgaagctgctggtgtacggccccttcggctacatcaagaacccctacaacatcttcgacggcgtgatcgtggtgatcagcgtgtgggagatcgtgggccagcagggcggcggcctgagcgtgctgagaaccttcagactgatgagagtgctgaagctggtgagattcctgcccgccctgcagagacagctggtggtgctgatgaagaccatggacaacgtggccaccttctgcatgctgctgatgctgttcatcttcatcttcagcatcctgggcatgcacctgttcggctgcaagttcgccagcgagagagacggcgacaccctgcccgacagaaagaacttcgacagcctgctgtgggccatcgtgaccgtgttccagatcctgacccaggaggactggaacaaggtgctgtacaacggcatggccagcaccagcagctgggccgccctgtacttcatcgccctgatgaccttcggcaactacgtgctgttcaacctgctggtggccatcctggtggagggcttccaggccgagggcgacgccaacaagagcgagagcgagcccgacttcttcagccccagcctggacggcgacggcgacagaaagaagtgcctggccctggtgagcctgggcgagcaccccgagctgagaaagagcctgctgccccccctgatcatccacaccgccgccacccccatgagcctgcccaagagcaccagcaccggcctgggcgaggccctgggccccgccagcagaagaaccagcagcagcggcagcgccgagcccggcgccgcccacgagatgaagagcccccccagcgccagaagcagcccccacagcccctggagcgccgccagcagctggaccagcagaagaagcagcagaaacagcctgggcagagcccccagcctgaagagaagaagccccagcggcgagagaagaagcctgctgagcggcgagggccaggagagccaggacgaggaggagagcagcgaggaggagagagccagccccgccggcagcgaccacagacacagaggcagcctggagagagaggccaagagcagcttcgacctgcccgacaccctgcaggtgcccggcctgcacagaaccgccagcggcagaggcagcgccagcgagcaccaggactgcaacggcaagagcgccagcggcagactggccagagccctgagacccgacgacccccccctggacggcgacgacgccgacgacgagggcaacctgagcaagggcgagagagtgagagcctggatcagagccagactgcccgcctgctgcctggagagagacagctggagcgcctacatcttccccccccagagcagattcagactgctgtgccacagaatcatcacccacaagatgttcgaccacgtggtgctggtgatcatcttcctgaactgcatcaccatcgccatggagagacccaagatcgacccccacagcgccgagagaatcttcctgaccctgagcaactacatcttcaccgccgtgttcctggccgagatgaccgtgaaggtggtggccctgggctggtgcttcggcgagcaggcctacctgagaagcagctggaacgtgctggacggcctgctggtgctgatcagcgtgatcgacatcctggtgagcatggtgagcgacagcggcaccaagatcctgggcatgctgagagtgctgagactgctgagaaccctgagacccctgagagtgatcagcagagcccagggcctgaagctggtggtggagaccctgatgagcagcctgaagcccatcggcaacatcgtggtgatctgctgcgccttcttcatcatcttcggcatcctgggcgtgcagctgttcaagggcaagttcttcgtgtgccagggcgaggacaccagaaacatcaccaacaagagcgactgcgccgaggccagctacagatgggtgagacacaagtacaacttcgacaacctgggccaggccctgatgagcctgttcgtgctggccagcaaggacggctgggtggacatcatgtacgacggcctggacgccgtgggcgtggaccagcagaacttccacaagtgcagacagcaccaggaggaggaggaggccagaagaagagaggagaagagactgagaagactggagaagaagagaagaaacctgatgctggacgacgtgatcgccagcggcagcagcgccagcgccgccagcgaggcccagtgcaagccctactacagcgactacagcagattcagactgctggtgcaccacctgtgcaccagccactacctggacctgttcatcaccggcgtgatcggcctgaacgtggtgaccatggccatggagcactaccagcagccccagatcctggacgaggccctgaagatctgcaactacatcttcaccgtgatcttcgtgctggagagcgtgttcaagctggtggccttcggcttcagaagattcttccaggacagatggaaccagctggacctggccatcgtgctgctgagcatcatgggcatcaccctggaggagatcgaggtgaacgccagcctgcccatcaaccccaccatcatcagaatcatgagagtgctgagaatcgccagagtgctgaagctgctgaagatggccgtgggcatgagagccctgctggacaccgtgatgcaggccctgccccaggtgggcaacctgggcctgctgttcatgctgctgttcttcatcttcgccgccctgggcgtggagctgttcggcgacctggagtgcgacgagacccacccctgcgagggcctgggcagacacgccaccttcagaaacttcggcatggccttcctgaccctgttcagagtgagcaccggcgacaactggaacggcatcatgaaggacaccctgagagactgcgaccaggagagcacctgctacaacaccgtgatcagccccatctacttcgtgagcttcgtgctgaccgcccagttcgtgctggtgaacgtggtgatcgccgtgctgatgaagcacctggaggagagcaacaaggaggccaaggaggaggccgagctggaggccgagctggagctggagatgaagaccctgagcccccagccccacagccccctgggcagccccttcctgtggcccggcgtggagggccccgacagccccgacagccccaagcccggcgccctgcaccccgccgcccacgccagaagcgccagccacttcagcctggagcaccccaccatgcagccccaccccaccgagctgcccggccccgacctgctgaccgtgagaaagagcggcgtgagcagaacccacagcctgcccaacgacagctacatgtgcagacacggcagcaccgccgagggccccctgggccacagaggctggggcctgcccaaggcccagagcggcagcgtgctgagcgtgcacagccagcccgccgacaccagctacatcctgcagctgcccaaggacgccccccacctgctgcagccccacagcgcccccacctggggcaccatccccaagctgcccccccccggcagaagccccctggcccagagacccctgagaagacaggccgccatcagaaccgacagcctggacgtgcagggcctgggcagcagagaggacctgctggccgaggtgagcggccccagcccccccctggccagagcctacagcttctggggccagagcagcacccaggcccagcagcacagcagaagccacagcaagatcagcaagcacatgaccccccccgccccctgccccggccccgagcccaactggggcaagggcccccccgagaccagaagcagcctggagctggacaccgagctgagctggatcagcggcgacctgctgccccccggcggccaggaggagccccccagccccagagacctgaagaagtgctacagcgtggaggcccagagctgccagagaagacccaccagctggctggacgagcagagaagacacagcatcgccgtgagctgcctggacagcggcagccagccccacctgggcaccgaccccagcaacctgggcggccagcccctgggcggccccggcagcagacccaagaagaagctgagcccccccagcatcaccatcgacccccccgagagccagggccccagaaccccccccagccccggcatctgcctgagaagaagagcccccagcagcgacagcaaggaccccctggccagcggcccccccgacagcatggccgccagccccagccccaagaaggacgtgctgagcctgagcggcctgagcagcgaccccgccgacctggacccctag

SEQ ID NO: 90316 - DNA, 6684 bp, Artificial Sequence
  derived and/or modified sequence
atggatgaagaagaagacggagcaggcgcggaggagtccggtcagcctaggtctttcatgcgattaaacgatttgtccggcgccgggggccgtcccggcccagggagcgccgagaaggaccctggatccgcagacagcgaagccgaggggttgccttatcctgcactcgctccagtggtgttcttttacctctctcaggactctcgacctcgcagttggtgtctgagaaccgtatgtaacccctggttcgaacgtatttcaatgctggtgatcctgctgaactgtgttaccctggggatgtttcgcccatgcgaagatatcgcttgtgattcacaacgatgtagaatcctgcaggcgttcgatgacttcatcttcgccttcttcgccgtggagatggtggttaagatggtagccttgggtattttcggcaagaaatgctaccttggcgatacctggaacaggctggattttttcattgtcatcgctggcatgctggagtatagcctcgacttgcagaatgtatcgtttagcgctgtacggactgttagagtgctgcgacctcttcgtgcaattaatagggtcccttctatgcgcatcctcgtgaccctcctattggacactcttcccatgctcggcaacgtgctgttattatgtttcttcgtgttcttcatttttggtatagttggagtacaactctgggccggattgctgcgcaatcgatgctttctgccagagaacttcagtttaccgctcagcgtagatctcgagagatattaccaaacagagaacgaggatgagtccccctttatttgtagccagcctagggagaacggaatgaggagctgcagaagtgtgcccactctccggggcgatggtggggggggcccaccatgcggccttgattatgaggcctacaacagcagcagtaataccacatgtgtgaactggaaccagtattacacaaactgttctgctggcgaacacaaccccttcaaaggtgcaatcaattttgataatatcggatacgcatggatcgcaatttttcaggtcattaccctggagggttgggtggatatcatgtattttgtcatggacgcccacagcttctacaacttcatctatttcatcctcctcataatcgtgggctccttctttatgattaatctgtgtcttgtcgtcatcgctacccagttctcagaaaccaagcaacgggaatcccagctgatgcgagagcagcgcgtcaggttcctgtccaatgcaagcaccctggcatccttctcagagcctggctcgtgttatgaagagctgctaaaatacctggtgtatatcctgagaaaggctgctaggaggttggctcaagtgtcccgggcagcaggcgtgcgtgtaggtctcctgtccagccctgcccccctcggcggccaggagacccaaccatctagttcttgctctcgcagtcaccgtcgtctgagcgtccatcacctggtgcatcaccatcaccatcatcatcaccactaccatctgggtaatggcacacttcgcgccccaagggcctcccccgagatccaggatagagacgcaaacgggagtcgccgactgatgctcccgccccctagtaccccagcgctctcaggcgcaccccctggcggggctgagagtgtacattccttctatcatgccgattgtcaccttgagcctgtccgatgccaggcaccaccacctagaagtccctctgaggcgagtgggaggaccgtgggttccggaaaagtgtatcctactgtgcacactagtccaccgccggaaaccctgaaggagaaagccctggtcgaggtggccgctagttctgggcctccaaccctaacctcccttaacataccacctggcccctactcatccatgcacaagctgctggaaacacaatcaactggggcttgtcagtcctcatgcaaaattagctcaccttgcttaaaagctgactccggcgcgtgtggacctgattcttgtccctactgcgcccgggctggtgccggcgaggtggagctggctgaccgggagatgcctgactcagacagtgaagcagtgtacgagttcacccaggacgcacagcactccgaccttagggatccacatagcaggaggcagaggagcctggggcccgatgccgagccatcaagcgttctggcattctggcgattgatctgtgacacattccgtaaaattgtggattctaagtattttggaagaggaattatgatcgccattctagtgaacaccttaagcatgggcatcgagtaccatgagcagcccgaagagctaacaaacgctttagagatttctaacattgtgttcacctctttgtttgctctggagatgcttctcaaacttctggtctatggtccatttgggtatataaaaaacccgtacaacatcttcgacggggtgatcgtggtgatcagtgtgtgggagatcgtgggccagcaaggaggcggcctctcagtactgcgcaccttcaggttaatgcgtgtcctcaaactggttagattcctgccggctctccagcgtcagctcgttgtgctaatgaagactatggacaacgtcgctacattttgcatgctactgatgctgtttatctttatcttttccattttaggaatgcatctgtttggctgtaagtttgcttccgagcgcgacggcgataccctgccggaccgcaagaacttcgattcactcctgtgggccatcgtgaccgtgttccaaattctgactcaggaagattggaataaggtcctctacaacggcatggcctctacatcctcctgggccgcactgtattttattgctctgatgacgttcgggaattatgtgctcttcaatctcttagttgccatcttagtggagggattccaggccgagggagatgctaataagagtgaatcagaacccgattttttcagtccatcattagatggtgatggagatagaaaaaagtgtctggcgctcgtcagtctcggcgaacatcccgaactgcgaaaaagccttctgcctccgctgatcatacacacagctgccacccctatgtccctgcccaagtctacatcgacgggcttgggggaggccctaggcccggcttcgagaagaacctccagcagcggatctgcagaaccaggcgctgctcacgagatgaaaagccccccttcagctaggtcatctccacattctccctggagcgccgcatcatcctggacatcacgcaggtcctcgagaaatagcctgggtcgggctccctccctgaagcggcggtccccttctggcgaacgccggtcccttctgtccggggagggccaggagtcacaggatgaggaggagagcagcgaggaagagcgtgcttcccctgctggaagcgaccaccggcaccgaggcagcctcgaacgcgaagctaagtcatcgttcgatctgcccgatacacttcaagtgccgggactccatcgtacagcctctgggagaggctcagcatccgaacaccaggattgcaatggcaagtcggcctccggcagattagcaagggcccttagacccgacgacccccctttggacggcgacgacgcagatgatgaggggaatctctccaagggggaaagggtgcgcgcttggataagagccagactgcccgcctgctgtcttgaaagggacagttggtcagcctacatttttccccctcagagccggttcagactgctatgccaccgcattattacccataagatgttcgaccatgtggttctcgtgatcatttttctgaactgtatcacaattgccatggagcgtcccaagatcgacccccactctgccgagagaatctttcttaccttaagtaattatatctttaccgccgtttttttagcagagatgactgttaaggtggtggctctcggatggtgtttcggtgaacaggcctacctgaggtcctcctggaatgtgctggatggcctcctggtgctgatctcagtaatcgatattctggtgtctatggtaagcgattctggcactaagatcttgggaatgcttagagtactccggcttcttagaaccctgaggcctcttcgcgtgatctctcgggcccagggactgaaactggttgtcgagacactgatgtcttccctaaaaccaattggcaatatcgtggtcatctgctgcgccttcttcattatcttcggcatactgggtgtccagctgttcaagggaaaatttttcgtatgccagggcgaagacaccaggaacatcaccaataaaagtgactgcgctgaggctagttaccgatgggttcggcacaaatacaacttcgacaatctcggacaggctctgatgagtctgttcgtgctcgcttcaaaggacggctgggtcgacattatgtacgacggcctggatgcggtgggtgttgatcagcaaaacttccacaagtgtcgtcagcaccaggaagaggaggaagcccggcgcagggaagagaagaggttacgccggctggaaaaaaagcggagaaacctgatgttagacgacgtgattgcgagcggaagcagcgcatctgccgcttccgaggcccaatgcaaaccatactactcagactactctcggttccgtctactggtgcaccatttgtgcactagccactatctcgacttattcatcactggcgtgataggcctcaacgttgtgacgatggcaatggagcattatcagcagcctcagatcttggatgaggcactcaaaatctgcaactacatctttacagttatcttcgttttggagtcagtgttcaagctggtggcgtttggtttccgccgtttcttccaggaccgctggaaccagctagacctagctatagtgttgctgagtattatgggaataactttagaagagatcgaagttaacgcgagcctgcctattaatcctacaatcattcgaattatgagggtgctacggattgcaagagtcttaaagttgttgaaaatggccgtaggcatgagagccctgctggacactgttatgcaggctcttccgcaggttggtaacctgggcctcctcttcatgttacttttcttcatttttgccgccctgggagtagagctgttcggggacttggagtgcgacgagacacacccttgcgaaggcttagggaggcacgcaacctttcgcaatttcggtatggctttcctgacattattccgtgtgtctaccggcgacaattggaatggaatcatgaaagacacactgagggattgtgatcaggaaagcacttgctacaacacagtgatatcacccatttacttcgtgagcttcgtccttactgcacagttcgttctggttaacgtggtgattgctgttttgatgaagcatcttgaggaaagcaacaaagaagctaaggaggaggccgagcttgaagccgaactcgaactcgaaatgaaaaccctgtcccctcaaccgcatagccctctgggctctccgtttctgtggcctggcgtagaagggcctgactcgccagactcaccaaagcccggcgcactacaccccgccgctcatgcccgttccgcatcccatttcagtttggagcatcccacgatgcagccacatcccaccgagctgcccgggcccgatctgctcaccgtgaggaagagtggcgtttcacgaacccatagcctccccaatgatagctacatgtgcagacacggctctacagcagagggccctctcgggcatcgtggatggggcctacccaaggctcagtccggatctgtgctatcagtacatagccaaccggctgacacatcatatattctccaactaccgaaggacgctccgcacctcctccagccccacagcgcgcctacatgggggacaattccgaagttacctcctcctggacgcagcccacttgcacagcgccctctacgtcggcaggccgccatccgcacggattctctcgacgtacaggggcttgggagtagagaagacctgcttgccgaagtctcaggcccgagcccaccgctcgcgagagcctatagtttttgggggcaatcaagcacccaggctcaacaacattcccgttcgcactccaagattagtaagcatatgactccccccgcaccatgccccggaccagagcctaattggggtaaagggcctcctgagacgaggtcttctctggagttagatactgaactttcgtggatatctggagacctcctgcctccggggggtcaggaggaacccccctctcccagggatttaaagaagtgttactctgtagaggcccagtcttgccaaaggagaccaacctcgtggctggacgagcaacgacgtcactctattgccgtcagttgccttgattcgggcagccagcctcaccttggtacagacccatctaatctgggggggcagcccctgggcgggcctgggagccggcccaagaagaagctatctccgcccagcatcaccatcgatccaccagaatcacagggcccacggaccccccccagcccaggcatatgcttgagacggcgagcaccgagtagcgactccaaagaccccctggcttctggccctccagactccatggccgctagtccatcccccaaaaaagacgtgctgtccctgagcggactgtcaagcgacccagctgacctagatccttag

SEQ ID NO: 90317 - DNA, 6684 bp, Artificial Sequence
  derived and/or modified sequence
atggatgaggaggaggatggagctggagctgaggagagcggccagcccaggagcttcatgaggctgaatgacctgagcggggccggcggccggcccggccctggcagcgctgagaaggaccccggcagcgctgacagcgaggccgagggcctgccctacccagccctggcccctgtggtgttcttctacctgagccaggacagccggcccaggtcctggtgcctgaggacagtgtgcaacccctggtttgagcgcatctccatgctggtgatcctgctgaactgtgtgaccctgggcatgttccggccctgtgaagatattgcctgtgacagccagcgctgccgcatcctgcaggcctttgatgacttcatctttgccttctttgctgtggagatggtggtgaagatggtggccctgggcatctttgggaagaagtgctacctgggggacacctggaaccggctggacttcttcatcgtgattgctggcatgctggagtacagcctggacctgcagaatgtgtccttctctgctgtgaggacagtgcgggtgctgcggcccctgcgggccatcaacagagtgcccagcatgaggatcctggtgaccctgctgctggacaccctgcccatgctgggcaatgtgctgctgctgtgcttctttgtgttcttcatctttggaattgtgggcgtgcagctgtgggccggcctgctgaggaaccgctgcttcctgcctgagaacttcagcctgcccctgtctgtggacctggagcgctactaccagacagaaaatgaagatgagagccccttcatctgcagccagccccgggagaatggcatgaggagctgccgctctgtgcccaccctgcggggagatggcggcggcggccccccctgtggcctggactatgaggcctacaacagcagcagcaacaccacctgtgtgaactggaaccagtactacaccaactgcagcgctggggagcacaaccccttcaagggggccatcaactttgacaacatcggctacgcctggatcgccatcttccaggtgatcaccctggagggctgggtggacatcatgtactttgtgatggatgcccacagcttctacaacttcatctacttcatcctgctgatcatcgtgggcagcttcttcatgatcaacctgtgcctggtggtgattgccacccagttcagcgagaccaagcagcgggagagccagctgatgagggagcagagggtgcgcttcctgagcaatgccagcaccctggccagcttcagcgagcccggcagctgctatgaggagctgctgaagtacctggtgtacatcctgaggaaggccgcccggcggctggcccaggtgtccagagctgctggggtgcgggtgggcctgctgagcagccctgcccccctgggcggccaggagacccagcccagcagcagctgcagccgcagccaccggcggctgtctgtgcaccacctggtgcaccaccaccaccaccaccaccaccactaccacctgggcaatggcaccctgcgggccccccgggccagccctgagatccaggacagagatgccaacggcagccggcggctgatgctgcccccacccagcaccccagccctgagcggggcccctcctggaggagctgagagcgtgcacagcttctaccacgccgactgccacctggagcctgtgcgctgccaggcccccccacccaggagccccagcgaggccagcggccgcacagtgggcagcggcaaggtgtaccccaccgtgcacaccagccccccacctgagaccctgaaggagaaggccctggtggaggtggccgccagcagcggcccccccaccctgaccagcctgaacatccccccaggcccctacagctccatgcacaagctgctggagacccagagcactggagcctgccagagcagctgcaagatcagcagcccctgcctgaaggctgacagcggggcctgtggccctgacagctgcccctactgtgcccgggccggggccggggaggtggagctggccgaccgggagatgccagacagcgacagcgaggccgtgtatgagttcacccaggatgcccagcacagcgacctgcgggacccccacagccggcggcagaggagcctgggcccagatgctgagcccagctctgtgctggccttctggaggctcatctgtgacaccttcaggaagatcgtggacagcaagtacttcggccggggcatcatgattgccatcctggtgaacaccctgtccatgggcatcgagtaccacgagcagcctgaggagctgaccaatgccctggagatcagcaacatcgtgttcaccagcctgtttgccctggagatgctgctgaagctgctggtgtatggccccttcggctacatcaagaacccctacaacatctttgatggagtcatcgtggtgatctctgtgtgggagatcgtgggccagcagggcggcggcctgtctgtgctgcggaccttccggctgatgagggtgctgaagctggtgcgcttcctgcctgccctgcagaggcagctggtggtgctgatgaagaccatggacaacgtggccaccttctgcatgctgctgatgctgttcatcttcatcttcagcatcctgggcatgcacctgtttggctgcaagtttgccagcgagagagatggagacaccctgcctgacaggaagaactttgacagcctgctgtgggccatcgtgacagtgttccagatcctgacccaggaggactggaacaaggtgctgtacaacggcatggccagcaccagctcctgggccgccctgtacttcatcgccctgatgaccttcggcaactacgtgctcttcaacctgctggtggccatcctggtggagggcttccaggccgagggagatgccaacaagtctgagagcgagccagacttcttcagccccagcctggatggagatggagacaggaagaagtgcctggccctggtgtccctgggggagcaccctgagctgaggaagagcctgctgcccccactcatcatccacacagctgccacccccatgagcctgcccaagagcaccagcacaggcctgggggaggccctgggccctgccagcaggaggaccagcagcagcggcagcgctgagcccggggccgcccacgagatgaagagccccccatctgcccggagcagcccccacagcccctggagcgctgccagctcctggaccagcagaagaagcagcaggaacagcctgggccgggcccccagcctgaagaggaggagccccagcggggagaggaggagcctgctgagcggggagggccaggagagccaggatgaggaggagagcagcgaggaggagcgggccagccctgctggcagtgaccaccgccaccggggcagcctggagcgggaggccaagagcagctttgacctgcctgacaccctgcaggtgcccggcctgcacaggacagccagcggccggggcagcgccagcgagcaccaggactgcaatggcaagagcgccagcggccgcctggcccgggccctgcggccagatgacccccccctggatggagatgatgctgatgatgagggcaacctgagcaaaggagagcgggtgcgggcctggatccgggcccggctgcctgcctgctgcctggagcgggacagctggagcgcctacatcttccccccccagagccgcttccggctgctgtgccaccgcatcatcacccacaagatgtttgaccacgtggtgctggtgatcatcttcctgaactgcatcaccatcgccatggagcggcccaagattgacccccacagcgctgagcgcatcttcctgaccctgagcaactacatcttcaccgctgtgttcctggccgagatgacagtgaaggtggtggccctgggctggtgctttggagagcaggcctacctgcggagctcctggaatgtgctggatggcctgctggtgctgatcagcgtcatcgacatcctggtgtccatggtgtctgacagcggcaccaagatcctgggcatgctgcgggtgctgcggctgctgcggaccctgcggcccctgcgggtcatcagccgggcccagggcctgaagctggtggtggagaccctgatgagcagcctgaagcccatcggcaacatcgtggtgatctgctgtgccttcttcatcatcttcggcatcctgggcgtgcagctgttcaagggcaagttctttgtgtgccagggcgaggacaccaggaacatcaccaacaagagtgactgtgccgaggccagctaccgctgggtgcgccacaagtacaactttgacaacctgggccaggccctgatgagcctgtttgtgctggccagcaaggatggctgggtggacatcatgtatgatggcctggatgctgtgggcgtggaccagcagaacttccacaagtgccggcagcaccaggaggaggaggaggccaggagaagagaggagaagaggctgcggcggctggagaagaagagaagaaacctgatgctggatgatgtgattgccagcggcagcagcgccagcgctgccagcgaggcccagtgcaagccctactacagcgactacagccgcttccggctgctggtgcaccacctgtgcaccagccactacctggacctcttcatcactggagtcatcggcctgaatgtggtgaccatggccatggagcactaccagcagccccagatcctggatgaggccctgaagatctgcaactacatcttcaccgtcatctttgtgctggagagcgtcttcaagctggtggccttcggcttccgccgcttcttccaggaccgctggaaccagctggacctggccatcgtgctgctgagcatcatgggcatcaccctggaggagattgaggtgaatgccagcctgcccatcaaccccaccatcatccgcatcatgagggtgctgagaattgcccgggtgctgaagctgctgaagatggctgtgggcatgagggccctgctggacacagtgatgcaggccctgccccaggtgggcaacctgggcctgctcttcatgctgctcttcttcatctttgctgccctgggcgtggagctgtttggagacctggagtgtgatgagacccacccctgtgagggcctgggcagacatgccaccttcaggaactttggcatggccttcctgaccctcttccgggtgtccactggagacaactggaatggcatcatgaaggacaccctgcgggactgtgaccaggagagcacctgctacaacacagtcatcagccccatctactttgtgtcctttgtgctgacagcccagtttgtgctggtgaatgtggtgattgctgtgctgatgaagcacctggaggagagcaacaaggaggccaaggaggaggccgagctggaggccgagctggagctggagatgaagaccctgagcccccagccccacagccccctgggcagccccttcctgtggccaggagtggagggccctgacagcccagacagccccaagccaggggccctgcaccctgctgcccacgcccggagcgccagccacttcagcctggagcaccccaccatgcagccccaccccacagagctgcccggccctgacctgctgactgtgaggaagtctggagtgtccaggacccacagcctgcccaatgacagctacatgtgccgccacggcagcacagctgagggccccctgggccaccggggctggggcctgcccaaggcccagagcggctctgtgctgtctgtgcacagccagcctgctgacaccagctacatcctgcagctgcccaaggatgccccccacctgctgcagccccacagcgcccccacctggggcaccatccccaagctgcccccacctggccgcagccccctggcccagaggcccctgcggcggcaggccgccatcagaacagacagcctggatgtgcagggcctgggcagccgggaggacctgctggccgaggtgtctggccccagcccccccctggcccgggcctacagcttctggggccagagcagcacccaggcccagcagcacagccgcagccacagcaagatcagcaagcacatgaccccaccagccccctgccccggccctgagcccaactggggcaagggccccccagagaccaggagcagcctggagctggacacagagctgtcctggatcagcggggacctgctgcccccaggcggccaggaggagccccccagcccccgggacctgaagaagtgctacagcgtggaggcccagagctgccagaggcggcccacctcctggctggatgagcagaggaggcacagcattgctgtgtcctgcctggacagcggcagccagccccacctgggcacagaccccagcaacctgggcggccagcccctgggcggccctggcagccggcccaagaagaagctgagcccccccagcatcaccattgatcctcctgagagccagggccccaggaccccacccagccctggcatctgcctgcggcggcgggcccccagcagtgacagcaaggaccccctggccagcggccccccagacagcatggccgccagccccagccccaagaaggatgtgctgagcctgagcggcctgagcagtgaccctgctgacctggacccctag

SEQ ID NO: 90318 - DNA, 6684 bp, Artificial Sequence
  derived and/or modified sequence
atggacgaggaggaggacggcgccggcgccgaggagagcggccagccgcgctccttcatgcgactgaatgatctgtccggcgctggggggagaccaggtcccggtagcgctgagaaggaccccggatctgcagatagcgaagcagaaggactgccataccccgctctcgctcccgtggtatttttctatcttagccaggattctagaccaagaagttggtgtctgcgaactgtctgtaacccatggttcgaacgcatttctatgcttgttattttattgaattgtgtgaccttgggaatgttcagaccttgtgaagacattgcatgtgactctcaaagatgtcgcattttgcaggcctttgatgattttatatttgccttctttgctgtggagatggttgtaaaaatggttgcacttggcatatttggaaagaaatgctatctgggcgatacctggaacagactggatttcttcattgtgattgcagggatgctggaatattccctggacctgcagaacgtttcatttagtgccgtgcgcacagtcagggtactgcgcccactcagggcaattaacagagtgccctctatgcggattcttgttactctgctgctggatactttgccaatgttgggaaacgtgctcctactgtgcttcttcgtattctttatatttgggatcgtcggtgtacagctttgggccggattattaaggaacaggtgttttttgccagagaatttcagtctgccgctctccgtggacttggagagatactaccagacagagaatgaagatgaatctccctttatatgctcacagccacgtgaaaatggtatgagatcttgtagaagtgtgccaacactccgtggagatggagggggcggaccgccttgtggactggactatgaagcatacaattcttctagtaatactacctgtgtgaattggaatcagtactacacaaactgctccgccggagaacataacccgttcaagggtgctatcaacttcgacaacataggctacgcctggatcgcaatctttcaagttattacgctcgaagggtgggtggatattatgtatttcgtcatggatgcccactccttttacaatttcatatacttcatcctgcttatcattgtcggatcattctttatgattaacctgtgcctggtggttattgccacccaattttccgaaaccaagcagcgcgagtcgcagctgatgagggagcagagggtgaggtttctgagtaacgcgagcaccctggccagttttagcgagcccggctcatgctatgaagaactgctgaagtatctcgtgtacattctgaggaaagctgccagaagactggcccaggtctctcgcgcagccggcgtcagggtggggcttttgtcctctccggcccctctcggtggtcaggaaacccagccttcatccagttgtagtcgctctcacagacgactctcggtacatcatctggtgcaccaccatcaccaccatcaccaccactatcatctgggcaacgggacgctaagagccccacgagccagtcctgagattcaggacagggacgccaacgggagtagaagattgatgttgccaccccccagcacccccgctcttagcggcgcccccccagggggggccgagtccgtgcactcgttctaccatgccgattgccatctcgaaccagtccgatgtcaagccccgcctcctaggagcccttcagaagcctccggcaggacagttgggtccggcaaggtctaccccactgtgcataccagtccccccccagaaaccctgaaggagaaagccctggtcgaagtggctgcttcgtcaggccctcctaccctgacctcccttaatattcctccagggccttattcgagcatgcataaactgctggaaacccagtccacgggagcatgccagtcctcttgcaagatcagcagcccttgtcttaaagcagactcaggggcctgcggccccgacagctgtccttactgcgctcgcgccggcgcaggagaggtggagctggccgatcgggagatgccagactcggactcggaagccgtgtatgagtttacccaagacgctcaacattccgatttgcgggatccacacagtcggcgtcaaaggagcctcgggccagacgccgaaccgtcatccgtgctggccttctggcgattaatatgcgacactttccgaaaaattgtggactcaaagtacttcggaagaggcattatgatagcaattctggtcaacacactgtccatggggatcgaatatcatgagcagccggaggagctgacaaatgcgctcgaaatctccaatattgttttcactagtttatttgcactggaaatgctcctaaagctgctggtgtacgggccttttggatatattaaaaacccttacaacatctttgatggtgtcatagtcgtgataagcgtgtgggagatcgtaggacagcagggaggtgggctgtccgtcctgcgcacatttcggctaatgagagtcctgaaactcgtgcgatttttgcccgcattgcaaaggcagctcgtagtcctgatgaaaactatggataacgtcgccactttctgcatgctattgatgctgttcattttcatttttagcatcctcggcatgcacttgttcggttgtaagtttgcatccgagcgcgatggtgacacgttacccgataggaagaattttgatagtctgctttgggcgatagtaaccgtctttcagatcctcacacaagaagattggaacaaggtgctttacaatggaatggcatctaccagctcctgggctgctctgtactttatcgcccttatgacattcggcaactacgtcttgtttaacttactagtggccattcttgtggaggggtttcaggctgagggagacgccaacaaatctgaatccgaacctgattttttctccccctcgctcgacggagatggcgatcggaagaaatgtttggcgctcgtgagcctgggcgagcatcccgagcttcgcaagtccctactcccccccctgattattcatacagccgccaccccgatgagcctgcctaagtccacgtcaaccggcttgggcgaagccctgggaccggccagtcggcgtacgagcagctccgggtccgccgaaccgggcgcagcacatgaaatgaaatctccgccgagcgctagaagctctccacactccccatggagtgcagcgagttcatggacatcaagacgctcttctagaaatagcctaggcagggctccgagtctaaagagacgcagcccatccggggaaagacggagcctgcttagcggagaaggccaggaaagtcaggacgaggaggagagcagtgaggaagagcgtgctagccctgccggcagtgaccacagacatcggggcagcctggagagagaagcaaaatcgagcttcgacctcccagatacccttcaggtgcctgggttacaccgaacagcctcaggccgcggcagcgcaagcgaacaccaggactgtaacgggaaatcagcctccggccggctggccagagccctgcggcctgatgatccgccattagacggtgacgacgccgacgacgaggggaacctaagtaaaggggaacgagttagggcctggatccgggcacgtctgcccgcatgctgcctggagcgcgactcctggagcgcttacatctttccaccacagagccgattccgtcttctctgccacaggatcatcacccacaagatgtttgaccacgtggtacttgtcatcatcttcttaaattgcataacaatcgccatggagagacctaaaattgaccctcacagcgccgaaaggattttccttaccttgtctaactacatctttactgccgtgttcctggccgaaatgacagtgaaggtagtggctctgggatggtgctttggcgagcaggcctacctgcgcagtagttggaatgtgctcgatggacttctggttctcatctcggtcatcgacattctcgtttcaatggtaagcgatagtgggaccaagattctcgggatgttgcgtgtcctgcggctcttaagaacattgagacctctgagagtaatctcgcgggcccagggtctaaaattagtggtggaaaccctaatgtcctccctgaaaccaatcggcaacatcgtcgtcatatgctgtgccttttttatcatttttggcattctgggcgtgcagctgtttaaagggaaatttttcgtttgtcagggcgaggatacaagaaacataacgaacaaatccgactgcgctgaagcctcataccgatgggttcggcacaagtacaattttgacaatctagggcaagcgttgatgtctttattcgttctcgccagcaaagatggctgggttgatatcatgtacgatggacttgacgctgtgggagtggatcagcagaattttcataaatgccggcagcaccaggaagaggaggaggcgcgaagacgcgaagagaagcggctaagacgtttagaaaaaaagaggcgtaatctcatgctggatgatgtgatcgcatccggatcgtctgccagcgccgcctctgaggcccagtgtaagccttattatagcgactacagcaggtttcgcctgctagtgcatcatctgtgcacatctcattacttggatctttttatcacaggcgttatcggccttaatgtcgtgaccatggccatggaacactaccagcagccacagattttggatgaggcactcaaaatttgcaattacatttttacagtcattttcgtgcttgaaagcgtattcaagctggtcgctttcgggtttcgtagatttttccaggatcgctggaaccagctcgacctggcgattgtactattgagtattatggggattactctggaggagatcgaggtgaatgcttcccttccaattaatcctacgatcatcaggatcatgagggtcctccgaatcgcacgcgtgctgaaactcttgaagatggctgtggggatgagggcgctgctggacacagtgatgcaagccctgcctcaggtgggcaatctaggcctactgttcatgctgttgtttttcatctttgcagccctgggcgtggaactcttcggcgatctggaatgtgatgagacccacccctgtgagggattgggtagacacgcaacatttcgcaactttggaatggcttttctcaccctgtttcgggtgagcaccggcgacaactggaatgggattatgaaagataccctgcgtgactgtgatcaagagtccacgtgttataatacagtgatcagcccgatctacttcgtttcctttgtcctgaccgctcaatttgtcctcgtgaatgtcgtcatcgccgttcttatgaagcaccttgaggaaagtaacaaagaggcaaaggaagaagcagaactcgaagccgagctagaactagagatgaagacgctctccccgcaacctcatagcccccttgggtccccattcttgtggcctggcgttgagggtccagactccccagacagtccgaaaccgggggctctccaccctgcagcccacgcccggtcagcttctcatttctccctggaacaccctacaatgcagccacatcccaccgagttgcccggacctgacctgctcacagtgcgtaaaagcggagtgtcccgcacgcactcactcccaaacgacagctacatgtgtcgacacgggtcgactgccgaggggccattggggcacaggggctggggtctgccaaaggcgcagtcaggttccgtgctttcagtccactcccagcctgctgacacctcttacattctgcagctacctaaagacgccccacacctgttacaaccccattccgccccaacatgggggacaatcccaaaattgccaccgcccggccgctcccccctggctcagaggcctcttcgtcgccaggccgccatcaggacagactctttggacgtgcagggactgggctctcgggaggatcttctcgctgaggtgtctgggccctcaccacccctcgctcgggcttattcattttggggtcagtcttccacacaagcccagcagcatagcaggagtcacagtaagatcagtaagcacatgacacctccggcgccttgccccggcccagagcctaactggggaaagggaccccccgagactcggtcaagcctggaactcgacacggaactaagttggatatccggcgatctgctgcccccagggggccaggaggagccaccttcacctcgtgacctgaaaaaatgctactctgttgaggcccagtcgtgccaaaggagaccaacaagctggctcgacgaacagagaaggcatagcattgccgtatcctgtctggacagcggtagtcaaccacatctgggtaccgacccaagtaacctaggtgggcagcccttaggcggccctgggagcaggcctaagaaaaaattaagccccccgtctatcacaatagacccccccgagtcccaggggccacggaccccccctagcccgggcatttgtctgagaagacgagctccttccagtgattccaaggatcctctggccagcgggccgccagattcaatggccgcctccccttctcccaaaaaggacgttctgtcactgagtggcttaagttccgaccctgcagacctggatccgtag

SEQ ID NO: 90319 - DNA, 6683 bp, Artificial Sequence
  derived and/or modified sequence
atggacgaagaagaggacggcgctggcgctgaagaatcaggacagccgcgttcctttatgcggcttaatgatctttctggagctggtgggagaccaggacccggaagcgccgaaaaggacccagggagcgccgactcagaggctgagggccttccttatccagccctggccccagtcgtgtttttctatctgtcgcaggattcccgccctaggtcttggtgtctcaggaccgtgtgcaatccatggttcgagcgtatatcgatgctcgtcatcctcctcaactgcgtaaccctgggcatgttcagaccgtgtgaggacatagcctgcgactcacagcgctgtcgaatacttcaggccttcgatgattttatcttcgctttcttcgccgtggaaatggttgtgaaaatggtcgccctagggatctttggaaagaagtgctaccttggagatacatggaaccgcctggatttttttatcgtcatcgccggaatgttggagtactctctcgatttacagaacgtctcattttccgcagtgaggacggtgagggtgcttcgccctttgcgggctatcaatcgagtcccatcaatgcgcatcttagtgacactcctgctcgacacactgcctatgctcgggaatgttctgttactttgcttcttcgtcttttttattttcggtatagtgggggtccagttgtgggccggactattgcggaaccgctgttttctgccagagaatttcagtttgccactgtctgttgatctggaacgttattaccagacagagaacgaagatgagtcaccgtttatttgttctcagcccagggagaatgggatgcgcagctgtaggagcgtccctactctcaggggagatggtggaggagggccaccttgtggactggactacgaagcgtacaacagtagctccaacacgacatgcgttaattggaaccaatattacaccaactgctccgccggtgaacacaacccctttaaaggcgcaatcaactttgacaacatcgggtatgcctggatagcgattttccaagtcatcaccctcgaaggttgggttgatattatgtactttgtgatggacgctcactccttctataatttcatctactttatcctcctcatcattgttggctccttttttatgatcaacctctgcctggtggttatcgcaacacagttcagcgagacgaagcagagggaatcacagctgatgcgagagcagcgggtccggttcctttcaaatgcctctactctcgcctctttcagtgaaccgggatcatgctatgaggagctgctcaagtacctggtgtacatccttcggaaggctgcccgacgcctcgctcaagtaagtagggctgccggagtcagagttggtttgctgtcaagcccggctcctttgggtgggcaggagacgcagccaagtagctcctgctcacggagtcatcgcagactatcagtgcaccatttagtccaccaccatcaccatcaccaccaccattaccacctgggcaacggaacactcagggcaccacgagcctctcctgaaattcaggacagagatgcaaacgggtcaagacgcttaatgctcccccctcctagcacacctgcactcagcggagcgccacctggcggagcagagagcgtgcatagtttctaccacgctgattgccatctggagccagtcagatgtcaagctcccccacccagaagcccctcagaggcctccggacgcaccgttggatctggaaaggtctatcctaccgttcacacctcccctccgcctgagactctgaaggagaaggctctggtcgaagtcgccgcatcttccgggcctcctaccctgacctctctgaatatccctcccggtccgtattccagtatgcacaagttgttggaaacccaatcaacaggagcgtgccagagtagctgtaagattagcagcccttgcttaaaggctgattccggcgcatgtggacctgactcatgcccatattgtgccagggctggggcaggggaggtcgaactggccgatagagagatgccagactccgatagcgaggctgtctatgaattcacacaggatgcgcagcactccgacttgagagacccccactctcgaaggcagcggtctctcggaccagatgcagagccgtcctccgtcctagcgttttggagactaatctgtgacacttttaggaagatagtggacagcaagtacttcgggaggggcatcatgatcgccatcctggtgaatacactctccatgggtatcgaataccacgagcagcccgaagaactcaccaacgccctggaaatttcgaacatcgtctttacttcgttgttcgccctggagatgctattaaaattgctggtttacgggccattcggatacatcaagaatccctacaatatcttcgacggggtgatagtggtcatctctgtgtgggaaatagtgggacaacaggggggaggcctatcagtacttcggacttttcggctcatgcgtgtgctcaaacttgtaaggttccttcctgccctgcagcgacagctggttgtactcatgaagacaatggataatgtggccactttttgtatgttactgatgttatttatctttattttttctattctgggaatgcacttattcggttgtaagtttgcctctgaaagagacggggacaccctgccggataggaagaacttcgacagcctgctgtgggcgatcgtgactgttttccagatcctcacccaggaggattggaacaaagtgctctataatgggatggccagtacgtcaagctgggcagcactctacttcattgctctgatgacctttggcaattacgtgctgtttaatctgttagtcgctatcctggtggaagggttccaggcagagggtgatgctaataaatccgaatcagagccggatttcttttctccctctttggacggcgacggagacaggaagaagtgtcttgcactggtatccttgggagaacaccctgagctaagaaagtccctgcttcccccattaatcattcacacagccgctactcccatgtcattacctaagtccacctctaccggcctgggggaagcgttagggcctgcctcaagacggacatccagttctgggagtgccgagccgggtgcggctcacgaaatgaaaagccccccttctgccagatctagcccgcacagtccatggtcagccgcatccagctggacctctagacgcagttcgcggaactccctcggtcgggctccgagtctgaaacgcagaagtccaagcggcgagcgccgaagtctgctttctggtgagggccaggagagccaggacgaggaggaaagtagtgaagaagagagagcttccccggcaggctcagaccaccggcataggggtagcctagagcgagaggccaaaagctcctttgacctcccggacacgctgcaagtgcccggtctgcatcgcactgcttccggccgtggctcggcctcagagcaccaagactgtaacgggaagtctgctagcggcagactcgccagggcgttgagacctgacgaccctccactggatggagatgacgctgacgatgaaggaaacctttctaaaggcgagcgcgtgcgcgcttggatacgggcacgcttaccggcttgttgtctcgagagagacagctggtcagcctacattttccctccacaaagtcgattcaggctcctatgccaccgcatcatcacacataagatgtttgaccacgtcgtactagtaatcatcttcctgaattgtatcacaattgctatggagcggccaaagatcgacccccacagtgccgagcgaatatttttgaccctttccaactacatttttactgccgtattcttggcggagatgaccgtgaaagttgtcgctctgggctggtgctttggcgaacaggcttacctccggtcatcgtggaatgtgctagatggcctcctggtgcttataagtgtcattgacatcctagtgtccatggtcagtgatagtgggaccaagattctgggtatgctacgtgtcctgaggctgctgcggactctccgcccactgcgggtaatctccagagctcagggattaaagttagtcgtggagacactcatgtcatccttgaagccgatcgggaacattgtggtgatttgctgcgcattttttattatttttggaatcctgggtgtacagttattcaagggcaagttctttgtgtgtcagggagaggacactcggaacattacaaacaaatccgactgcgccgaagcctcataccggtgggtgcgacataaatacaatttcgacaatctggggcaggcactcatgagtctattcgttcttgctagcaaagacggatgggtggatataatgtatgatgggctcgacgctgtaggcgtggatcaacagaattttcataaatgtagacagcaccaggaagaggaagaagcaaggagacgagaagaaaagcgcctgcggaggcttgaaaagaagagaaggaatctcatgctggacgacgttattgcatctggctcaagcgccagcgcagcctcagaggctcagtgtaagccctactattccgactactctagatttaggctgctggtccatcacctgtgtaccagccattatctcgatctgttcatcacaggcgttatcggactgaacgtggttaccatggccatggagcactaccagcagccccagatcttagacgaggctctgaagatctgtaactatattttcacggtgattttcgtgctggagtcggtctttaagttggtggcctttgggttcaggagattctttcaagatagatggaaccagcttgatcttgcgatcgtgttgctatctatcatggggatcacactggaagaaattgaagtgaatgccagcctgcctattaaccctaccattatccggatcatgcgagtcttgcgcatcgcaagggtcttgaagttgcttaagatggccgtcgggatgcgcgcactcctggatactgtgatgcaagcactaccacaggtcgggaatctgggattgctgttcatgctccttttttttatttttgcagcccttggcgtggagttatttggagatctcgagtgcgatgagacacatccctgtgaaggcctaggccgtcatgccacatttagaaactttggcatggccttcctgacgctctttcgcgtgtccaccggggataattggaacggcattatgaaagataccttaagggactgcgaccaagagagcacctgctataacacagtcatctcccctatatattttgtgtcttttgtattgacagctcagttcgttctggtcaatgtcgtgatagctgtactgatgaaacatcttgaagagtctaacaaggaagctaaggaggaggctgagctcgaagctgagctggagctcgaaatgaagacactcagtcctcagccacactcacccctgggcagtcccttcctctggccaggagtggaaggcccagatagcccagattcacccaaacctggagcactgcaccccgcagcccacgccaggtctgccagtcactttagtttagagcaccctacaatgcagcctcaccccaccgaactgcctgggcctgacctcctgaccgtgcgcaagtctggggtaagccggacccattctctacccaatgacagttacatgtgccgtcacgggagcactgcggaagggccacttggtcaccgtgggtggggccttccaaaggcccagagcggctctgttctgagcgtccatagccagcccgcagataccagctatatcctccagctccctaaggacgcaccacacctcttacagccacacagcgccccaacttgggggacaatccctaagctgcctccgcctgggagatcaccccttgcgcagagacccctgaggagacaagccgcaatcagaaccgatagcttagacgtccaggggctcggaagccgtgaggatctgctggccgaggtttcaggaccttctccccctctcgcaagagcctactctttctggggccagagctcaacacaggcccagcaacactctaggtcacattccaagatatccaaacacatgacgcccccagctccctgtcccggaccagagcctaattggggaaagggcccacccgaaacacggtctagtctcgaactggataccgaactctcttggatatcgggtgatctgcttccaccaggaggccaagaggaacctccttctccaagagacctaaagaagtgctactctgtggaggctcagtcctgccaacggaggccaaccagctggctggatgaacagcggcgacacagcattgccgtgtcatgcttggattctgggtcccagccccacctgggcacagacccatccaatcttggtggacagccgttaggaggaccaggatcacgcccaaaaaagaagctgagtccaccctccatcacaattgatccccctgaatcacaggggccacggactcctccttcccccggaatctgtctgagaagaagggcgcctagctctgactctaaggatcctctggccagcgggcctccagactccatggccgcatctccaagccccaaaaaagatgtgctgagcctttccggcctctcctccgaccccgcagacttggatcctta

SEQ ID NO: 90320 - DNA, 6699 bp, Artificial Sequence
  derived and/or modified sequence
atggacgaggaggaggatggagcgggcgccgaggagtcgggacagccccggagcttcatgcggctcaacgacctgtcgggggccgggggccggccggggccggggtcagcagaaaaggacccgggcagcgcggactccgaggcggaggggctgccgtacccggcgctggccccggtggttttcttctacttgagccaggacagccgcccgcggagctggtgtctccgcacggtctgtaacccctggtttgagcgcatcagcatgttggtcatccttctcaactgcgtgaccctgggcatgttccggccatgcgaggacatcgcctgtgactcccagcgctgccggatcctgcaggcctttgatgacttcatctttgccttctttgccgtggagatggtggtgaagatggtggccttgggcatctttgggaaaaagtgttacctgggagacacttggaaccggcttgactttttcatcgtcatcgcagggatgctggagtactcgctggacctgcagaacgtcagcttctcagctgtcaggacagtccgtgtgctgcgaccgctcagggccattaaccgggtgcccagcatgcgcatccttgtcacgttgctgctggatacgctgcccatgctgggcaacgtcctgctgctctgcttcttcgtcttcttcatcttcggcatcgtcggcgtccagctgtgggcagggctgcttcggaaccgatgcttcctacctgagaatttcagcctccccctgagcgtggacctggagcgctattaccagacagagaacgaggatgagagccccttcatctgctcccagccacgcgagaacggcatgcggtcctgcagaagcgtgcccacgctgcgcggggacgggggcggtggcccaccttgcggtctggactatgaggcctacaacagctccagcaacaccacctgtgtcaactggaaccagtactacaccaactgctcagcgggggagcacaaccccttcaagggcgccatcaactttgacaacattggctatgcctggatcgccatcttccaggtcatcacgctggagggctgggtcgacatcatgtactttgtgatggatgctcattccttctacaatttcatctacttcatcctcctcatcatcgtgggctccttcttcatgatcaacctgtgcctggtggtgattgccacgcagttctcagagaccaagcagcgggaaagccagctgatgcgggagcagcgtgtgcggttcctgtccaacgccagcaccctggctagcttctctgagcccggcagctgctatgaggagctgctcaagtacctggtgtacatccttcgtaaggcagcccgcaggctggctcaggtctctcgggcagcaggtgtgcgggttgggctgctcagcagcccagcacccctcgggggccaggagacccagcccagcagcagctgctctcgctcccaccgccgcctatccgtccaccacctggtgcaccaccaccaccaccatcaccaccactaccacctgggcaatgggacgctcagggccccccgggccagcccggagatccaggacagggatgccaatgggtcccgccggctcatgctgccaccaccctcgacgcctgccctctccggggccccccctggtggcgcagagtctgtgcacagcttctaccatgccgactgccacttagagccagtccgctgccaggcgccccctcccaggtccccatctgaggcatccggcaggactgtgggcagcgggaaggtgtatcccaccgtgcacaccagccctccaccggagacgctgaaggagaaggcactagtagaggtggctgccagctctgggcccccaaccctcaccagcctcaacatcccacccgggccctacagctccatgcacaagctgctggagacacagagtacaggtgcctgccaaagctcttgcaagatctccagcccttgcttgaaagcagacagtggagcctgtggtccagacagctgcccctactgtgcccgggccggggcaggggaggtggagctcgccgaccgtgaaatgcctgactcagacagcgaggcagtttatgagttcacacaggatgcccagcacagcgacctccgggacccccacagccggcggcaacggagcctgggcccagatgcagagcccagctctgtgctggccttctggaggctaatctgtgacaccttccgaaagattgtggacagcaagtactttggccggggaatcatgatcgccatcctggtcaacacactcagcatgggcatcgaataccacgagcagcccgaggagcttaccaacgccctagaaatcagcaacatcgtcttcaccagcctctttgccctggagatgctgctgaagctgcttgtgtatggtccctttggctacatcaagaatccctacaacatcttcgatggtgtcattgtggtcatcagcgtgtgggagatcgtgggccagcaggggggcggcctgtcggtgctgcggaccttccgcctgatgcgtgtgctgaagctggtgcgcttcctgccggcgctgcagcggcagctggtggtgctcatgaagaccatggacaacgtggccaccttctgcatgctgcttatgctcttcatcttcatcttcagcatcctgggcatgcatctcttcggctgcaagtttgcctctgagcgggatggggacaccctgccagaccggaagaattttgactccttgctctgggccatcgtcactgtctttcagatcctgacccaggaggactggaacaaagtcctctacaatggtatggcctccacgtcgtcctgggcggccctttatttcattgccctcatgaccttcggcaactacgtgctcttcaatttgctggtcgccattctggtggagggcttccaggcggagggagatgccaacaagtccgaatcagagcccgatttcttctcacccagcctggatggtgatggggacaggaagaagtgcttggccttggtgtccctgggagagcacccggagctgcggaagagcctgctgccgcctctcatcatccacacggccgccacacccatgtcgctgcccaagagcaccagcacgggcctgggcgaggcgctgggccctgcgtcgcgccgcaccagcagcagcgggtcggcagagcctggggcggcccacgagatgaagtcaccgcccagcgcccgcagctctccgcacagcccctggagcgctgcaagcagctggaccagcaggcgctccagccggaacagcctcggccgtgcacccagcctgaagcggagaagcccaagtggagagcggcggtccctgttgtcgggagaaggccaggagagccaggatgaagaggagagctcagaagaggagcgggccagccctgcgggcagtgaccatcgccacagggggtccctggagcgggaggccaagagttcctttgacctgccagacacactgcaggtgccagggctgcatcgcactgccagtggccgagggtctgcttctgagcaccaggactgcaatggcaagtcggcttcagggcgcctggcccgggccctgcggcctgatgaccccccactggatggggatgacgccgatgacgagggcaacctgagcaaaggggaacgggtccgcgcgtggatccgagcccgactccctgcctgctgcctcgagcgagactcctggtcagcctacatcttccctcctcagtccaggttccgcctcctgtgtcaccggatcatcacccacaagatgttcgaccacgtggtccttgtcatcatcttccttaactgcatcaccatcgccatggagcgccccaaaattgacccccacagcgctgaacgcatcttcctgaccctctccaattacatcttcaccgcagtctttctggctgaaatgacagtgaaggtggtggcactgggctggtgcttcggggagcaggcgtacctgcggagcagttggaacgtgctggacgggctgttggtgctcatctccgtcatcgacattctggtgtccatggtctctgacagcggcaccaagatcctgggcatgctgagggtgctgcggctgctgcggaccctgcgcccgctcagggtgatcagccgggcgcaggggctgaagctggtggtggagacgctgatgtcctcactgaaacccatcggcaacattgtagtcatctgctgtgccttcttcatcattttcggcatcttgggggtgcagctcttcaaagggaagtttttcgtgtgccagggcgaggataccaggaacatcaccaataaatcggactgtgccgaggccagttaccggtgggtccggcacaagtacaactttgacaaccttggccaggccctgatgtccctgttcgttttggcctccaaggatggttgggtggacatcatgtacgatgggctggatgctgtgggcgtggaccagcagaacttccacaagtgtcggcagcaccaggaggaagaggaggcccggcggcgggaggagaagcgcctacgaagactggagaaaaagagaaggaatctaatgctggacgatgtaattgcttccggcagctcagccagcgctgcgtcagaagcccagtgcaaaccttactactccgactactcccgcttccggctcctcgtccaccacttgtgcaccagccactacctggacctcttcatcacaggtgtcatcgggctgaacgtggtcaccatggccatggagcactaccagcagccccagattctggatgaggctctgaagatctgcaactacatcttcactgtcatctttgtcttggagtcagttttcaaacttgtggcctttggtttccgtcggttcttccaggacaggtggaaccagctggacctggccattgtgctgctgtccatcatgggcatcacgctggaggaaatcgaggtcaacgcctcgctgcccatcaaccccaccatcatccgcatcatgagggtgctgcgcattgcccgagtgctgaagctgctgaagatggctgtgggcatgcgggcgctgctggacacggtgatgcaggccctgccccaggtggggaacctgggacttctcttcatgttgttgtttttcatctttgcagctctgggcgtggagctctttggagacctggagtgtgacgagacacacccctgtgagggcctgggccgtcatgccacctttcggaactttggcatggccttcctaaccctcttccgagtctccacaggtgacaattggaatggcattatgaaggacaccctccgggactgtgaccaggagtccacctgctacaacacggtcatctcgcctatctactttgtgtccttcgtgctgacggcccagttcgtgctagtcaacgtggtgatcgccgtgctgatgaagcacctggaggagagcaacaaggaggccaaggaggaggccgagctagaggctgagctggagctggagatgaagaccctcagcccccagccccactcgccactgggcagccccttcctctggcctggggtcgagggccccgacagccccgacagccccaagcctggggctctgcacccagcggcccacgcgagatcagcctcccacttttccctggagcaccccacgatgcagccccaccccacggagctgccaggaccagacttactgactgtgcggaagtctggggtcagccgaacgcactctctgcccaatgacagctacatgtgtcggcatgggagcactgccgaggggcccctgggacacaggggctgggggctccccaaagctcagtcaggctccgtcttgtccgttcactcccagccagcagataccagctacatcctgcagcttcccaaagatgcacctcatctgctccagccccacagcgccccaacctggggcaccatccccaaactgcccccaccaggacgctcccctttggctcagaggccactcaggcgccaggcagcaataaggactgactccttggacgttcagggtctgggcagccgggaagacctgctggcagaggtgagtgggccctccccgcccctggcccgggcctactctttctggggccagtcaagtacccaggcacagcagcactcccgcagccacagcaagatctccaagcacatgaccccgccagccccttgcccaggcccagaacccaactggggcaagggccctccagagaccagaagcagcttagagttggacacggagctgagctggatttcaggagacctcctgccccctggcggccaggaggagcccccatccccacgggacctgaagaagtgctacagcgtggaggcccagagctgccagcgccggcctacgtcctggctggatgagcagaggagacactctatcgccgtcagctgcctggacagcggctcccaaccccacctgggcacagacccctctaaccttgggggccagcctcttggggggcctgggagccggcccaagaaaaaactcagcccgcctagtatcaccatagacccccccgagagccaaggtcctcggaccccgcccagccctggtatctgcctccggaggagggctccgtccagcgactccaaggatcccttggcctctggcccccctgacagcatggctgcctcgccctccccaaagaaagatgtgctgagtctctccggtttatcctctgacccagcagacctggacccctgagtcctgccccacttt

SEQ ID NO: 90321 - protein, 2205 aa, Artificial Sequence
  derived and/or modified sequence
MDEEEDGAGAEESGQPRSFMRLNDLSGAGGRPGPGSAEKDPGSADSEAEGLPYPALAPVVFFYLSQDSRPRSWCLRTVCNPWFERISMLVILLNCVTLGMFRPCEDIACDSQRCRILQAFDDFIFAFFAVEMVVKMVALGIFGKKCYLGDTWNRLDFFIVIAGMLEYSLDLQNVSFSAVRTVRVLRPLRAINRVPSMRILVTLLLDTLPMLGNVLLLCFFVFFIFGIVGVQLWAGLLRNRCFLPENFSLPLSVDLERYYQTENEDESPFICSQPRENGMRSCRSVPTLRGDGGGGPPCGLDYEAYNSSSNTTCVNWNQYYTNCSAGEHNPFKGAINFDNIGYAWIAIFQVITLEGWVDIMYFVMDAHSFYNFIYFILLIIVGSFFMINLCLVVIATQFSETKQRESQLMREQRVRFLSNASTLASFSEPGSCYEELLKYLVYILRKAARRLAQVSRAAGVRVGLLSSPAPLGGQETQPSSSCSRSHRRLSVHHLVHHHHHHHHHYHLGNGTLRAPRASPEIQDRDANGSRRLMLPPPSTPALSGAPPGGAESVHSFYHADCHLEPVRCQAPPPRSPSEASGRTVGSGKVYPTVHTSPPPETLKEKALVEVAASSGPPTLTSLNIPPGPYSSMHKLLETQSTGACQSSCKISSPCLKADSGACGPDSCPYCARAGAGEVELADREMPDSDSEAVYEFTQDAQHSDLRDPHSRRQRSLGPDAEPSSVLAFWRLICDTFRKIVDSKYFGRGIMIAILVNTLSMGIEYHEQPEELTNALEISNIVFTSLFALEMLLKLLVYGPFGYIKNPYNIFDGVIVVISVWEIVGQQGGGLSVLRTFRLMRVLKLVRFLPALQRQLVVLMKTMDNVATFCMLLMLFIFIFSILGMHLFGCKFASERDGDTLPDRKNFDSLLWAIVTVFQILTQEDWNKVLYNGMASTSSWAALYFIALMTFGNYVLFNLLVAILVEGFQAEEISKREDASGQLSCIQLPVDSQGGDANKSESEPDFFSPSLDGDGDRKKCLALVSLGEHPELRKSLLPPLIIHTAATPMSLPKSTSTGLGEALGPASRRTSSSGSAEPGAAHEMKSPPSARSSPHSPWSAASSWTSRRSSRNSLGRAPSLKRRSPSGERRSLLSGEGQESQDEEESSEEERASPAGSDHRHRGSLEREAKSSFDLPDTLQVPGLHRTASGRGSASEHQDCNGKSASGRLARALRPDDPPLDGDDADDEGNLSKGERVRAWIRARLPACCLERDSWSAYIFPPQSRFRLLCHRIITHKMFDHVVLVIIFLNCITIAMERPKIDPHSAERIFLTLSNYIFTAVFLAEMTVKVVALGWCFGEQAYLRSSWNVLDGLLVLISVIDILVSMVSDSGTKILGMLRVLRLLRTLRPLRVISRAQGLKLVVETLMSSLKPIGNIVVICCAFFIIFGILGVQLFKGKFFVCQGEDTRNITNKSDCAEASYRWVRHKYNFDNLGQALMSLFVLASKDGWVDIMYDGLDAVGVDQQPIMNHNPWMLLYFISFLLIVAFFVLNMFVGVVVENFHKCRQHQEEEEARRREEKRLRRLEKKRRNLMLDDVIASGSSASAASEAQCKPYYSDYSRFRLLVHHLCTSHYLDLFITGVIGLNVVTMAMEHYQQPQILDEALKICNYIFTVIFVLESVFKLVAFGFRRFFQDRWNQLDLAIVLLSIMGITLEEIEVNASLPINPTIIRIMRVLRIARVLKLLKMAVGMRALLDTVMQALPQVGNLGLLFMLLFFIFAALGVELFGDLECDETHPCEGLGRHATFRNFGMAFLTLFRVSTGDNWNGIMKDTLRDCDQESTCYNTVISPIYFVSFVLTAQFVLVNVVIAVLMKHLEESNKEAKEEAELEAELELEMKTLSPQPHSPLGSPFLWPGVEGPDSPDSPKPGALHPAAHARSASHFSLEHPTMQPHPTELPGPDLLTVRKSGVSRTHSLPNDSYMCRHGSTAEGPLGHRGWGLPKAQSGSVLSVHSQPADTSYILQLPKDAPHLLQPHSAPTWGTIPKLPPPGRSPLAQRPLRRQAAIRTDSLDVQGLGSREDLLAEEEPPSPRDLKKCYSVEAQSCQRRPTSWLDEQRRHSIAVSCLDSGSQPHLGTDPSNLGGQPLGGPGSRPKKKLSPPSITIDPPESQGPRTPPSPGICLRRRAPSSDSKDPLASGPPDSMAASPSPKKDVLSLSGLSSDPADLDP

SEQ ID NO: 90322 - DNA, 6618 bp, Artificial Sequence
  derived and/or modified sequence
atggacgaggaggaggacggcgccggcgccgaggagagcggccagcccagaagcttcatgagactgaacgacctgagcggcgccggcggcagacccggccccggcagcgccgagaaggaccccggcagcgccgacagcgaggccgagggcctgccctaccccgccctggcccccgtggtgttcttctacctgagccaggacagcagacccagaagctggtgcctgagaaccgtgtgcaacccctggttcgagagaatcagcatgctggtgatcctgctgaactgcgtgaccctgggcatgttcagaccctgcgaggacatcgcctgcgacagccagagatgcagaatcctgcaggccttcgacgacttcatcttcgccttcttcgccgtggagatggtggtgaagatggtggccctgggcatcttcggcaagaagtgctacctgggcgacacctggaacagactggacttcttcatcgtgatcgccggcatgctggagtacagcctggacctgcagaacgtgagcttcagcgccgtgagaaccgtgagagtgctgagacccctgagagccatcaacagagtgcccagcatgagaatcctggtgaccctgctgctggacaccctgcccatgctgggcaacgtgctgctgctgtgcttcttcgtgttcttcatcttcggcatcgtgggcgtgcagctgtgggccggcctgctgagaaacagatgcttcctgcccgagaacttcagcctgcccctgagcgtggacctggagagatactaccagaccgagaacgaggacgagagccccttcatctgcagccagcccagagagaacggcatgagaagctgcagaagcgtgcccaccctgagaggcgacggcggcggcggccccccctgcggcctggactacgaggcctacaacagcagcagcaacaccacctgcgtgaactggaaccagtactacaccaactgcagcgccggcgagcacaaccccttcaagggcgccatcaacttcgacaacatcggctacgcctggatcgccatcttccaggtgatcaccctggagggctgggtggacatcatgtacttcgtgatggacgcccacagcttctacaacttcatctacttcatcctgctgatcatcgtgggcagcttcttcatgatcaacctgtgcctggtggtgatcgccacccagttcagcgagaccaagcagagagagagccagctgatgagagagcagagagtgagattcctgagcaacgccagcaccctggccagcttcagcgagcccggcagctgctacgaggagctgctgaagtacctggtgtacatcctgagaaaggccgccagaagactggcccaggtgagcagagccgccggcgtgagagtgggcctgctgagcagccccgcccccctgggcggccaggagacccagcccagcagcagctgcagcagaagccacagaagactgagcgtgcaccacctggtgcaccaccaccaccaccaccaccaccactaccacctgggcaacggcaccctgagagcccccagagccagccccgagatccaggacagagacgccaacggcagcagaagactgatgctgcccccccccagcacccccgccctgagcggcgccccccccggcggcgccgagagcgtgcacagcttctaccacgccgactgccacctggagcccgtgagatgccaggcccccccccccagaagccccagcgaggccagcggcagaaccgtgggcagcggcaaggtgtaccccaccgtgcacaccagccccccccccgagaccctgaaggagaaggccctggtggaggtggccgccagcagcggcccccccaccctgaccagcctgaacatcccccccggcccctacagcagcatgcacaagctgctggagacccagagcaccggcgcctgccagagcagctgcaagatcagcagcccctgcctgaaggccgacagcggcgcctgcggccccgacagctgcccctactgcgccagagccggcgccggcgaggtggagctggccgacagagagatgcccgacagcgacagcgaggccgtgtacgagttcacccaggacgcccagcacagcgacctgagagacccccacagcagaagacagagaagcctgggccccgacgccgagcccagcagcgtgctggccttctggagactgatctgcgacaccttcagaaagatcgtggacagcaagtacttcggcagaggcatcatgatcgccatcctggtgaacaccctgagcatgggcatcgagtaccacgagcagcccgaggagctgaccaacgccctggagatcagcaacatcgtgttcaccagcctgttcgccctggagatgctgctgaagctgctggtgtacggccccttcggctacatcaagaacccctacaacatcttcgacggcgtgatcgtggtgatcagcgtgtgggagatcgtgggccagcagggcggcggcctgagcgtgctgagaaccttcagactgatgagagtgctgaagctggtgagattcctgcccgccctgcagagacagctggtggtgctgatgaagaccatggacaacgtggccaccttctgcatgctgctgatgctgttcatcttcatcttcagcatcctgggcatgcacctgttcggctgcaagttcgccagcgagagagacggcgacaccctgcccgacagaaagaacttcgacagcctgctgtgggccatcgtgaccgtgttccagatcctgacccaggaggactggaacaaggtgctgtacaacggcatggccagcaccagcagctgggccgccctgtacttcatcgccctgatgaccttcggcaactacgtgctgttcaacctgctggtggccatcctggtggagggcttccaggccgaggagatcagcaagagagaggacgccagcggccagctgagctgcatccagctgcccgtggacagccagggcggcgacgccaacaagagcgagagcgagcccgacttcttcagccccagcctggacggcgacggcgacagaaagaagtgcctggccctggtgagcctgggcgagcaccccgagctgagaaagagcctgctgccccccctgatcatccacaccgccgccacccccatgagcctgcccaagagcaccagcaccggcctgggcgaggccctgggccccgccagcagaagaaccagcagcagcggcagcgccgagcccggcgccgcccacgagatgaagagcccccccagcgccagaagcagcccccacagcccctggagcgccgccagcagctggaccagcagaagaagcagcagaaacagcctgggcagagcccccagcctgaagagaagaagccccagcggcgagagaagaagcctgctgagcggcgagggccaggagagccaggacgaggaggagagcagcgaggaggagagagccagccccgccggcagcgaccacagacacagaggcagcctggagagagaggccaagagcagcttcgacctgcccgacaccctgcaggtgcccggcctgcacagaaccgccagcggcagaggcagcgccagcgagcaccaggactgcaacggcaagagcgccagcggcagactggccagagccctgagacccgacgacccccccctggacggcgacgacgccgacgacgagggcaacctgagcaagggcgagagagtgagagcctggatcagagccagactgcccgcctgctgcctggagagagacagctggagcgcctacatcttccccccccagagcagattcagactgctgtgccacagaatcatcacccacaagatgttcgaccacgtggtgctggtgatcatcttcctgaactgcatcaccatcgccatggagagacccaagatcgacccccacagcgccgagagaatcttcctgaccctgagcaactacatcttcaccgccgtgttcctggccgagatgaccgtgaaggtggtggccctgggctggtgcttcggcgagcaggcctacctgagaagcagctggaacgtgctggacggcctgctggtgctgatcagcgtgatcgacatcctggtgagcatggtgagcgacagcggcaccaagatcctgggcatgctgagagtgctgagactgctgagaaccctgagacccctgagagtgatcagcagagcccagggcctgaagctggtggtggagaccctgatgagcagcctgaagcccatcggcaacatcgtggtgatctgctgcgccttcttcatcatcttcggcatcctgggcgtgcagctgttcaagggcaagttcttcgtgtgccagggcgaggacaccagaaacatcaccaacaagagcgactgcgccgaggccagctacagatgggtgagacacaagtacaacttcgacaacctgggccaggccctgatgagcctgttcgtgctggccagcaaggacggctgggtggacatcatgtacgacggcctggacgccgtgggcgtggaccagcagcccatcatgaaccacaacccctggatgctgctgtacttcatcagcttcctgctgatcgtggccttcttcgtgctgaacatgttcgtgggcgtggtggtggagaacttccacaagtgcagacagcaccaggaggaggaggaggccagaagaagagaggagaagagactgagaagactggagaagaagagaagaaacctgatgctggacgacgtgatcgccagcggcagcagcgccagcgccgccagcgaggcccagtgcaagccctactacagcgactacagcagattcagactgctggtgcaccacctgtgcaccagccactacctggacctgttcatcaccggcgtgatcggcctgaacgtggtgaccatggccatggagcactaccagcagccccagatcctggacgaggccctgaagatctgcaactacatcttcaccgtgatcttcgtgctggagagcgtgttcaagctggtggccttcggcttcagaagattcttccaggacagatggaaccagctggacctggccatcgtgctgctgagcatcatgggcatcaccctggaggagatcgaggtgaacgccagcctgcccatcaaccccaccatcatcagaatcatgagagtgctgagaatcgccagagtgctgaagctgctgaagatggccgtgggcatgagagccctgctggacaccgtgatgcaggccctgccccaggtgggcaacctgggcctgctgttcatgctgctgttcttcatcttcgccgccctgggcgtggagctgttcggcgacctggagtgcgacgagacccacccctgcgagggcctgggcagacacgccaccttcagaaacttcggcatggccttcctgaccctgttcagagtgagcaccggcgacaactggaacggcatcatgaaggacaccctgagagactgcgaccaggagagcacctgctacaacaccgtgatcagccccatctacttcgtgagcttcgtgctgaccgcccagttcgtgctggtgaacgtggtgatcgccgtgctgatgaagcacctggaggagagcaacaaggaggccaaggaggaggccgagctggaggccgagctggagctggagatgaagaccctgagcccccagccccacagccccctgggcagccccttcctgtggcccggcgtggagggccccgacagccccgacagccccaagcccggcgccctgcaccccgccgcccacgccagaagcgccagccacttcagcctggagcaccccaccatgcagccccaccccaccgagctgcccggccccgacctgctgaccgtgagaaagagcggcgtgagcagaacccacagcctgcccaacgacagctacatgtgcagacacggcagcaccgccgagggccccctgggccacagaggctggggcctgcccaaggcccagagcggcagcgtgctgagcgtgcacagccagcccgccgacaccagctacatcctgcagctgcccaaggacgccccccacctgctgcagccccacagcgcccccacctggggcaccatccccaagctgcccccccccggcagaagccccctggcccagagacccctgagaagacaggccgccatcagaaccgacagcctggacgtgcagggcctgggcagcagagaggacctgctggccgaggaggagccccccagccccagagacctgaagaagtgctacagcgtggaggcccagagctgccagagaagacccaccagctggctggacgagcagagaagacacagcatcgccgtgagctgcctggacagcggcagccagccccacctgggcaccgaccccagcaacctgggcggccagcccctgggcggccccggcagcagacccaagaagaagctgagcccccccagcatcaccatcgacccccccgagagccagggccccagaaccccccccagccccggcatctgcctgagaagaagagcccccagcagcgacagcaaggaccccctggccagcggcccccccgacagcatggccgccagccccagccccaagaaggacgtgctgagcctgagcggcctgagcagcgaccccgccgacctggacccctag

SEQ ID NO: 90323 - DNA, 6618 bp, Artificial Sequence
  derived and/or modified sequence
atggacgaggaggaagatggcgctggtgccgaggaatccggccagccaaggtccttcatgagattaaatgatctctccggagcaggaggaagacctggtccagggagcgccgaaaaagatccaggaagtgcagatagcgaggccgaggggctgccctatcccgccctggctcccgtcgtgttcttttacctcagtcaggattcgcgcccaaggtcatggtgcctgaggacagtttgtaatccgtggttcgaacggatcagtatgctagtgatccttctgaattgcgtgactctgggcatgtttcgaccatgcgaggatattgcatgcgattcccagagatgccgcatcctccaggcatttgatgacttcatctttgcattcttcgctgtcgaaatggtagtcaagatggtggcactggggatctttgggaaaaagtgctatctcggtgacacgtggaacaggcttgatttttttattgtcattgccggcatgctagagtactccctcgacctgcaaaacgtgagcttctcggctgttcggaccgtacgcgtcctgagaccccttcgggctatcaatagggtaccttccatgcggatactggtgacacttcttctcgatactcttccaatgctgggcaacgtgctgctgttatgtttttttgtgttttttatcttcgggattgtcggagtccaactgtgggctgggctgctacgcaatcgttgctttctaccagagaatttctcattaccgctcagtgtggacttagaacggtactatcagactgagaatgaagacgaaagcccctttatctgcagccagccacgggagaacggaatgcggtcctgccgtagtgttcctaccctgcggggggatggcggcggaggaccgccatgcgggctggattacgaggcctataattcttcatcaaatacaacttgcgttaactggaaccagtactacaccaactgtagcgcaggagagcataacccttttaaaggggctattaacttcgataatattgggtacgcttggattgccattttccaggtgattacattagaaggctgggttgatatcatgtatttcgtcatggatgctcatagtttctacaacttcatatacttcattctcctgataattgtgggctccttctttatgataaatctgtgtctggtggtaattgctacacagttctcagagactaaacagcgggagtctcagctaatgagggagcagagggtcagattcctctccaacgcctcaacccttgcctcattctctgaacccggttcttgttatgaggagcttctgaaataccttgtgtacatcctgagaaaagcagcgaggcgactggcccaggtgtctcgcgctgctggggtgcgggtaggactcttatctagcccagctccccttggcggccaggaaacccagccttcatcaagctgctcgcggagtcaccgaaggctaagtgtccatcatcttgtgcaccaccatcaccaccatcaccaccactatcacctgggcaatgggacgctacgggcgcccagagcgagtcctgaaatccaggaccgcgacgccaatggatctcgcaggctgatgctacctccaccaagtaccccagccttatcaggcgcgcctcctgggggagcggaatctgtgcactctttttatcacgcggattgtcatttggagccagtgagatgccaagccccaccccctaggagtccaagcgaagcctcaggaaggaccgtggggagcgggaaagtctacccgactgtccacacttctccacccccagaaacattaaaggaaaaggccctcgtcgaagtggctgcctcttcaggacccccaacgctcacaagcctgaatataccaccagggccttatagctcgatgcacaaactgctggagacacaaagcaccggagcttgtcaaagctcctgtaagatttcgtcaccatgcttaaaagccgattcaggtgcatgtggacctgattcgtgtccctattgcgcacgggcgggcgccggggaggtagagctggcagatcgggaaatgccagatagcgactccgaggctgtctacgaatttacacaggatgctcagcattctgatcttagagaccctcactctaggcgccagcggagcctcggcccagacgccgaaccttcgtccgtcctggccttttggcggctgatctgcgacaccttcagaaagattgtagacagtaagtattttgggcggggtatcatgatcgctatcttagttaataccctgtctatgggcattgaatatcacgagcaacccgaggaactaacgaacgccctcgaaatttcgaacattgtgttcacatccctgttcgccctcgaaatgctcctcaagctcctagtctatggaccattcgggtacattaagaacccctacaacatttttgatggggttatcgtcgtgatttctgtgtgggaaattgtcggccagcaggggggcggactgtcagtactcaggacgtttagactaatgcgcgtgctaaagctggtcagatttttacccgcactgcagagacaactggtggtgctaatgaagaccatggacaacgtggcgacattctgcatgctgctcatgctctttatctttatcttctccatactgggtatgcacctcttcgggtgcaagttcgcttcagaaagggatggagatacgctgccggatagaaagaacttcgactctctcctctgggccatcgtcacggtgttccagatccttacgcaagaggactggaacaaggtgttatataacggtatggcctccacctcaagttgggcggcactttactttatcgctctgatgacttttgggaactacgtgttgttcaatctgcttgtggccatactggtcgagggcttccaggccgaggagatttccaagcgtgaggacgcaagcgggcagctctcttgcatccaattacccgtcgacagccagggaggggacgcaaacaagtcagagtcagagccagatttcttttctccctctttggacggtgatggagatcggaagaaatgtctcgcactggtttccctgggcgagcaccccgaactaagaaagagcctgttaccaccccttatcatccacacagctgcaacgccaatgagtttacccaagtctacctccacaggactgggtgaagctctggggcccgcgtcgagacgcacctcctcttctggtagcgcagagcctggagccgcacacgaaatgaagagcccaccttctgctagaagctctccacattctccttggtctgcagccagctcttggacatcccgccggagttctcggaacagcctaggcagagcacctagcttaaagcgacggagcccgtccggtgagcgacgttcgttgctgtcgggcgagggccaggaaagccaagacgaggaggagtcttctgaggaagaaagagcaagccctgcagggagcgaccaccggcaccggggtagcctggagagggaggctaagtccagctttgacctgccagacaccctccaggtacctgggttgcataggaccgcatccgggcgaggctccgcctcagaacaccaggattgcaacggcaagtcagctagtggcagactggctcgggcgttgagacctgatgaccccccgctggacggggatgatgctgatgacgagggaaatctctctaaaggcgaacgcgtgagagcttggatcagggccaggctacctgcttgctgcctcgaacgggactcttggagcgcatatattttcccaccacagagtagatttcggttgctttgtcaccggattattacgcataagatgtttgatcacgtggtcctcgttatcatatttcttaactgcatcacaatcgcaatggagaggccaaagattgaccctcattccgccgaaagaatattccttactctttccaactatatcttcacggccgtcttcctggccgagatgactgttaaggtggtggccctgggatggtgctttggagagcaggcctaccttcggtcctcttggaacgtactggatgggctgctggtcctcatcagcgtgatcgacatattagtatcaatggtgagcgactccggaaccaagatccttggcatgctgagagtccttcgactcctgcggaccctgagaccactacgtgtgataagccgtgcacaggggctgaaattggttgtcgaaaccctgatgtcctccctgaagcccatcggaaatatcgtggttatctgttgcgccttttttataattttcggcatcctcggcgtgcaactgtttaaaggcaaatttttcgtgtgtcagggggaggacaccaggaatatcaccaataaaagcgattgcgcagaagcttcgtatagatgggttcgtcacaaatacaattttgacaacctgggacaagctttgatgtctctgtttgttctcgctagcaaggacggctgggtggatataatgtacgatggactggatgccgttggcgtcgaccagcagccaatcatgaaccataatccctggatgctgttgtactttatttcatttcttctgatcgtggcgttcttcgttctgaacatgttcgtgggcgtggtggtcgagaatttccacaagtgccgccagcatcaggaagaagaagaggccaggagaagagaggaaaagcgactccgacgcctggaaaaaaagcgccggaacttaatgctcgacgatgttatcgcatccggctccagcgcttccgcagcttcagaagcccaatgtaagccctattacagcgactactctaggttcagactcctggtgcaccacctgtgcacctcccactatctggaccttttcatcacaggcgttataggcctgaacgtcgtgactatggcaatggagcattaccagcagcctcagatcctggacgaagcactcaaaatttgcaattatatcttcaccgtgatcttcgtcctggaatccgtttttaagttagtggccttcgggttccgccggttctttcaggacagatggaatcagctggatctcgcgattgtactactgtcaataatgggcatcactctcgaagagatcgaagtcaacgccagtctgcctataaaccctactatcatccggatcatgagagtcctcagaatagccagggttttgaagcttctgaagatggcggtgggcatgcgcgcgctgttggacaccgtgatgcaggccctgccccaggtcggcaatctcggtttgcttttcatgttgctctttttcatctttgccgcgcttggcgtcgaactcttcggggacctcgagtgcgatgaaactcatccatgtgaagggctggggcgccacgccacctttcggaattttggtatggcctttctaaccttattccgcgtgagtactggggataattggaatggcatcatgaaggacactctcagggattgcgaccaggaaagtacctgctacaacactgtgatttctcccatttactttgtaagttttgtgttgactgctcagtttgtactcgtgaatgtcgtgatcgccgtgttgatgaaacacttggaagaatctaacaaagaagctaaggaggaggcagagctggaggctgagttagagttggagatgaagactctttccccgcagcctcactcacctcttggctcaccatttctgtggccaggggtggagggcccagacagcccagattcccctaaacctggcgcgctacatccagcagcccacgcacgaagcgcaagtcacttcagccttgaacaccctaccatgcaacctcaccctacagaactgcccggaccggatctgcttacagtgcgaaaaagtggggtcagccgaactcacagtttaccgaacgatagttatatgtgcaggcacgggagcactgccgaaggccccctgggccacagaggctggggcttgcccaaggcacaaagcggatcagtactttcggtgcacagtcagccagcagacacctcctatattctgcagctgcctaaggatgcacctcatctcctgcagccccactccgcaccaacttggggcactatacccaagctcccaccaccgggtagatcccccttagcccagaggccactgcggaggcaggccgctatccggacagatagcctggacgtccaggggcttgggtcccgcgaagatctgttggctgaagaggaacctccaagccccagagaccttaagaagtgttattcagtggaagcccagtcctgtcaacgcagacccacatcctggttagacgaacaaagacgccatagcatcgccgtgtcctgtttggattcaggcagtcaaccgcacctgggaacggacccctcaaatcttggcggccagccactgggcgggcccggcagccgccctaagaagaagctatctcctccgtccatcaccatcgatcctccggaatcacagggacccagaacaccaccaagccccggaatttgtctgagaagacgcgcaccttcctctgactcaaaggatcctttagcatctggaccgccagactcgatggcagcctcaccaagcccaaagaaagatgtgctttccctcagcgggctgtctagtgaccccgctgatctcgacccttag

SEQ ID NO: 90324 - DNA, 6618 bp, Artificial Sequence
  derived and/or modified sequence
atggatgaggaggaggatggagctggagctgaggagagcggccagcccaggagcttcatgaggctgaatgacctgagcggggccggcggccggcccggccctggcagcgctgagaaggaccccggcagcgctgacagcgaggccgagggcctgccctacccagccctggcccctgtggtgttcttctacctgagccaggacagccggcccaggtcctggtgcctgaggacagtgtgcaacccctggtttgagcgcatctccatgctggtgatcctgctgaactgtgtgaccctgggcatgttccggccctgtgaagatattgcctgtgacagccagcgctgccgcatcctgcaggcctttgatgacttcatctttgccttctttgctgtggagatggtggtgaagatggtggccctgggcatctttgggaagaagtgctacctgggggacacctggaaccggctggacttcttcatcgtgattgctggcatgctggagtacagcctggacctgcagaatgtgtccttctctgctgtgaggacagtgcgggtgctgcggcccctgcgggccatcaacagagtgcccagcatgaggatcctggtgaccctgctgctggacaccctgcccatgctgggcaatgtgctgctgctgtgcttctttgtgttcttcatctttggaattgtgggcgtgcagctgtgggccggcctgctgaggaaccgctgcttcctgcctgagaacttcagcctgcccctgtctgtggacctggagcgctactaccagacagaaaatgaagatgagagccccttcatctgcagccagccccgggagaatggcatgaggagctgccgctctgtgcccaccctgcggggagatggcggcggcggccccccctgtggcctggactatgaggcctacaacagcagcagcaacaccacctgtgtgaactggaaccagtactacaccaactgcagcgctggggagcacaaccccttcaagggggccatcaactttgacaacatcggctacgcctggatcgccatcttccaggtgatcaccctggagggctgggtggacatcatgtactttgtgatggatgcccacagcttctacaacttcatctacttcatcctgctgatcatcgtgggcagcttcttcatgatcaacctgtgcctggtggtgattgccacccagttcagcgagaccaagcagcgggagagccagctgatgagggagcagagggtgcgcttcctgagcaatgccagcaccctggccagcttcagcgagcccggcagctgctatgaggagctgctgaagtacctggtgtacatcctgaggaaggccgcccggcggctggcccaggtgtccagagctgctggggtgcgggtgggcctgctgagcagccctgcccccctgggcggccaggagacccagcccagcagcagctgcagccgcagccaccggcggctgtctgtgcaccacctggtgcaccaccaccaccaccaccaccaccactaccacctgggcaatggcaccctgcgggccccccgggccagccctgagatccaggacagagatgccaacggcagccggcggctgatgctgcccccacccagcaccccagccctgagcggggcccctcctggaggagctgagagcgtgcacagcttctaccacgccgactgccacctggagcctgtgcgctgccaggcccccccacccaggagccccagcgaggccagcggccgcacagtgggcagcggcaaggtgtaccccaccgtgcacaccagccccccacctgagaccctgaaggagaaggccctggtggaggtggccgccagcagcggcccccccaccctgaccagcctgaacatccccccaggcccctacagctccatgcacaagctgctggagacccagagcactggagcctgccagagcagctgcaagatcagcagcccctgcctgaaggctgacagcggggcctgtggccctgacagctgcccctactgtgcccgggccggggccggggaggtggagctggccgaccgggagatgccagacagcgacagcgaggccgtgtatgagttcacccaggatgcccagcacagcgacctgcgggacccccacagccggcggcagaggagcctgggcccagatgctgagcccagctctgtgctggccttctggaggctcatctgtgacaccttcaggaagatcgtggacagcaagtacttcggccggggcatcatgattgccatcctggtgaacaccctgtccatgggcatcgagtaccacgagcagcctgaggagctgaccaatgccctggagatcagcaacatcgtgttcaccagcctgtttgccctggagatgctgctgaagctgctggtgtatggccccttcggctacatcaagaacccctacaacatctttgatggagtcatcgtggtgatctctgtgtgggagatcgtgggccagcagggcggcggcctgtctgtgctgcggaccttccggctgatgagggtgctgaagctggtgcgcttcctgcctgccctgcagaggcagctggtggtgctgatgaagaccatggacaacgtggccaccttctgcatgctgctgatgctgttcatcttcatcttcagcatcctgggcatgcacctgtttggctgcaagtttgccagcgagagagatggagacaccctgcctgacaggaagaactttgacagcctgctgtgggccatcgtgacagtgttccagatcctgacccaggaggactggaacaaggtgctgtacaacggcatggccagcaccagctcctgggccgccctgtacttcatcgccctgatgaccttcggcaactacgtgctcttcaacctgctggtggccatcctggtggagggcttccaggccgaggagatcagcaagcgggaggatgccagcggccagctgagctgcatccagctgcctgtggacagccagggcggagatgccaacaagtctgagagcgagccagacttcttcagccccagcctggatggagatggagacaggaagaagtgcctggccctggtgtccctgggggagcaccctgagctgaggaagagcctgctgcccccactcatcatccacacagctgccacccccatgagcctgcccaagagcaccagcacaggcctgggggaggccctgggccctgccagcaggaggaccagcagcagcggcagcgctgagcctggagctgcccacgagatgaagagcccccccagcgcccggagcagcccccacagcccctggagcgctgccagctcctggaccagccgccgcagcagcaggaacagcctgggccgggcccccagcctgaagagaagaagccccagcggggagcggcgcagcctgctgtctggagagggccaggagagccaggatgaggaggagagcagcgaggaggagcgggccagccctgctggcagtgaccaccgccaccggggcagcctggagcgggaggccaagagcagctttgacctgcctgacaccctgcaggtgcccggcctgcacaggacagccagcggccggggcagcgccagcgagcaccaggactgcaatggcaagagcgccagcggccgcctggcccgggccctgcggccagatgatcctcccctggatggagatgatgctgatgatgagggcaacctgagcaagggggagcgggtgcgggcctggatccgggcccggctgcctgcctgctgcctggagcgggacagctggagcgcctacatcttccccccccagagccgcttccggctgctgtgccaccgcatcatcacccacaagatgtttgaccacgtggtgctggtgatcatcttcctgaactgcatcaccatcgccatggagcggcccaagattgacccccacagcgctgagcgcatcttcctgaccctgagcaactacatcttcaccgctgtgttcctggccgagatgacagtgaaggtggtggccctgggctggtgcttcggggagcaggcctacctgcggagctcctggaatgtgctggatggcctgctggtgctgatctctgtgattgacatcctggtgtccatggtgtctgattctggcaccaagatcctgggcatgctgcgggtgctgcggctgctgcggaccctgcggcccctgcgggtcatcagccgggcccagggcctgaagctggtggtggagaccctgatgagcagcctgaagcccatcggcaacatcgtggtgatctgctgtgccttcttcatcatcttcggcatcctgggcgtgcagctgttcaagggcaagttctttgtgtgccagggcgaggacaccaggaacatcaccaacaagagtgactgtgccgaggccagctaccgctgggtgcgccacaagtacaactttgacaacctgggccaggccctgatgagcctgtttgtgctggccagcaaggatggctgggtggacatcatgtatgatggcctggatgctgtgggcgtggaccagcagcccatcatgaaccacaacccctggatgctgctgtacttcatctccttcctgctgattgtggccttctttgtgctgaacatgtttgtgggcgtggtggtggagaacttccacaagtgccggcagcaccaggaggaggaggaggcccggcggcgggaggagaagaggctgcggcggctggagaagaagagaagaaacctgatgctggatgatgtgattgccagcggcagcagcgccagcgctgccagcgaggcccagtgcaagccctactacagcgactacagccgcttccggctgctggtgcaccacctgtgcaccagccactacctggacctcttcatcaccggggtgattggcctgaatgtggtgaccatggccatggagcactaccagcagccccagatcctggatgaggccctgaagatctgcaactacatcttcaccgtcatctttgtgctggagagcgtcttcaagctggtggccttcggcttccgccgcttcttccaggaccgctggaaccagctggacctggccatcgtgctgctgagcatcatgggcatcaccctggaggagattgaggtgaatgccagcctgcccatcaaccccaccatcatccgcatcatgagggtgctgcgcatcgcccgggtgctgaagctgctgaagatggctgtgggcatgagggccctgctggacacagtgatgcaggccctgccccaggtgggcaacctgggcctgctcttcatgctgctcttcttcatctttgctgccctgggcgtggagctgtttggagacctggagtgtgatgagacccacccctgtgagggcctgggcagacatgccaccttcaggaactttggcatggccttcctgaccctcttccgggtgtccactggagacaactggaatggcatcatgaaggacaccctgcgggactgtgaccaggagagcacctgctacaacacagtcatcagccccatctactttgtgtcctttgtgctgacagcccagtttgtgctggtgaatgtggtgattgctgtgctgatgaagcacctggaggagagcaacaaggaggccaaggaggaggccgagctggaggccgagctggagctggagatgaagaccctgagcccccagccccacagccccctgggcagccccttcctgtggccaggagtggagggccctgacagcccagacagccccaagccaggggccctgcaccctgctgcccacgcccggagcgccagccacttcagcctggagcaccccaccatgcagccccaccccacagagctgcccggccctgacctgctgactgtgaggaagagcggcgtgtccaggacccacagcctgcccaatgacagctacatgtgcagacatggcagcacagctgagggccccctgggccaccggggctggggcctgcccaaggcccagagcggctctgtgctgtctgtgcacagccagcctgctgacaccagctacatcctgcagctgcccaaggatgccccccacctgctgcagccccacagcgcccccacctggggcaccatccccaagctgcccccacctggccgcagccccctggcccagaggcccctgcggcggcaggccgccatcagaacagacagcctggatgtgcagggcctgggcagccgggaggacctgctggccgaggaggagccccccagcccccgggacctgaagaagtgctacagcgtggaggcccagagctgccagaggcggcccacctcctggctggatgagcagaggaggcacagcattgctgtgtcctgcctggacagcggcagccagccccacctgggcacagaccccagcaacctgggcggccagcccctgggcggccctggcagccggcccaagaagaagctgagcccccccagcatcaccattgatcctcctgagagccagggccccaggaccccacccagccctggcatctgcctgcggcggcgggcccccagcagtgacagcaaggaccccctggccagcggccccccagacagcatggccgccagccccagccccaagaaggatgtgctgagcctgagcggcctgagcagtgaccctgctgacctggacccctag

SEQ ID NO: 90325 - DNA, 6618 bp, Artificial Sequence
  derived and/or modified sequence
atggacgaggaggaggacggcgccggcgccgaggagagcggccagccaaggtcatttatgaggctgaacgacttatccggagctggaggccgcccgggacccgggagcgcggaaaaggacccgggatcagccgatagcgaagctgaaggacttccctatccggctctcgccccagtggtttttttctacttgagtcaagactcgcgccctaggagctggtgtctgaggaccgtgtgtaatccctggttcgagagaatctctatgttggtcatactgctgaattgcgtcaccttgggaatgttccggccatgtgaggacatagcttgtgacagccagcgttgcaggattctccaggcctttgatgactttatttttgcattttttgccgtggagatggtcgtgaagatggtcgctcttggaatttttggcaaaaaatgctatctgggcgacacttggaaccggctggatttcttcattgtgatagctggaatgctggagtactctctcgatctgcagaatgtgagcttttccgccgtccgcactgtacgtgtcctccgccccctacgcgctattaaccgggttccctcgatgcggattcttgtcaccctgctcctggacactctgcctatgctcggcaacgtcctgcttttgtgcttttttgtattcttcattttcggcatcgtgggcgtacaactgtgggctggactactgagaaaccgttgcttcttgcccgagaacttttcactaccactttccgttgacctggaaagatattatcagacggaaaatgaggatgaatccccttttatttgcagccaaccccgagagaatggaatgcgaagttgtaggagtgtgccaacgctgaggggagatgggggtgggggtcctccatgtggcctggattacgaggcgtacaatagcagctccaatacgacctgtgtaaactggaatcagtactatacgaactgctccgccggtgaacacaacccatttaagggtgcaatcaacttcgataatatcgggtacgcctggatagccatattccaagtaattaccctggaaggctgggtggacatcatgtactttgtgatggatgcccattccttctataatttcatctattttatacttttaataattgttggatcgtttttcatgataaacctgtgcttagttgtgatcgccacccaatttagtgaaactaaacagagggagtcgcaactgatgagagagcagcgggtgcggttcctctcaaatgccagtactctcgcttcctttagcgaacctgggtcgtgttacgaggagctcctcaagtacttggtgtatattctgcggaaggcggcaagaaggctggcccaggtctcacgtgctgccggcgtcagagtggggcttctcagcagccctgcccctctgggcgggcaagaaacccagcctagttcttcttgctccaggtctcatcgaaggctgagcgtacatcacttggtacaccatcatcaccaccatcatcatcattaccatctgggaaacgggactcttcgtgcgcccagagcaagccccgaaatccaggatagggatgcaaatggctccaggagactgatgctgccccctccctccaccccagcacttagcggtgctcctccaggtggcgccgagtctgtccatagcttttatcacgccgactgtcatcttgagcctgtgagatgccaagccccccccccacggagtccttccgaggcttccggccgaaccgtggggagcggcaaagtctatcctacagtgcacacaagccctccaccagagacccttaaagaaaaagcactggtcgaggtggccgcgtcatctggtccacctacactcacctcactaaatatcccaccaggaccttactcttccatgcataaactgctggagacgcaatccaccggcgcctgccagtcatcgtgcaagatctccagcccatgtctgaaagctgacagtggcgcttgcggcccagatagttgcccttactgcgccagggccggagccggtgaagtggaactggccgaccgcgagatgcccgactctgatagcgaggcagtgtatgagtttactcaggatgcacagcactctgacttgcgtgacccacactccagacgccagagatccctgggtcctgatgcagagccatctagcgtgctcgccttttggaggctgatctgtgacacattccgaaaaattgtggattccaaatactttggacgtgggatcatgatcgccatactggtcaataccttatccatggggatcgagtatcatgagcagcccgaggaattgactaatgctctggagattagcaacatcgtgttcacatcgcttttcgcactagaaatgctgctaaaactcttggtttatgggccgttcggctatattaagaacccctataatattttcgatggcgtaatcgtggttatttccgtgtgggaaatagtcgggcagcaggggggaggactgagcgttctgcgtacttttcggcttatgcgggtacttaagctggtgcgcttcctgccggccctgcagaggcagttagtcgtcctaatgaagacaatggacaatgttgctaccttctgcatgttgttaatgcttttcatcttcatattctcgattcttggaatgcacctttttggctgtaaatttgcttctgaaagggacggggacaccctgcccgacaggaagaattttgactctctgttgtgggcaatcgtaacagtcttccagattctgacccaggaggactggaataaagtgctgtacaacgggatggcgtccacatccagttgggcagctctgtactttatcgcgctgatgaccttcggaaattatgttttatttaacttgctggttgccatcctcgtcgaaggttttcaggcagaggagatcagcaaaagggaagatgctagtggccaattatcatgcattcagctgccagttgacagccagggaggggatgctaataaatccgaatctgagccggactttttttctccctccttggacggggatggggacagaaaaaagtgccttgctctggtgagcttaggggagcaccctgaactccggaaaagccttttgccgcccttgatcattcacactgctgccactcctatgtctcttcctaagagcacctccacaggactgggggaagctctcggacccgctagcaggcggaccagtagctctgggtccgcggagccgggagccgcgcatgagatgaaatccccgccaagcgcaaggtccagcccacacagcccttggagtgccgcaagcagctggaccagtcgccggagttcgagaaatagtctagggcgcgccccaagtctgaagagaaggagcccctcgggcgagagaagatcactgctttctggcgaggggcaggaatcacaggatgaggaggagtcctccgaggaggaaagagcaagtcccgctgggagtgatcaccgccacagagggtcccttgaaagagaagccaagtctagcttcgacctacctgatactctgcaggttcccgggctccataggactgcctccggccggggatcagccagcgaacaccaggactgtaacgggaaatcggctagcggacgcctggcccgggctctgcgacctgacgatcccccccttgacggtgacgacgccgacgacgagggcaatctgagcaagggcgaacgcgtaagggcatggatacgtgcaaggttgccagcgtgttgtctagagcgcgacagctggtctgcctatatatttcctccccagagtcgttttcgccttctgtgccaccgcattattactcataagatgtttgaccatgttgtgctggtaattatcttcctcaactgtatcactatcgcaatggagaggcctaaaatcgatccccactccgccgagcggatcttccttaccttaagcaattacattttcacagctgtgttcctggctgagatgaccgtaaaggtggtcgcacttggttggtgtttcggggagcaggcctacctcagaagtagctggaatgtgctcgacgggctgctggtcctcattagtgtgatcgacattctcgtgagcatggtgtccgatagtgggactaagatcctgggaatgttgagggtgttgcgactactcagaacgctgaggcctctgagggtgataagccgagcccaaggcctaaagctggtcgttgagactctaatgagcagcctcaaacccatcggcaatattgtcgtgatatgttgtgccttcttcataatcttcggcatcctgggcgtgcaactgtttaagggtaaattcttcgtatgccagggggaagacaccaggaatattactaataagagcgactgtgccgaggctagctatcgctgggttaggcacaaatacaattttgacaacctgggtcaagccttgatgtcactcttcgttctggcttccaaggacggatgggtggatatcatgtacgatgggctggacgcggtcggcgtagaccagcagcccataatgaaccataacccgtggatgctgttatactttatcagtttcctgctgattgtggcattcttcgtgctgaatatgtttgtcggggtggtggtagagaatttccataagtgccgacaacaccaagaggaggaagaagcccgtaggcgagaggaaaagcgactgcggcggctggagaagaagagacgcaacctgatgctcgacgacgtgatcgccagtggaagctctgccagcgccgcctccgaggctcagtgtaagccatattacagtgactactccaggttccggctgttggtccatcatctgtgtacttctcattacctggatctttttataacaggtgtcattggactaaacgtggtgaccatggctatggagcactaccagcagccccagatccttgatgaagcacttaaaatctgcaattacatcttcaccgtcatttttgtgctggagtcagtatttaagctcgtcgcctttggatttcggaggttctttcaggataggtggaaccagctagatctggcaatagtgctccttagtattatgggtattactttggaggaaattgaggtcaacgctagtctacccatcaaccccaccatcatccggatcatgcgagtcctacgtattgcccgggttctgaaactgctgaaaatggccgtaggcatgagggcgctcctggacaccgtcatgcaggcactccctcaagtcggaaatctggggttgctatttatgctcctcttcttcatcttcgccgccctgggcgtggaactattcggcgatctggagtgcgatgaaacccacccctgtgaagggctgggacgccatgccacatttcgcaacttcggaatggcattccttactctgttccgagtcagcacaggcgataactggaatgggatcatgaaggacaccctcagagactgtgaccaagaaagcacctgctacaacactgtcatctcccctatctactttgtaagctttgtgttaacagcacagtttgtcttggtaaatgttgtcatcgccgtcttaatgaaacatcttgaggagtctaacaaagaggcgaaggaggaggctgagctagaggccgaacttgaactggagatgaagacattatctcctcagccccatagccctcttgggtctccttttttgtggccaggagtcgagggaccggatagcccagactctccgaagccgggggctctgcatccggcagcccacgcccggagtgcctcccactttagcttagaacacccaacaatgcaaccccacccaacagaactgcccgggccagacctgcttactgtcagaaaaagcggcgtgtcccgtactcatagcctgcctaatgatagctacatgtgtcgccatggcagtaccgctgaaggcccccttggccaccgggggtggggtctgcccaaagcacagtcagggagcgtgctgagtgtacactcacaacccgccgatacttcctacatcctacagctgcccaaggacgcccctcatttactgcagccgcattccgcacctacgtggggcaccattccaaagctgccaccaccaggtcgcagtccactggcacaacgaccactgagacgacaggctgccatccgaacagactccctggatgttcagggcctcggttcacgcgaggacctgttagctgaagaggagcctccgagcccccgggacttaaagaagtgctactctgtcgaggcacagagctgccagcggcggcctacatcttggctggatgagcagcgtagacacagcatcgccgtttcctgtctggattctggcagccaaccccatcttggaaccgatccgtccaacctaggcggccaaccactggggggcccagggagcaggcccaaaaaaaaactctcccccccctctattaccattgacccccctgagtcccaggggccgaggaccccaccttcgccgggcatctgcttgcgcaggagagcaccgagcagtgacagcaaggatccactggcatcaggacctccagattctatggcggcctctcccagtcctaaaaaagatgtgctttcattgtccgggctgtcgtccgatcccgcagatctcgacccatag

SEQ ID NO: 90326 - DNA, 6617 bp, Artificial Sequence
  derived and/or modified sequence
atggacgaggaggaggatggggctggggcagaggaaagcggacagcccagaagctttatgagacttaatgacctctcgggagcaggcggacgcccaggtccaggcagtgccgagaaggaccccggttcggctgatagtgaggccgaaggtcttccttatccagcccttgctcccgtcgtgtttttttacctctcgcaggattccagaccacgttcttggtgcctgagaaccgtgtgcaacccgtggttcgagaggattagtatgctggtgattcttctgaactgcgtgaccctggggatgtttcggccttgtgaggatattgcgtgcgattcccagagatgcaggatcctccaggccttcgatgactttatcttcgctttctttgcagtggaaatggtcgtgaagatggtcgcgctcggtatcttcggcaagaaatgttatctcggagatacttggaatcgtctagatttttttattgttattgccggtatgcttgaatatagccttgacttgcagaacgtgagcttttccgcagtgcgaacagtgcgcgtcctccggcctctcagggcaatcaatagggttccctccatgcggatcttagtgaccctgctgcttgataccctccctatgttgggtaacgtcctgctgctgtgcttcttcgtgttttttatctttggtatcgtaggagtgcagctctgggccggactgttacgtaacagatgctttctaccggaaaatttttctttgccactctctgtggacctcgagcgctactatcagacagagaatgaagacgagagcccatttatttgtagccagccacgcgagaacgggatgaggagctgccggagcgtgccgacgcttagaggagacggtggcggaggccctccatgtggccttgactatgaggcctataactcctccagtaacacaacctgtgtaaactggaatcagtactacacaaattgcagtgctggggagcacaacccttttaagggcgcaataaactttgacaatataggttatgcctggattgccatcttccaggttatcaccctggaagggtgggtggatataatgtattttgtcatggatgcgcacagcttttacaactttatctacttcatcctcctcataatcgttggttccttctttatgatcaacttgtgtttggtagtgatcgccacgcagttctccgagaccaaacaacgagaatcacagttgatgagggagcagcgcgtacgcttcctgtctaatgcgtccacactcgcctccttttctgaacctggctcctgctatgaggagctgctgaaatatctggtctatattctcagaaaggccgctcggagactggcccaggtgtccagggccgctggtgtgagggtggggttgctatcaagccccgctcccttgggcggtcaggagacccagccctctagcagctgcagcagaagccaccgacgattgtcagtgcatcatcttgttcaccatcatcatcaccatcaccaccactaccacctgggaaacggcaccctcagggctcctagagcatccccggaaattcaggatcgggacgccaatggctcccgacgcctgatgctcccccctccgtcaactccagcgctatcaggagccccacctggaggcgcagagagcgttcatagtttctatcacgcagactgtcatttggaaccagtgaggtgtcaggcccctcctcccaggagcccttctgaagcatctggacgaacggtgggaagcggtaaagtctacccgacagtgcacacttcaccacctccggaaactctcaaggagaaggccttggtggaagtagccgctagcagtggtcccccaacactgacgtcattgaatatcccccctggaccatactccagcatgcacaagctgcttgaaactcaatccactggcgcttgccagagtagctgtaagatttcaagcccatgcctcaaggccgattccggcgcatgcgggcctgactcatgtccatattgcgcacgggcaggcgcaggtgaggtagagctcgcggacagggagatgcccgattccgattccgaggccgtgtatgagtttacccaggacgcccagcactccgacctccgtgatcctcatagcagacggcaacgcagtttgggacccgacgctgaaccgagttccgtacttgcattctggaggctcatttgtgatacttttcgcaaaatagtagacagcaagtatttcggacgcggaatcatgatagccattctggttaacactctctccatgggcattgagtaccacgagcagcctgaggaacttaccaatgctctcgaaatcagtaatattgtgtttacgtccctcttcgccctcgagatgctgctgaagctactagtctacggacccttcggctacattaagaacccatataacatcttcgacggcgttatcgtcgttatctcggtctgggagatcgtggggcagcagggcggtggactgtccgtgctgagaacattccgcctcatgcgcgtgctgaaattggtacggtttttgcctgcactccagcgccaattggtagtgctgatgaaaacaatggataatgtcgcaaccttttgcatgcttctgatgctgttcatcttcattttctccattcttgggatgcatcttttcggatgcaagtttgcaagcgagagagatggcgatacccttcctgaccggaaaaatttcgactccctgctatgggctatcgtcacagtttttcagattcttacacaggaagactggaataaggtactgtacaacgggatggcttccacctcatcttgggctgccttgtactttattgccctcatgacattcgggaattacgtcttatttaatctcctggtagccattttggttgaaggattccaagcagaagaaattagcaaacgcgaagacgctagcggtcagctctcttgtatccagctaccggtggacagccagggtggtgatgccaataagtccgaaagtgagccagactttttctcccctagcctggatggtgacggcgaccgaaagaagtgcctggctctagtgtctcttggagagcaccccgagttgcggaaatcgctgctgccccctcttattatccatacagcggctactccgatgtcactgcccaaatccacatctaccgggctgggtgaagctctcggacccgcttcaagacgcacctcatccagcgggagtgctgagcctggtgcggctcatgaaatgaaatcccctccttctgcacggtcctctccccactcaccatggagtgcagcgagctcctggacctcacgcagaagctccaggaatagtttgggaagggcaccatccttgaaacgccgatcgccgtcaggggaaagaagaagcctgctcagcggcgagggacaggagtctcaggacgaagaagaatcatcagaggaggaacgagccagtccagccggaagcgaccatcggcacagagggagccttgagagagaggctaaaagtagtttcgacctcccagacactctgcaggtcccaggattgcatagaactgcatccgggcgaggtagtgcctccgaacaccaggattgtaatgggaagtccgctagcggaaggcttgcacgtgctctgaggccagatgacccaccattggacggggatgacgccgacgacgaggggaacctgagtaaaggggagcgcgtgagggcctggatccgggcacggctgcctgcctgctgcctcgaacgggacagttggagtgcatatatttttccgccacaaagccgatttcgtctactatgtcataggataatcacccataaaatgttcgaccatgtggtgctggttatcatctttctgaattgtataacaatcgccatggagcgacctaagattgatcctcactccgcggagcgtatatttcttactctcagcaattatatttttaccgctgtttttctggccgagatgacagtcaaagtggtggcgctgggctggtgtttcggcgaacaagcttatctgaggtcatcctggaacgtgctggatggcctgctggtactgataagtgttattgacattttggttagcatggtttctgattctgggactaaaatattaggaatgcttcgggtattaagactgctccggactcttaggccactccgggtgatatcaagagcccaggggctgaaattggtggtagaaaccctgatgtcaagtctgaaacccataggtaatatagttgttatatgctgcgccttcttcataatttttggcatcctcggcgtacagctcttcaagggcaagttcttcgtttgtcagggagaggacactcgcaatataaccaacaagagcgactgtgcagaagcctcctatagatgggtccgacataagtacaattttgataatctgggacaggccctcatgtcgttgttcgttctggcctctaaggacgggtgggttgacatcatgtatgacgggctggatgccgtaggcgtcgaccagcagccaatcatgaatcataacccatggatgctgctgtattttatatctttcttgctgatagtcgctttcttcgtcctgaacatgttcgtcggcgtcgtggtcgagaacttccataaatgtaggcagcaccaggaggaagaggaggctcggagacgtgaggagaaaaggttaagaaggctggaaaagaaaaggaggaacttgatgctagacgacgttattgccagcgggagctctgctagcgcggcatcagaggctcagtgtaagccgtattactctgactatagcaggttccgtttgctggtgcaccacctttgtacgtctcactaccttgacctgtttattaccggagtgatcggccttaatgtcgtgaccatggccatggagcactaccagcagccgcagatactggatgaagctttgaagatctgtaactatatttttacagtgattttcgtgttagagtccgtatttaagctggtcgccttcgggttccgtaggttttttcaggaccgctggaaccaacttgatctggcgatagtgctcctgtccatcatgggtataaccctcgaggaaattgaggtaaatgctagcctcccaatcaacccaacaataattagaatcatgcgcgtgctgcgcatcgctcgtgtgctcaaactgctgaagatggcagtggggatgcgagcccttctcgacacagtgatgcaagctcttcctcaggtaggcaatctaggccttcttttcatgttactgttcttcattttcgcagccctcggagtggagctcttcggcgacctggaatgcgacgaaactcatccttgtgaaggtctgggacgccatgccaccttcagaaattttggaatggccttcctgaccctcttccgtgtgtctaccggagacaactggaatggtatcatgaaggacaccctgcgagactgtgaccaggagagcacctgctacaataccgtgatctctccaatctacttcgtgagcttcgtgttaaccgcgcagttcgtgttggttaatgtagtgattgctgtgctcatgaaacatctggaagaatctaacaaggaagccaaggaagaggcagaactagaagctgagctggagctcgagatgaaaactttgtctccacagcctcattctcctctggggtctccttttctgtggccgggagtggagggccctgactctcctgattcccccaaacccggagcacttcaccccgcagctcatgcgagatctgcaagtcatttctcccttgagcacccaactatgcagccacaccccacagagttgccgggtcccgacctcctcacagtcagaaagtccggagtgtctcgcacacatagtttgcccaacgacagctacatgtgtcgccatggctccaccgccgagggccctcttggacataggggatggggtcttccaaaggcccagagcgggtcggtgctgtcagtgcactcccagccggctgacacttcatacattcttcagttacccaaagatgcaccgcatctgttgcagcctcactccgcccctacttggggcaccatacctaagctcccaccacccggtagatcacccctggctcaaagaccattgagacggcaggccgcaattcgcaccgactctctggatgtgcaaggtttaggttcacgtgaagacctgttggccgaggaagagccgccatcaccccgtgatcttaagaaatgctattccgtggaagcgcaatcctgccagcgcaggccaacatcctggcttgacgaacaacgacgtcactcaatcgccgtgtcatgtctcgatagcggctctcaacctcaccttggaacggatccgtccaacctcggtggccagcctctgggcggaccgggatccagaccaaagaaaaagctttctcctcccagcatcactatcgatccgcctgagtcccaggggccacgcacaccccctagtccaggcatctgcctgcgaaggagagcaccgtctagtgatagcaaagacccacttgcatcgggaccacctgactctatggccgcttcaccttcccctaaaaaagacgtgctgtctctgtctgggcttagttctgatcccgcagacctggacccata

SEQ ID NO: 90327 - DNA, 6633 bp, Artificial Sequence
  derived and/or modified sequence
atggacgaggaggaggatggagcgggcgccgaggagtcgggacagccccggagcttcatgcggctcaacgacctgtcgggggccgggggccggccggggccggggtcagcagaaaaggacccgggcagcgcggactccgaggcggaggggctgccgtacccggcgctggccccggtggttttcttctacttgagccaggacagccgcccgcggagctggtgtctccgcacggtctgtaacccctggtttgagcgcatcagcatgttggtcatccttctcaactgcgtgaccctgggcatgttccggccatgcgaggacatcgcctgtgactcccagcgctgccggatcctgcaggcctttgatgacttcatctttgccttctttgccgtggagatggtggtgaagatggtggccttgggcatctttgggaaaaagtgttacctgggagacacttggaaccggcttgactttttcatcgtcatcgcagggatgctggagtactcgctggacctgcagaacgtcagcttctcagctgtcaggacagtccgtgtgctgcgaccgctcagggccattaaccgggtgcccagcatgcgcatccttgtcacgttgctgctggatacgctgcccatgctgggcaacgtcctgctgctctgcttcttcgtcttcttcatcttcggcatcgtcggcgtccagctgtgggcagggctgcttcggaaccgatgcttcctacctgagaatttcagcctccccctgagcgtggacctggagcgctattaccagacagagaacgaggatgagagccccttcatctgctcccagccacgcgagaacggcatgcggtcctgcagaagcgtgcccacgctgcgcggggacgggggcggtggcccaccttgcggtctggactatgaggcctacaacagctccagcaacaccacctgtgtcaactggaaccagtactacaccaactgctcagcgggggagcacaaccccttcaagggcgccatcaactttgacaacattggctatgcctggatcgccatcttccaggtcatcacgctggagggctgggtcgacatcatgtactttgtgatggatgctcattccttctacaatttcatctacttcatcctcctcatcatcgtgggctccttcttcatgatcaacctgtgcctggtggtgattgccacgcagttctcagagaccaagcagcgggaaagccagctgatgcgggagcagcgtgtgcggttcctgtccaacgccagcaccctggctagcttctctgagcccggcagctgctatgaggagctgctcaagtacctggtgtacatccttcgtaaggcagcccgcaggctggctcaggtctctcgggcagcaggtgtgcgggttgggctgctcagcagcccagcacccctcgggggccaggagacccagcccagcagcagctgctctcgctcccaccgccgcctatccgtccaccacctggtgcaccaccaccaccaccatcaccaccactaccacctgggcaatgggacgctcagggccccccgggccagcccggagatccaggacagggatgccaatgggtcccgccggctcatgctgccaccaccctcgacgcctgccctctccggggccccccctggtggcgcagagtctgtgcacagcttctaccatgccgactgccacttagagccagtccgctgccaggcgccccctcccaggtccccatctgaggcatccggcaggactgtgggcagcgggaaggtgtatcccaccgtgcacaccagccctccaccggagacgctgaaggagaaggcactagtagaggtggctgccagctctgggcccccaaccctcaccagcctcaacatcccacccgggccctacagctccatgcacaagctgctggagacacagagtacaggtgcctgccaaagctcttgcaagatctccagcccttgcttgaaagcagacagtggagcctgtggtccagacagctgcccctactgtgcccgggccggggcaggggaggtggagctcgccgaccgtgaaatgcctgactcagacagcgaggcagtttatgagttcacacaggatgcccagcacagcgacctccgggacccccacagccggcggcaacggagcctgggcccagatgcagagcccagctctgtgctggccttctggaggctaatctgtgacaccttccgaaagattgtggacagcaagtactttggccggggaatcatgatcgccatcctggtcaacacactcagcatgggcatcgaataccacgagcagcccgaggagcttaccaacgccctagaaatcagcaacatcgtcttcaccagcctctttgccctggagatgctgctgaagctgcttgtgtatggtccctttggctacatcaagaatccctacaacatcttcgatggtgtcattgtggtcatcagcgtgtgggagatcgtgggccagcaggggggcggcctgtcggtgctgcggaccttccgcctgatgcgtgtgctgaagctggtgcgcttcctgccggcgctgcagcggcagctggtggtgctcatgaagaccatggacaacgtggccaccttctgcatgctgcttatgctcttcatcttcatcttcagcatcctgggcatgcatctcttcggctgcaagtttgcctctgagcgggatggggacaccctgccagaccggaagaattttgactccttgctctgggccatcgtcactgtctttcagatcctgacccaggaggactggaacaaagtcctctacaatggtatggcctccacgtcgtcctgggcggccctttatttcattgccctcatgaccttcggcaactacgtgctcttcaatttgctggtcgccattctggtggagggcttccaggcggaggaaatcagcaaacgggaagatgcgagtggacagttaagctgtattcagctgcctgtcgactcccaggggggagatgccaacaagtccgaatcagagcccgatttcttctcacccagcctggatggtgatggggacaggaagaagtgcttggccttggtgtccctgggagagcacccggagctgcggaagagcctgctgccgcctctcatcatccacacggccgccacacccatgtcgctgcccaagagcaccagcacgggcctgggcgaggcgctgggccctgcgtcgcgccgcaccagcagcagcgggtcggcagagcctggggcggcccacgagatgaagtcaccgcccagcgcccgcagctctccgcacagcccctggagcgctgcaagcagctggaccagcaggcgctccagccggaacagcctcggccgtgcacccagcctgaagcggagaagcccaagtggagagcggcggtccctgttgtcgggagaaggccaggagagccaggatgaagaggagagctcagaagaggagcgggccagccctgcgggcagtgaccatcgccacagggggtccctggagcgggaggccaagagttcctttgacctgccagacacactgcaggtgccagggctgcatcgcactgccagtggccgagggtctgcttctgagcaccaggactgcaatggcaagtcggcttcagggcgcctggcccgggccctgcggcctgatgaccccccactggatggggatgacgccgatgacgagggcaacctgagcaaaggggaacgggtccgcgcgtggatccgagcccgactccctgcctgctgcctcgagcgagactcctggtcagcctacatcttccctcctcagtccaggttccgcctcctgtgtcaccggatcatcacccacaagatgttcgaccacgtggtccttgtcatcatcttccttaactgcatcaccatcgccatggagcgccccaaaattgacccccacagcgctgaacgcatcttcctgaccctctccaattacatcttcaccgcagtctttctggctgaaatgacagtgaaggtggtggcactgggctggtgcttcggggagcaggcgtacctgcggagcagttggaacgtgctggacgggctgttggtgctcatctccgtcatcgacattctggtgtccatggtctctgacagcggcaccaagatcctgggcatgctgagggtgctgcggctgctgcggaccctgcgcccgctcagggtgatcagccgggcgcaggggctgaagctggtggtggagacgctgatgtcctcactgaaacccatcggcaacattgtagtcatctgctgtgccttcttcatcattttcggcatcttgggggtgcagctcttcaaagggaagtttttcgtgtgccagggcgaggataccaggaacatcaccaataaatcggactgtgccgaggccagttaccggtgggtccggcacaagtacaactttgacaaccttggccaggccctgatgtccctgttcgttttggcctccaaggatggttgggtggacatcatgtacgatgggctggatgctgtgggcgtggaccagcagcccatcatgaaccacaacccctggatgctgctgtacttcatctcgttcctgctcattgtggccttctttgtcctgaacatgtttgtgggtgtggtggtggagaacttccacaagtgtcggcagcaccaggaggaagaggaggcccggcggcgggaggagaagcgcctacgaagactggagaaaaagagaaggaatctaatgctggacgatgtaattgcttccggcagctcagccagcgctgcgtcagaagcccagtgcaaaccttactactccgactactcccgcttccggctcctcgtccaccacttgtgcaccagccactacctggacctcttcatcacaggtgtcatcgggctgaacgtggtcaccatggccatggagcactaccagcagccccagattctggatgaggctctgaagatctgcaactacatcttcactgtcatctttgtcttggagtcagttttcaaacttgtggcctttggtttccgtcggttcttccaggacaggtggaaccagctggacctggccattgtgctgctgtccatcatgggcatcacgctggaggaaatcgaggtcaacgcctcgctgcccatcaaccccaccatcatccgcatcatgagggtgctgcgcattgcccgagtgctgaagctgctgaagatggctgtgggcatgcgggcgctgctggacacggtgatgcaggccctgccccaggtggggaacctgggacttctcttcatgttgttgtttttcatctttgcagctctgggcgtggagctctttggagacctggagtgtgacgagacacacccctgtgagggcctgggccgtcatgccacctttcggaactttggcatggccttcctaaccctcttccgagtctccacaggtgacaattggaatggcattatgaaggacaccctccgggactgtgaccaggagtccacctgctacaacacggtcatctcgcctatctactttgtgtccttcgtgctgacggcccagttcgtgctagtcaacgtggtgatcgccgtgctgatgaagcacctggaggagagcaacaaggaggccaaggaggaggccgagctagaggctgagctggagctggagatgaagaccctcagcccccagccccactcgccactgggcagccccttcctctggcctggggtcgagggccccgacagccccgacagccccaagcctggggctctgcacccagcggcccacgcgagatcagcctcccacttttccctggagcaccccacgatgcagccccaccccacggagctgccaggaccagacttactgactgtgcggaagtctggggtcagccgaacgcactctctgcccaatgacagctacatgtgtcggcatgggagcactgccgaggggcccctgggacacaggggctgggggctccccaaagctcagtcaggctccgtcttgtccgttcactcccagccagcagataccagctacatcctgcagcttcccaaagatgcacctcatctgctccagccccacagcgccccaacctggggcaccatccccaaactgcccccaccaggacgctcccctttggctcagaggccactcaggcgccaggcagcaataaggactgactccttggacgttcagggtctgggcagccgggaagacctgctggcagaggaggagcccccatccccacgggacctgaagaagtgctacagcgtggaggcccagagctgccagcgccggcctacgtcctggctggatgagcagaggagacactctatcgccgtcagctgcctggacagcggctcccaaccccacctgggcacagacccctctaaccttgggggccagcctcttggggggcctgggagccggcccaagaaaaaactcagcccgcctagtatcaccatagacccccccgagagccaaggtcctcggaccccgcccagccctggtatctgcctccggaggagggctccgtccagcgactccaaggatcccttggcctctggcccccctgacagcatggctgcctcgccctccccaaagaaagatgtgctgagtctctccggtttatcctctgacccagcagacctggacccctgagtcctgccccacttt

SEQ ID NO: 90328 - protein, 1765 aa, Artificial Sequence
  derived and/or modified sequence
MDEEEDGAGAEESGQPRSFMRLNDLSGAGGRPGPGSAEKDPGSADSEAEGLPYPALAPVVFFYLSQDSRPRSWCLRTVCNPWFERISMLVILLNCVTLGMFRPCEDIACDSQRCRILQAFDDFIFAFFAVEMVVKMVALGIFGKKCYLGDTWNRLDFFIVIAGMLEYSLDLQNVSFSAVRTVRVLRPLRAINRVPSMRILVTLLLDTLPMLGNVLLLCFFVFFIFGIVGVQLWAGLLRNRCFLPENFSLPLSVDLERYYQTENEDESPFICSQPRENGMRSCRSVPTLRGDGGGGPPCGLDYEAYNSSSNTTCVNWNQYYTNCSAGEHNPFKGAINFDNIGYAWIAIFQVITLEGWVDIMYFVMDAHSFYNFIYFILLIIVGSFFMINLCLVVIATQFSETKQRESQLMREQRVRFLSNASTLASFSEPGSCYEELLKYLVYILRKAARRLAQVSRAAGVRVGLLSSPAPLGGQETQPSSSCSRSHRRLSVHHLVHHHHHHHHHYHLGNGTLRAPRASPEIQDRDANGSRRLMLPPPSTPALSGAPPGGAESVHSFYHADCHLEPVRCQAPPPRSPSEASGRTVGSGKVYPTVHTSPPPETLKEKALVEVAASSGPPTLTSLNIPPGPYSSMHKLLETQSTGACQSSCKISSPCLKADSGACGPDSCPYCARAGAGEVELADREMPDSDSEAVYEFTQDAQHSDLRDPHSRRQRSLGPDAEPSSVLAFWRLICDTFRKIVDSKYFGRGIMIAILVNTLSMGIEYHEQPEELTNALEISNIVFTSLFALEMLLKLLVYGPFGYIKNPYNIFDGVIVVISVWEIVGQQGGGLSVLRTFRLMRVLKLVRFLPALQRQLVVLMKTMDNVATFCMLLMLFIFIFSILGMHLFGCKFASERDGDTLPDRKNFDSLLWAIVTVFQILTQEDWNKVLYNGMASTSSWAALYFIALMTFGNYVLFNLLVAILVEGFQAEEISKREDASGQLSCIQLPVDSQGGDANKSESEPDFFSPSLDGDGDRKKCLALVSLGEHPELRKSLLPPLIIHTAATPMSLPKSTSTGLGEALGPASRRTSSSGSAEPGAAHEMKSPPSARSSPHSPWSAASSWTSRRSSRNSLGRAPSLKRRSPSGERRSLLSGEGQESQDEEESSEEERASPAGSDHRHRGSLEREAKSSFDLPDTLQVPGLHRTASGRGSASEHQDCNGKSASGRLARALRPDDPPLDGDDADDEGNLSKGERVRAWIRARLPACCLERDSWSAYIFPPQSRFRLLCHRIITHKMFDHVVLVIIFLNCITIAMERPKIDPHSAERIFLTLSNYIFTAVFLAEMTVKVVALGWCFGEQAYLRSSWNVLDGLLVLISVIDILVSMVSDSGTKILGMLRVLRLLRTLRPLRVISRAQGLKLVVETLMSSLKPIGNIVVICCAFFIIFGILGVQLFKGKFFVCQGEDTRNITNKSDCAEASYRWVRHKYNFDNLGQALMSLFVLASKDGWVDIMYDGLDAVGVDQQPIMNHNPWMLLYFISFLLIVAFFVLNMFVGVVVENFHKCRQHQEEEEARRREEKRLRRLEKKRRSKEKQMAEAQCKPYYSDYSRFRLLVHHLCTSHYLDLFITGVIGLNVVTMAMEHYQQPQILDEALKICNYIFTVIFVLESVFKLVAFGFRRFFQDRWNQLDLAIVLLSIMGITLEEIEVNASLPINPTIIRIMRVLRIARVLKLLKMAVGMRALLDTVMQALPQLWAWSSLETWSVTRHTPVRAWAVMPPFGTLAWPS

SEQ ID NO: 90329 - protein, 2194 aa, Artificial Sequence
  derived and/or modified sequence
MDEEEDGAGAEESGQPRSFMRLNDLSGAGGRPGPGSAEKDPGSADSEAEGLPYPALAPVVFFYLSQDSRPRSWCLRTVCNPWFERISMLVILLNCVTLGMFRPCEDIACDSQRCRILQAFDDFIFAFFAVEMVVKMVALGIFGKKCYLGDTWNRLDFFIVIAGMLEYSLDLQNVSFSAVRTVRVLRPLRAINRVPSMRILVTLLLDTLPMLGNVLLLCFFVFFIFGIVGVQLWAGLLRNRCFLPENFSLPLSVDLERYYQTENEDESPFICSQPRENGMRSCRSVPTLRGDGGGGPPCGLDYEAYNSSSNTTCVNWNQYYTNCSAGEHNPFKGAINFDNIGYAWIAIFQVITLEGWVDIMYFVMDAHSFYNFIYFILLIIVGSFFMINLCLVVIATQFSETKQRESQLMREQRVRFLSNASTLASFSEPGSCYEELLKYLVYILRKAARRLAQVSRAAGVRVGLLSSPAPLGGQETQPSSSCSRSHRRLSVHHLVHHHHHHHHHYHLGNGTLRAPRASPEIQDRDANGSRRLMLPPPSTPALSGAPPGGAESVHSFYHADCHLEPVRCQAPPPRSPSEASGRTVGSGKVYPTVHTSPPPETLKEKALVEVAASSGPPTLTSLNIPPGPYSSMHKLLETQSTGACQSSCKISSPCLKADSGACGPDSCPYCARAGAGEVELADREMPDSDSEAVYEFTQDAQHSDLRDPHSRRQRSLGPDAEPSSVLAFWRLICDTFRKIVDSKYFGRGIMIAILVNTLSMGIEYHEQPEELTNALEISNIVFTSLFALEMLLKLLVYGPFGYIKNPYNIFDGVIVVISVWEIVGQQGGGLSVLRTFRLMRVLKLVRFLPALQRQLVVLMKTMDNVATFCMLLMLFIFIFSILGMHLFGCKFASERDGDTLPDRKNFDSLLWAIVTVFQILTQEDWNKVLYNGMASTSSWAALYFIALMTFGNYVLFNLLVAILVEGFQAEEISKREDASGQLSCIQLPVDSQGGDANKSESEPDFFSPSLDGDGDRKKCLALVSLGEHPELRKSLLPPLIIHTAATPMSLPKSTSTGLGEALGPASRRTSSSGSAEPGAAHEMKSPPSARSSPHSPWSAASSWTSRRSSRNSLGRAPSLKRRSPSGERRSLLSGEGQESQDEEESSEEERASPAGSDHRHRGSLEREAKSSFDLPDTLQVPGLHRTASGRGSASEHQDCNGKSASGRLARALRPDDPPLDGDDADDEGNLSKGERVRAWIRARLPACCLERDSWSAYIFPPQSRFRLLCHRIITHKMFDHVVLVIIFLNCITIAMERPKIDPHSAERIFLTLSNYIFTAVFLAEMTVKVVALGWCFGEQAYLRSSWNVLDGLLVLISVIDILVSMVSDSGTKILGMLRVLRLLRTLRPLRVISRAQGLKLVVETLMSSLKPIGNIVVICCAFFIIFGILGVQLFKGKFFVCQGEDTRNITNKSDCAEASYRWVRHKYNFDNLGQALMSLFVLASKDGWVDIMYDGLDAVGVDQQPIMNHNPWMLLYFISFLLIVAFFVLNMFVGVVVENFHKCRQHQEEEEARRREEKRLRRLEKKRRSKEKQMAEAQCKPYYSDYSRFRLLVHHLCTSHYLDLFITGVIGLNVVTMAMEHYQQPQILDEALKICNYIFTVIFVLESVFKLVAFGFRRFFQDRWNQLDLAIVLLSIMGITLEEIEVNASLPINPTIIRIMRVLRIARVLKLLKMAVGMRALLDTVMQALPQVGNLGLLFMLLFFIFAALGVELFGDLECDETHPCEGLGRHATFRNFGMAFLTLFRVSTGDNWNGIMKDTLRDCDQESTCYNTVISPIYFVSFVLTAQFVLVNVVIAVLMKHLEESNKEAKEEAELEAELELEMKTLSPQPHSPLGSPFLWPGVEGPDSPDSPKPGALHPAAHARSASHFSLEHPTMQPHPTELPGPDLLTVRKSGVSRTHSLPNDSYMCRHGSTAEGPLGHRGWGLPKAQSGSVLSVHSQPADTSYILQLPKDAPHLLQPHSAPTWGTIPKLPPPGRSPLAQRPLRRQAAIRTDSLDVQGLGSREDLLAEEEPPSPRDLKKCYSVEAQSCQRRPTSWLDEQRRHSIAVSCLDSGSQPHLGTDPSNLGGQPLGGPGSRPKKKLSPPSITIDPPESQGPRTPPSPGICLRRRAPSSDSKDPLASGPPDSMAASPSPKKDVLSLSGLSSDPADLDP

SEQ ID NO: 90330 - DNA, 6585 bp, Artificial Sequence
  derived and/or modified sequence
atggacgaggaggaggacggcgccggcgccgaggagagcggccagcccagaagcttcatgagactgaacgacctgagcggcgccggcggcagacccggccccggcagcgccgagaaggaccccggcagcgccgacagcgaggccgagggcctgccctaccccgccctggcccccgtggtgttcttctacctgagccaggacagcagacccagaagctggtgcctgagaaccgtgtgcaacccctggttcgagagaatcagcatgctggtgatcctgctgaactgcgtgaccctgggcatgttcagaccctgcgaggacatcgcctgcgacagccagagatgcagaatcctgcaggccttcgacgacttcatcttcgccttcttcgccgtggagatggtggtgaagatggtggccctgggcatcttcggcaagaagtgctacctgggcgacacctggaacagactggacttcttcatcgtgatcgccggcatgctggagtacagcctggacctgcagaacgtgagcttcagcgccgtgagaaccgtgagagtgctgagacccctgagagccatcaacagagtgcccagcatgagaatcctggtgaccctgctgctggacaccctgcccatgctgggcaacgtgctgctgctgtgcttcttcgtgttcttcatcttcggcatcgtgggcgtgcagctgtgggccggcctgctgagaaacagatgcttcctgcccgagaacttcagcctgcccctgagcgtggacctggagagatactaccagaccgagaacgaggacgagagccccttcatctgcagccagcccagagagaacggcatgagaagctgcagaagcgtgcccaccctgagaggcgacggcggcggcggccccccctgcggcctggactacgaggcctacaacagcagcagcaacaccacctgcgtgaactggaaccagtactacaccaactgcagcgccggcgagcacaaccccttcaagggcgccatcaacttcgacaacatcggctacgcctggatcgccatcttccaggtgatcaccctggagggctgggtggacatcatgtacttcgtgatggacgcccacagcttctacaacttcatctacttcatcctgctgatcatcgtgggcagcttcttcatgatcaacctgtgcctggtggtgatcgccacccagttcagcgagaccaagcagagagagagccagctgatgagagagcagagagtgagattcctgagcaacgccagcaccctggccagcttcagcgagcccggcagctgctacgaggagctgctgaagtacctggtgtacatcctgagaaaggccgccagaagactggcccaggtgagcagagccgccggcgtgagagtgggcctgctgagcagccccgcccccctgggcggccaggagacccagcccagcagcagctgcagcagaagccacagaagactgagcgtgcaccacctggtgcaccaccaccaccaccaccaccaccactaccacctgggcaacggcaccctgagagcccccagagccagccccgagatccaggacagagacgccaacggcagcagaagactgatgctgcccccccccagcacccccgccctgagcggcgccccccccggcggcgccgagagcgtgcacagcttctaccacgccgactgccacctggagcccgtgagatgccaggcccccccccccagaagccccagcgaggccagcggcagaaccgtgggcagcggcaaggtgtaccccaccgtgcacaccagccccccccccgagaccctgaaggagaaggccctggtggaggtggccgccagcagcggcccccccaccctgaccagcctgaacatcccccccggcccctacagcagcatgcacaagctgctggagacccagagcaccggcgcctgccagagcagctgcaagatcagcagcccctgcctgaaggccgacagcggcgcctgcggccccgacagctgcccctactgcgccagagccggcgccggcgaggtggagctggccgacagagagatgcccgacagcgacagcgaggccgtgtacgagttcacccaggacgcccagcacagcgacctgagagacccccacagcagaagacagagaagcctgggccccgacgccgagcccagcagcgtgctggccttctggagactgatctgcgacaccttcagaaagatcgtggacagcaagtacttcggcagaggcatcatgatcgccatcctggtgaacaccctgagcatgggcatcgagtaccacgagcagcccgaggagctgaccaacgccctggagatcagcaacatcgtgttcaccagcctgttcgccctggagatgctgctgaagctgctggtgtacggccccttcggctacatcaagaacccctacaacatcttcgacggcgtgatcgtggtgatcagcgtgtgggagatcgtgggccagcagggcggcggcctgagcgtgctgagaaccttcagactgatgagagtgctgaagctggtgagattcctgcccgccctgcagagacagctggtggtgctgatgaagaccatggacaacgtggccaccttctgcatgctgctgatgctgttcatcttcatcttcagcatcctgggcatgcacctgttcggctgcaagttcgccagcgagagagacggcgacaccctgcccgacagaaagaacttcgacagcctgctgtgggccatcgtgaccgtgttccagatcctgacccaggaggactggaacaaggtgctgtacaacggcatggccagcaccagcagctgggccgccctgtacttcatcgccctgatgaccttcggcaactacgtgctgttcaacctgctggtggccatcctggtggagggcttccaggccgaggagatcagcaagagagaggacgccagcggccagctgagctgcatccagctgcccgtggacagccagggcggcgacgccaacaagagcgagagcgagcccgacttcttcagccccagcctggacggcgacggcgacagaaagaagtgcctggccctggtgagcctgggcgagcaccccgagctgagaaagagcctgctgccccccctgatcatccacaccgccgccacccccatgagcctgcccaagagcaccagcaccggcctgggcgaggccctgggccccgccagcagaagaaccagcagcagcggcagcgccgagcccggcgccgcccacgagatgaagagcccccccagcgccagaagcagcccccacagcccctggagcgccgccagcagctggaccagcagaagaagcagcagaaacagcctgggcagagcccccagcctgaagagaagaagccccagcggcgagagaagaagcctgctgagcggcgagggccaggagagccaggacgaggaggagagcagcgaggaggagagagccagccccgccggcagcgaccacagacacagaggcagcctggagagagaggccaagagcagcttcgacctgcccgacaccctgcaggtgcccggcctgcacagaaccgccagcggcagaggcagcgccagcgagcaccaggactgcaacggcaagagcgccagcggcagactggccagagccctgagacccgacgacccccccctggacggcgacgacgccgacgacgagggcaacctgagcaagggcgagagagtgagagcctggatcagagccagactgcccgcctgctgcctggagagagacagctggagcgcctacatcttccccccccagagcagattcagactgctgtgccacagaatcatcacccacaagatgttcgaccacgtggtgctggtgatcatcttcctgaactgcatcaccatcgccatggagagacccaagatcgacccccacagcgccgagagaatcttcctgaccctgagcaactacatcttcaccgccgtgttcctggccgagatgaccgtgaaggtggtggccctgggctggtgcttcggcgagcaggcctacctgagaagcagctggaacgtgctggacggcctgctggtgctgatcagcgtgatcgacatcctggtgagcatggtgagcgacagcggcaccaagatcctgggcatgctgagagtgctgagactgctgagaaccctgagacccctgagagtgatcagcagagcccagggcctgaagctggtggtggagaccctgatgagcagcctgaagcccatcggcaacatcgtggtgatctgctgcgccttcttcatcatcttcggcatcctgggcgtgcagctgttcaagggcaagttcttcgtgtgccagggcgaggacaccagaaacatcaccaacaagagcgactgcgccgaggccagctacagatgggtgagacacaagtacaacttcgacaacctgggccaggccctgatgagcctgttcgtgctggccagcaaggacggctgggtggacatcatgtacgacggcctggacgccgtgggcgtggaccagcagcccatcatgaaccacaacccctggatgctgctgtacttcatcagcttcctgctgatcgtggccttcttcgtgctgaacatgttcgtgggcgtggtggtggagaacttccacaagtgcagacagcaccaggaggaggaggaggccagaagaagagaggagaagagactgagaagactggagaagaagagaagaagcaaggagaagcagatggccgaggcccagtgcaagccctactacagcgactacagcagattcagactgctggtgcaccacctgtgcaccagccactacctggacctgttcatcaccggcgtgatcggcctgaacgtggtgaccatggccatggagcactaccagcagccccagatcctggacgaggccctgaagatctgcaactacatcttcaccgtgatcttcgtgctggagagcgtgttcaagctggtggccttcggcttcagaagattcttccaggacagatggaaccagctggacctggccatcgtgctgctgagcatcatgggcatcaccctggaggagatcgaggtgaacgccagcctgcccatcaaccccaccatcatcagaatcatgagagtgctgagaatcgccagagtgctgaagctgctgaagatggccgtgggcatgagagccctgctggacaccgtgatgcaggccctgccccaggtgggcaacctgggcctgctgttcatgctgctgttcttcatcttcgccgccctgggcgtggagctgttcggcgacctggagtgcgacgagacccacccctgcgagggcctgggcagacacgccaccttcagaaacttcggcatggccttcctgaccctgttcagagtgagcaccggcgacaactggaacggcatcatgaaggacaccctgagagactgcgaccaggagagcacctgctacaacaccgtgatcagccccatctacttcgtgagcttcgtgctgaccgcccagttcgtgctggtgaacgtggtgatcgccgtgctgatgaagcacctggaggagagcaacaaggaggccaaggaggaggccgagctggaggccgagctggagctggagatgaagaccctgagcccccagccccacagccccctgggcagccccttcctgtggcccggcgtggagggccccgacagccccgacagccccaagcccggcgccctgcaccccgccgcccacgccagaagcgccagccacttcagcctggagcaccccaccatgcagccccaccccaccgagctgcccggccccgacctgctgaccgtgagaaagagcggcgtgagcagaacccacagcctgcccaacgacagctacatgtgcagacacggcagcaccgccgagggccccctgggccacagaggctggggcctgcccaaggcccagagcggcagcgtgctgagcgtgcacagccagcccgccgacaccagctacatcctgcagctgcccaaggacgccccccacctgctgcagccccacagcgcccccacctggggcaccatccccaagctgcccccccccggcagaagccccctggcccagagacccctgagaagacaggccgccatcagaaccgacagcctggacgtgcagggcctgggcagcagagaggacctgctggccgaggaggagccccccagccccagagacctgaagaagtgctacagcgtggaggcccagagctgccagagaagacccaccagctggctggacgagcagagaagacacagcatcgccgtgagctgcctggacagcggcagccagccccacctgggcaccgaccccagcaacctgggcggccagcccctgggcggccccggcagcagacccaagaagaagctgagcccccccagcatcaccatcgacccccccgagagccagggccccagaaccccccccagccccggcatctgcctgagaagaagagcccccagcagcgacagcaaggaccccctggccagcggcccccccgacagcatggccgccagccccagccccaagaaggacgtgctgagcctgagcggcctgagcagcgaccccgccgacctggacccctag

SEQ ID NO: 90331 - DNA, 6585 bp, Artificial Sequence
  derived and/or modified sequence
atggatgaagaagaagatggtgctggcgccgaggagagcgggcagccccgttcgttcatgaggttgaacgacttgagtggcgccgggggtcgacccggaccaggcagcgctgaaaaggatcctggaagcgccgactcggaggctgaaggcctaccataccccgcgttggcaccagttgtgtttttttatctgagtcaagattcgcggccaagatcctggtgcctacgtaccgtgtgcaatccatggttcgagcggatcagtatgctggtcattcttctgaattgcgtgacattggggatgtttagaccttgtgaggacatcgcctgcgatagccagagatgccggattcttcaggccttcgatgacttcatattcgcgttcttcgctgtcgagatggtcgtgaagatggttgcgctgggcatttttggcaagaagtgctatcttggggatacgtggaacaggcttgacttttttattgtcatcgccggtatgctagaatacagtttggatctgcagaatgtgtcttttagcgcagtgagaacagttagggtactgcgaccactccgggccatcaacagggtcccatccatgaggatactggtaactctgctgctggatactttgcctatgctgggtaatgtgctactgctttgcttcttcgtgttttttatctttggaatcgtgggcgtccagttatgggccggactgctgcgtaaccggtgttttttaccggagaactttagtctgccattgagcgtggatttggaaagatattatcagaccgaaaacgaagacgagagcccgttcatatgttcccagcccagggaaaacggcatgagaagctgcagatcagtgcccacactcaggggagatggtggagggggtccaccgtgcgggcttgactatgaagcctataacagctcaagtaacaccacatgtgtgaactggaaccagtattacactaattgtagtgccggggaacacaatcccttcaagggcgccattaatttcgataacatcggctacgcctggatagcaatcttccaggtcattaccctggaaggctgggtggacatcatgtattttgtcatggatgcccactccttttataattttatctactttatactcctaattatcgtgggcagtttctttatgattaacttgtgcttggttgtgatcgctactcagtttagtgagacaaagcaacgggagtcacagctgatgagggagcaacgcgtaaggttcctcagcaacgcatcaactctggccagcttctctgaacccgggtcgtgttacgaggagctgctgaagtatcttgtttacattcttagaaaagcagcacgtaggttagctcaagtgtccagggccgccggggtgagagttggcctcctcagcagccctgcacctctcggaggacaagagacacagccgagctcctcttgtagcaggtctcatcggagactgtccgtacaccacttggtgcaccaccaccaccaccatcaccatcattatcacctggggaacgggactttgagggcaccacgcgcttctcctgaaattcaggatcgggatgcgaacggttcccgtcggctcatgcttccccccccatcgacgcctgcattgtccggtgctccccccggtggggccgaatctgtgcacagcttttatcacgccgattgtcatcttgaacctgtgaggtgccaggcgccaccaccccgcagcccctctgaggcctccggtcgcactgtgggcagcggcaaggtctaccctaccgtgcacacgtctcctccaccagagaccctcaaggagaaagcactggtggaggttgcggcctcatccgggccacctactctcacgtctcttaatattcctcccggaccttactcttctatgcacaagctgctggagacccagtcgacaggcgcctgccagtcgtcctgtaaaatctcttccccctgtctgaaagcagacagcggagcttgcggtccggactcttgtccatactgcgcccgggctggggctggcgaggtggagctggccgacagggagatgcccgacagtgactccgaggctgtatatgagttcacccaagacgcacaacactcagatctccgagaccctcactcacgcagacagagatctcttggccccgatgccgaaccttcctcagtcctcgcgttttggcgactgatttgcgacacgtttagaaaaatcgtggacagtaaatactttgggagagggattatgattgccatccttgtcaataccctgagcatgggtatcgaataccatgaacaacccgaggagctcaccaacgcactggagatttctaatattgtattcacctcactgtttgcgttagaaatgctgctaaagctcctcgtctacggcccattcgggtacattaagaacccttataacatcttcgatggagttatcgttgtgataagcgtttgggagatcgtgggtcagcagggaggggggttgagcgtgctgagaacgtttagacttatgagagtcctcaagttggtgagatttctccctgcgttgcaacggcagctggtggtgctgatgaaaactatggacaacgtggcaacgttctgtatgcttctgatgttgtttattttcatctttagcatattgggaatgcacctttttggttgcaagttcgcaagcgagcgagatggcgatacgctgcctgatcgcaagaactttgatagcttattgtgggctatcgtgactgtgttccagattctaacgcaggaagattggaacaaggtgttgtataatggtatggcttcgacttctagctgggccgccctctattttatagcgttgatgactttcggaaattacgtgctttttaacctgctcgtcgcaatcctagtcgaaggcttccaggctgaagaaatttccaagcgcgaggatgctagcgggcagttatcttgtatccaattgccagtcgactcccagggaggcgacgcgaacaagtccgagtctgagcccgattttttctccccgtcactggatggagatggggacaggaaaaaatgtttagccctcgtgtctctcggtgaacatcccgaattgcggaaatcactcttgccccccctgataatacacactgctgccactccgatgagtttacccaagagtactagtacagggcttggcgaggctctgggaccagcatccagacgcacttcatcctctggtagcgccgaaccaggggctgctcacgagatgaaaagcccgcctagtgcacgtagctcaccccatagcccttggtccgcggcatcatcttggaccagtcgcagatcgtccagaaattcactgggccgggcacccagcctgaaacgccgctctccaagtggagaaaggaggtccttgctctcaggcgaaggccaggagagtcaggacgaagaggagtcgtcagaagaggaacgcgccagccctgcaggtagcgaccaccgccaccgggggtcactggaacgagaagccaaatcatccttcgacctgcccgatacactccaagtcccgggcctgcacaggaccgcttctgggcgtggctcagccagcgagcaccaggattgcaatggcaagtcagcctctgggagactcgcgagggcactgcgtcccgacgatccacctctggatggcgacgacgctgacgacgaaggcaacctgagcaagggcgagcgggtccgagcatggattcgcgcccgactgcccgcatgttgcctcgagagagactcttggtctgcatacatttttccacctcagtcaaggttccgcttgttgtgtcatcgcatcatcacccacaagatgtttgaccacgtcgtattggtgattatctttctgaattgtatcacaatcgccatggagaggcccaaaattgacccccattctgcagagcgcatctttctgacgctgtcaaattatatctttactgcggttttcctggcagagatgaccgtgaaggtcgtagcactcggctggtgctttggggagcaggcttacctgagaagctcgtggaatgtgctggatgggctccttgtcttaatatccgtcatcgatatccttgtctccatggtttctgactcggggaccaagatcctgggcatgctgcgggtattgcgattgttaagaaccctgaggccgctgagagtcatctctcgggcccagggtctcaaactggtcgtggagactttgatgagttcacttaaaccgatcggaaatattgttgtcatctgttgtgccttctttattatcttcggaatcctgggcgtgcagctgtttaagggaaagttttttgtatgccaaggcgaagacactcggaacattactaacaagtcagactgtgccgaggcatcttaccgatgggtgcgccataagtacaacttcgataacttaggtcaggcgctgatgtctctgtttgtgctcgcatccaaagatggttgggtggatataatgtacgacggcctagacgcagtcggcgtagatcaacagcccatcatgaatcataacccctggatgttactttactttatttcctttctcctcattgttgcgttctttgtgttaaacatgtttgtgggagttgttgtggaaaatttccacaaatgtaggcagcatcaggaggaggaagaggctcgacgccgcgaggaaaaaagactcaggcggctagagaagaaaaggcgctccaaggaaaaacagatggcggaggcacagtgtaaaccgtactattccgactactccagattccggttgctggttcaccatctatgcaccagtcattacctcgacctctttattacgggtgttattggtttaaacgtggtaacgatggccatggagcactatcaacagccccaaattctcgacgaggccctgaagatatgcaactatatttttacggtgatcttcgtgctggagtctgtgtttaaactggtcgccttcgggttccgtaggtttttccaagacagatggaatcagcttgatctggctattgtcctcctgtcaattatggggattaccttagaggagatcgaagtcaacgcttccctccccattaaccccacgattattcgtataatgagggtgctaagaatagcccgagttttgaaactgttaaagatggctgtgggcatgagagcactgctcgacacagttatgcaggccctgccccaggtcggcaacttgggattattgtttatgcttctgtttttcatcttcgcggctctcggagtggaactgttcggcgacttagagtgtgacgaaacacacccttgtgaaggtttgggccggcatgctaccttccgaaactttggaatggcgttcctaaccctgtttagagtgtccacaggcgacaattggaatggtatcatgaaggacacgctgcgcgattgtgatcaggagtccacttgctacaataccgttatatccccgatttattttgtctcttttgtgttgacagcccagttcgttctggtgaatgtcgttatagcagtcctcatgaagcacctggaagagagcaataaggaggcaaaggaagaagctgaactggaggcagaactggagcttgaaatgaagacccttagcccccagccacatagtcccttaggctccccatttctgtggcccggcgtggaaggtcccgatagtccagactcaccaaagcctggcgctctacaccccgccgcccatgcccgatccgccagtcacttctccctggaacaccctaccatgcagccccacccaacagaattgcctggacccgacctcttgacagtcagaaaaagcggagtgtcccgcacgcacagcttgccaaatgattcatacatgtgcagacacggaagcacagctgagggtccactaggtcacagaggttgggggttacccaaagcgcagtcgggctctgtgcttagtgtgcacagccagcccgctgacacgtcatatattctccagctgcccaaagacgcccctcacctcctgcagccacattcagcccccacctggggcaccattcctaagttgcctcctcctggtaggtctcccttagcccaacgccctctgcgtcgccaggcagcaatccgtaccgactccctggacgttcagggtctgggttctcgggaggacctcctggcagaggaagaaccacccagccctagagacctcaagaagtgttactcggtagaagcacagtcctgtcagcggcggcctacgagctggctcgatgagcagcgacgtcacagcattgctgtttcctgtctagattcaggctcccagccccacttaggcacagaccctagtaacctgggaggtcaaccgcttggcggccccggatctaggccaaagaaaaagctctctccgcctagcatcactatcgaccctccagagagccaaggccctaggacaccccccagtcctgggatttgtctgcgtcgccgggcaccttcttccgatagtaaggaccccctcgcctctgggcctccggattccatggccgcttcaccttcccccaagaaggatgtgttgagtctgagcggcctgagtagcgatccagctgacctggatccatag

SEQ ID NO: 90332 - DNA, 6585 bp, Artificial Sequence
  derived and/or modified sequence
atggatgaggaggaggatggagctggagctgaggagagcggccagcccaggagcttcatgaggctgaatgacctgagcggggccggcggccggcccggccctggcagcgctgagaaggaccccggcagcgctgacagcgaggccgagggcctgccctacccagccctggcccctgtggtgttcttctacctgagccaggacagccggcccaggtcctggtgcctgaggacagtgtgcaacccctggtttgagcgcatctccatgctggtgatcctgctgaactgtgtgaccctgggcatgttccggccctgtgaagatattgcctgtgacagccagcgctgccgcatcctgcaggcctttgatgacttcatctttgccttctttgctgtggagatggtggtgaagatggtggccctgggcatctttgggaagaagtgctacctgggggacacctggaaccggctggacttcttcatcgtgattgctggcatgctggagtacagcctggacctgcagaatgtgtccttctctgctgtgaggacagtgcgggtgctgcggcccctgcgggccatcaacagagtgcccagcatgaggatcctggtgaccctgctgctggacaccctgcccatgctgggcaatgtgctgctgctgtgcttctttgtgttcttcatctttggaattgtgggcgtgcagctgtgggccggcctgctgaggaaccgctgcttcctgcctgagaacttcagcctgcccctgtctgtggacctggagcgctactaccagacagaaaatgaagatgagagccccttcatctgcagccagccccgggagaatggcatgaggagctgccgctctgtgcccaccctgcggggagatggcggcggcggccccccctgtggcctggactatgaggcctacaacagcagcagcaacaccacctgtgtgaactggaaccagtactacaccaactgcagcgctggggagcacaaccccttcaagggggccatcaactttgacaacatcggctacgcctggatcgccatcttccaggtgatcaccctggagggctgggtggacatcatgtactttgtgatggatgcccacagcttctacaacttcatctacttcatcctgctgatcatcgtgggcagcttcttcatgatcaacctgtgcctggtggtgattgccacccagttcagcgagaccaagcagcgggagagccagctgatgagggagcagagggtgcgcttcctgagcaatgccagcaccctggccagcttcagcgagcccggcagctgctatgaggagctgctgaagtacctggtgtacatcctgaggaaggccgcccggcggctggcccaggtgtccagagctgctggggtgcgggtgggcctgctgagcagccctgcccccctgggcggccaggagacccagcccagcagcagctgcagccgcagccaccggcggctgtctgtgcaccacctggtgcaccaccaccaccaccaccaccaccactaccacctgggcaatggcaccctgcgggccccccgggccagccctgagatccaggacagagatgccaacggcagccggcggctgatgctgcccccacccagcaccccagccctgagcggggcccctcctggaggagctgagagcgtgcacagcttctaccacgccgactgccacctggagcctgtgcgctgccaggcccccccacccaggagccccagcgaggccagcggccgcacagtgggcagcggcaaggtgtaccccaccgtgcacaccagccccccacctgagaccctgaaggagaaggccctggtggaggtggccgccagcagcggcccccccaccctgaccagcctgaacatccccccaggcccctacagctccatgcacaagctgctggagacccagagcactggagcctgccagagcagctgcaagatcagcagcccctgcctgaaggctgacagcggggcctgtggccctgacagctgcccctactgtgcccgggccggggccggggaggtggagctggccgaccgggagatgccagacagcgacagcgaggccgtgtatgagttcacccaggatgcccagcacagcgacctgcgggacccccacagccggcggcagaggagcctgggcccagatgctgagcccagctctgtgctggccttctggaggctcatctgtgacaccttcaggaagatcgtggacagcaagtacttcggccggggcatcatgattgccatcctggtgaacaccctgtccatgggcatcgagtaccacgagcagcctgaggagctgaccaatgccctggagatcagcaacatcgtgttcaccagcctgtttgccctggagatgctgctgaagctgctggtgtatggccccttcggctacatcaagaacccctacaacatctttgatggagtcatcgtggtgatctctgtgtgggagatcgtgggccagcagggcggcggcctgtctgtgctgcggaccttccggctgatgagggtgctgaagctggtgcgcttcctgcctgccctgcagaggcagctggtggtgctgatgaagaccatggacaacgtggccaccttctgcatgctgctgatgctgttcatcttcatcttcagcatcctgggcatgcacctgtttggctgcaagtttgccagcgagagagatggagacaccctgcctgacaggaagaactttgacagcctgctgtgggccatcgtgacagtgttccagatcctgacccaggaggactggaacaaggtgctgtacaacggcatggccagcaccagctcctgggccgccctgtacttcatcgccctgatgaccttcggcaactacgtgctcttcaacctgctggtggccatcctggtggagggcttccaggccgaggagatcagcaagcgggaggatgccagcggccagctgagctgcatccagctgcctgtggacagccagggcggagatgccaacaagtctgagagcgagccagacttcttcagccccagcctggatggagatggagacaggaagaagtgcctggccctggtgtccctgggggagcaccctgagctgaggaagagcctgctgcccccactcatcatccacacagctgccacccccatgagcctgcccaagagcaccagcacaggcctgggggaggccctgggccctgccagcaggaggaccagcagcagcggcagcgctgagcctggagctgcccacgagatgaagagcccccccagcgcccggagcagcccccacagcccctggagcgctgccagctcctggaccagccgccgcagcagcaggaacagcctgggccgggcccccagcctgaagagaagaagccccagcggggagcggcgcagcctgctgtctggagagggccaggagagccaggatgaggaggagagcagcgaggaggagcgggccagccctgctggcagtgaccaccgccaccggggcagcctggagcgggaggccaagagcagctttgacctgcctgacaccctgcaggtgcccggcctgcacaggacagccagcggccggggcagcgccagcgagcaccaggactgcaatggcaagagcgccagcggccgcctggcccgggccctgcggccagatgatcctcccctggatggagatgatgctgatgatgagggcaacctgagcaagggggagcgggtgcgggcctggatccgggcccggctgcctgcctgctgcctggagcgggacagctggagcgcctacatcttccccccccagagccgcttccggctgctgtgccaccgcatcatcacccacaagatgtttgaccacgtggtgctggtgatcatcttcctgaactgcatcaccatcgccatggagcggcccaagattgacccccacagcgctgagcgcatcttcctgaccctgagcaactacatcttcaccgctgtgttcctggccgagatgacagtgaaggtggtggccctgggctggtgcttcggggagcaggcctacctgcggagctcctggaatgtgctggatggcctgctggtgctgatctctgtgattgacatcctggtgtccatggtgtctgattctggcaccaagatcctgggcatgctgcgggtgctgcggctgctgcggaccctgcggcccctgcgggtcatcagccgggcccagggcctgaagctggtggtggagaccctgatgagcagcctgaagcccatcggcaacatcgtggtgatctgctgtgccttcttcatcatcttcggcatcctgggcgtgcagctgttcaagggcaagttctttgtgtgccagggcgaggacaccaggaacatcaccaacaagagtgactgtgccgaggccagctaccgctgggtgcgccacaagtacaactttgacaacctgggccaggccctgatgagcctgtttgtgctggccagcaaggatggctgggtggacatcatgtatgatggcctggatgctgtgggcgtggaccagcagcccatcatgaaccacaacccctggatgctgctgtacttcatctccttcctgctgattgtggccttctttgtgctgaacatgtttgtgggcgtggtggtggagaacttccacaagtgccggcagcaccaggaggaggaggaggcccggcggcgggaggagaagaggctgcggcggctggagaagaagagaagaagcaaggagaagcagatggccgaggcccagtgcaagccctactacagcgactacagccgcttccggctgctggtgcaccacctgtgcaccagccactacctggacctcttcatcactggagtcatcggcctgaatgtggtgaccatggccatggagcactaccagcagccccagatcctggatgaggccctgaagatctgcaactacatcttcaccgtcatctttgtgctggagagcgtcttcaagctggtggccttcggcttccgccgcttcttccaggaccgctggaaccagctggacctggccatcgtgctgctgagcatcatgggcatcaccctggaggagattgaggtgaatgccagcctgcccatcaaccccaccatcatccgcatcatgagggtgctgagaattgcccgggtgctgaagctgctgaagatggctgtgggcatgagggccctgctggacacagtgatgcaggccctgccccaggtgggcaacctgggcctgctcttcatgctgctcttcttcatctttgctgccctgggcgtggagctgtttggagacctggagtgtgatgagacccacccctgtgagggcctgggcagacatgccaccttcaggaactttggcatggccttcctgaccctcttccgggtgtccactggagacaactggaatggcatcatgaaggacaccctgcgggactgtgaccaggagagcacctgctacaacacagtcatcagccccatctactttgtgtcctttgtgctgacagcccagtttgtgctggtgaatgtggtgattgctgtgctgatgaagcacctggaggagagcaacaaggaggccaaggaggaggccgagctggaggccgagctggagctggagatgaagaccctgagcccccagccccacagccccctgggcagccccttcctgtggccaggagtggagggccctgacagcccagacagccccaagccaggggccctgcaccctgctgcccacgcccggagcgccagccacttcagcctggagcaccccaccatgcagccccaccccacagagctgcccggccctgacctgctgactgtgaggaagtctggagtgtccaggacccacagcctgcccaatgacagctacatgtgccgccacggcagcacagctgagggccccctgggccaccggggctggggcctgcccaaggcccagagcggctctgtgctgtctgtgcacagccagcctgctgacaccagctacatcctgcagctgcccaaggatgccccccacctgctgcagccccacagcgcccccacctggggcaccatccccaagctgcccccacctggccgcagccccctggcccagaggcccctgcggcggcaggccgccatcagaacagacagcctggatgtgcagggcctgggcagccgggaggacctgctggccgaggaggagccccccagcccccgggacctgaagaagtgctacagcgtggaggcccagagctgccagaggcggcccacctcctggctggatgagcagaggaggcacagcattgctgtgtcctgcctggacagcggcagccagccccacctgggcacagaccccagcaacctgggcggccagcccctgggcggccctggcagccggcccaagaagaagctgagccccccatccatcaccatcgaccccccagagagccagggccccaggaccccacccagccctggcatctgcctgcggcggcgggcccccagcagtgacagcaaggaccccctggccagcggccccccagacagcatggccgccagccccagccccaagaaggatgtgctgagcctgagcggcctgagcagtgaccctgctgacctggacccctag

SEQ ID NO: 90333 - DNA, 6585 bp, Artificial Sequence
  derived and/or modified sequence
atggacgaggaggaggacggcgccggcgccgaggagagcggccagccccgcagcttcatgcgactcaatgacctgtccggtgctggaggaaggcccggccctggatcagccgagaaagaccccggatccgccgattcagaagcagagggcctgccctaccctgcattagcaccagttgttttcttttatttatcacaagacagcagacctcggtcttggtgcctacggaccgtctgcaatccttggtttgaaagaatatcaatgctcgtcatcctgctgaattgcgtaactttaggcatgttcagaccttgtgaggatatcgcttgcgatagccagaggtgccgtatcctgcaagctttcgatgattttatcttcgcattcttcgcagtagagatggttgtaaagatggtagccttggggatcttcggcaagaaatgctacttaggagacacttggaaccgtcttgattttttcatcgtcatagctggaatgctcgaatatagcttggatctgcaaaacgtcagtttcagcgctgtgcggactgttcgagtgctgcggcccctgagggcaatcaatcgcgtgccttcaatgcggattctggttactctcctgctagatactcttccgatgctgggtaacgtccttcttctgtgctttttcgtgtttttcattttcggcatcgtaggcgtgcagttatgggcagggctactgcgtaatcgatgcttcctgcctgagaacttctccctgccgttgtcggtggaccttgagcggtactaccagacggaaaatgaggacgaatcgcctttcatctgcagtcagccccgggaaaatggaatgcgctcctgtaggtcagttcctaccctgcgaggagatggaggaggaggaccaccgtgtggtctcgactacgaggcgtacaatagcagcagcaacacgacctgcgtgaactggaaccaatactacacaaactgttcagctggcgaacacaatccattcaaaggagcaataaatttcgataatataggttatgcttggatcgcaatttttcaggtaataacactggagggatgggtggacattatgtattttgtgatggatgcccactcattttataatttcatttactttatcctgctgattattgtggggagcttctttatgatcaacctgtgtctggtggttatcgccacccagttcagcgaaaccaaacagcgagaatcccagctcatgagggaacagcgagtcagatttctgagcaatgcttccaccctggcaagctttagcgagccagggagttgctacgaggaactgctgaaatatttagtgtacatactgaggaaagccgcccgacggctcgcccaagtctctcgcgctgcaggtgtgcgcgtcgggctcttgtccagtccagcacccctgggcgggcaggagacgcagccaagctcttcttgttccagaagtcatcgccgcttgtcagttcatcacctggtccaccatcatcaccaccaccatcaccattaccatctggggaatggaacgcttcgggcgcctagagcgtcacccgagattcaagaccgagacgccaacggctcccgccggttaatgctgcccccaccatcaacccccgccctgagcggcgcaccgcctggcggtgctgagagcgtgcattcattttaccacgccgactgccacctggaacccgtccggtgccaggcgcccccacccaggtcacctagcgaggcatccggaagaaccgtcggctccggcaaggtgtatcctacagtgcatacttccccacccccagagacattgaaagaaaaagcgctcgtcgaggtagccgccagcagtggtcctccaacactgacttcactgaatattcctcccggaccctactcctccatgcacaagctgcttgagactcagagcaccggggcgtgtcagtcaagctgcaaaatctctagtccgtgtttaaaagccgacagtggcgcgtgtgggcccgattcctgtccctattgcgcgagagcaggggccggtgaggtggagctggcagatagggaaatgcccgattccgacagcgaggctgtctatgaattcacccaggacgcccagcactccgatctgagagatccccacagtagacggcagcggtccctcgggccagatgccgaaccaagttccgtgcttgctttttggaggttgatatgcgacacattccgaaaaattgtggactccaaatacttcggacgcggcataatgattgcaatattggtgaataccctttccatgggcatagaataccatgaacagccagaggagcttaccaacgccctcgagataagcaacatcgtgtttacgagcctgttcgccctcgagatgttgctgaagctcctggtttatggccctttcggttacatcaagaatccatataatatcttcgacggagtaatagtggtcatcagcgtgtgggagattgtgggccagcaggggggcggactctctgtactgaggacctttcgcttgatgcgggtactcaagctggtgcgctttctgccagctctccagcgccagcttgttgtcctcatgaagactatggacaacgtcgccactttctgtatgctgctgatgctgttcatctttatcttcagcatactgggcatgcatttatttggctgtaaattcgcgtccgaacgagatggcgatactcttccagaccggaaaaatttcgactctctgctgtgggccatagtgacagtgttccaaatcctcacacaggaggactggaacaaggtgctctataacggcatggcctcgacatcgagctgggccgctctgtatttcatcgcacttatgacgttcgggaactatgtgcttttcaatctgctggttgcaatactggttgagggcttccaggctgaagagataagtaaacgggaagacgcctccggccagttgtcctgcattcagcttcccgtcgattcgcagggaggggacgcaaacaagagcgagagcgagccagactttttttctcccagcctggatggggatggagacaggaagaagtgcttggctctggtatctctcggagaacatccagagctgaggaaaagcctgctgccaccactgatcatccacacggccgcaacacctatgtccttgccaaagtccacctccactggcctaggagaggccctgggacccgccagccggaggaccagtagcagcggcagtgccgagcccggcgccgcccacgagatgaagtcgcctccatcagctcgttcgtctcctcattcaccttggtccgcagcctcaagttggacttccaggcgcagctcacgtaactcattagggcgggcccccagcctcaaacgcaggtccccctccggagagaggagaagcctactgagtggcgagggccaggaatcccaggatgaagaggaaagctcagaggaagagagagcgagcccggccggtagtgaccaccgtcatcggggatccttagagcgggaagctaagtcaagtttcgatttgccagacactctacaggtccccggcttacatcgaacagcatcaggtcgaggtagtgcttctgaacaccaagattgcaacggcaaaagcgcgtcaggtcgtttggcaagggcactacgaccagatgaccccccattggatggcgacgatgcggacgatgaaggtaatttgtccaagggggagcgcgtccgtgcctggattcgggccagactaccagcatgctgtctcgagagagacagctggtcagcgtacattttcccacctcagagccggttcaggcttctgtgccacaggatcattacgcacaaaatgttcgatcacgtagtattggtaattattttcctcaactgtataactattgccatggaaagaccgaagattgacccccactcagccgaacgcatcttcctgacgctgtccaattacatctttaccgctgtcttcttggccgaaatgaccgttaaggtagtcgcccttgggtggtgttttggggagcaagcctatcttaggtcttcctggaatgtgctggacgggctattggtcctgatatcagtaatagacatacttgtgagtatggtctccgactcaggcaccaaaattctgggcatgcttagggtactgcggttgctcagaacactgaggcctttacgcgtgattagcagagcgcaggggttgaagctagtagtggagaccttgatgagtagcctgaagccaatcggtaatattgtggtaatttgctgtgccttttttataatcttcggaatattgggcgttcagcttttcaagggaaaattctttgtctgtcagggagaagataccaggaatatcacaaacaagagcgactgtgccgaggcttcctatcgatgggtgcgacacaaatacaatttcgataatctgggacaggcacttatgagccttttcgtcctcgccagtaaagacggatgggtcgatataatgtatgacgggctggacgctgtgggtgtggatcagcagccaatcatgaaccataatccctggatgctgctatatttcatctcttttctgctgatagtggcatttttcgtgctgaacatgtttgttggggtggtggtggagaattttcacaaatgcaggcagcatcaggaggaggaggaggcccggcgtcgggaggaaaaacgattgagaaggctcgaaaagaaaaggcgcagcaaagagaaacagatggcagaagcgcaatgcaagccctattatagcgactactctcgcttccggctactggtgcatcatttgtgtaccagtcactacctggacctgtttattactggcgtgatcgggctcaatgtagtgactatggccatggagcactaccaacaacctcaaatccttgacgaggctcttaaaatctgcaattacatcttcactgtcatcttcgtccttgaaagcgtgttcaaactcgtcgcctttggattccgacggttcttccaggataggtggaaccaattggaccttgcaatcgtgttactgtcgatcatggggatcacgcttgaggagatagaagtgaatgcctccctgccaataaaccctactattatcagaataatgcgcgtgctgagaattgctagagtgctcaagctgctgaagatggcggtgggaatgagggctctgctagacactgttatgcaggcgctccctcaggtgggcaacctaggtctgctgtttatgttgttattctttatattcgccgcgttgggagttgaactctttggagatttagagtgcgatgaaacccatccgtgtgagggattgggaaggcacgccacctttcggaactttggaatggcattcttgactctctttagagtaagtaccggtgacaactggaatggaattatgaaagatactttacgggactgtgatcaggagtcaacttgctacaacactgtgatcagtcctatctacttcgtttcattcgtattgaccgctcaattcgtactggtcaacgtggtaatcgccgttctgatgaagcacctggaagaaagtaataaggaagccaaagaagaggcagaactcgaagccgagttagaactcgagatgaaaactctctcaccacaaccccactcccccctgggttcccccttcctctggcctggagtcgagggaccagatagtccggattcccccaagccaggcgcacttcatcccgccgctcacgcaaggtccgcgtctcacttcagcttggaacaccccacaatgcagcctcatcccactgagctgcctgggccagacctgctcacagtccgcaagtcgggcgtgtctcgtacacactcgctgccaaatgactcttacatgtgtcgacatggctctaccgccgagggccccttgggccaccgcggctgggggctgcctaaggcccaaagcgggtccgttctgtcggtccactcccaacctgcagatactagttacattctccagcttccaaaagatgcaccgcacctccttcaaccccatagtgcccctacctggggcacgatccctaagctgccaccaccgggcagatcacctctcgcacagagacctcttcgccggcaggccgccatccgcaccgattctctggacgttcagggcctcggaagccgcgaagacttgcttgctgaagaagagcctccctctccacgcgacttgaagaagtgctatagcgtggaagcccaaagctgccagagacgcccaacctcttggctcgatgaacagaggcgccattcaatagctgtgtcgtgccttgacagcgggtcacagccacatttaggcaccgatccatctaacttgggaggacaacctctcggcgggccgggaagcaggcctaaaaaaaagctctccccgccttcaattaccatcgacccacccgaatctcagggcccccgcacaccgcccagccccggaatatgcctgcggcgcagggccccttcgagcgacagcaaggatccacttgcctcaggcccaccagactcaatggccgccagcccatcacctaaaaaagatgttcttagtctgtcaggtctgagttcagaccccgccgatttggatccatag

SEQ ID NO: 90334 - DNA, 6584 bp, Artificial Sequence
  derived and/or modified sequence
atggatgaggaggaagacggcgcaggcgctgaagagtcggggcagccgaggtcttttatgcggctgaacgacctttccggagctggcggtaggccgggaccaggaagcgctgaaaaagaccccggaagcgcggatagcgaggccgaaggcctcccttatccggctcttgccccagtagtgttcttctacctgagccaggatagtaggcctaggtcctggtgcctccgcacagtgtgtaacccttggttcgaaagaatttccatgctggtgattctgctaaattgcgtgacgctaggcatgtttcgcccatgtgaagatatcgcttgcgattctcagagatgtcggatcctgcaggcatttgatgacttcatcttcgctttctttgccgtggagatggttgtaaaaatggtggccctggggatatttggtaagaagtgctatctgggtgatacctggaacagactcgacttttttattgtgattgcaggcatgctggagtatagcctggacttgcagaatgtgagcttcagcgcggtgagaacagtaagggtgctgcggcctcttagagcgatcaatagggtccccagcatgcgtatccttgtaacactcctcttggacactctcccaatgttaggtaacgtgctcctgttgtgctttttcgtcttttttatttttgggatcgtgggagttcagctttgggctggattactcaggaatcggtgtttcctgccagaaaatttctcgctgcctctctccgtggacctcgagagatactatcagaccgagaacgaggatgagtcccccttcatttgttctcaaccaagggagaacggaatgcggtcatgccgcagtgtgcccactcttaggggcgatggcggagggggacctccctgcggcctggactatgaagcctacaacagcagtagcaatacaacttgcgtgaattggaatcaatattataccaactgcagcgccggtgaacataacccattcaagggagctataaattttgacaatattgggtacgcttggatcgcgatattccaggttatcactctggaaggatgggtggacataatgtatttcgttatggacgcccactcattctacaacttcatttatttcatcctgctgatcattgtcgggagcttcttcatgatcaacctttgcctggtggtgatcgctacacagttttcagaaacaaagcagcgcgaaagtcaattgatgcgcgagcagcgggtgcgatttcttagtaacgctagcactttggcctcctttagtgaacccggatcctgttatgaggaattgctgaagtatctggtgtatatcctcagaaaagcagccagacgactcgctcaggttagtcgggctgcaggtgtacgcgtgggcttgttaagcagccctgcccctctgggcggacaagaaacccagccttcttcctcctgtagccgctctcaccgcagactgtcagtgcatcatcttgtgcaccaccaccaccaccaccaccaccactaccacctggggaatggtactctacgggctcctagagctagtcctgagatacaagatagagacgccaacggatcccgtcggttaatgcttcctcccccttccacaccagccctgagcggggctccccctggcggagcggagtctgtccatagcttctatcacgccgactgccatctagaaccggttcgctgccaggccccaccaccaagaagtcccagtgaagcctctggtcgcaccgtcggctctggcaaagtttaccccactgtccacacctcccccccaccagagacactaaaagagaaggccctggtggaggtcgccgcttcatccggtcccccaaccttgacttcccttaatatcccaccgggaccatactcgtccatgcacaagttactcgaaacacaatcgaccggtgcatgccaatccagctgtaagatttcttccccctgcctcaaggctgacagcggagcgtgtggaccagactcatgcccctattgcgctcgcgcaggagccggagaggtcgagctggctgaccgggagatgcccgactccgactccgaggccgtctacgaatttacccaggacgcacagcactctgatctccgtgatccccacagcagacgtcagcgcagtctggggccagacgctgagcccagtagcgtcctggccttctggcgactgatttgtgatacattccggaaaatcgttgatagcaaatacttcgggcgaggtatcatgattgcaatactcgtgaacactcttagcatgggcatagagtaccacgagcaaccagaagaactcacaaatgcactggaaatttcaaacattgtgtttacatcactttttgccctggagatgttacttaaattgttggtctatggcccatttgggtatatcaaaaatccttacaatatcttcgacggtgtgatcgtggtgataagcgtatgggagatagtgggacagcagggaggaggtttaagcgtgcttaggacttttagattgatgcgcgttttgaaactagtacgattcctccccgctctgcagcgccaacttgtcgtactgatgaagacaatggataacgtggcaacattttgtatgctcctgatgcttttcatcttcattttttcaatcctcggcatgcatctgttcggctgtaagtttgcttcagagcgcgatggcgataccttacccgatcgcaagaattttgactctttgttgtgggctatcgttacagtctttcagattctgactcaggaggactggaacaaggtgctttataatggtatggccagtacatccagttgggccgctctgtacttcatcgccctcatgaccttcgggaactatgtactgtttaacttgctggtcgccattctggtcgaagggtttcaggctgaggaaatatctaaaagagaagacgcaagtggccagctgtcgtgcattcagctgcctgtcgacagccagggcggagacgctaacaaatctgagagcgagccagacttcttcagtccatcccttgacggagacggagaccgcaagaagtgtcttgctttagtctcccttggagagcatccagaactacgaaagagcttgctaccacccttgatcattcacactgcggcaacaccgatgagcctgcctaagtcaacttcaacgggcctcggcgaagcactcggaccagcctctcgccgaacatctagttctggaagcgcggagcctggtgctgcccacgagatgaagtccccgccatccgctaggagcagcccccacagcccatggtccgcagccagctcctggacttctaggcggagctcccgcaactctctgggtcgtgctccatctttgaagaggcgttccccaagcggggaacgcaggtctttactttcgggcgagggccaagaatcacaggatgaggaggagtcttccgaggaggaaagagcgtcaccggcaggttccgatcacaggcatcgcggatcattggaaagggaggcaaagtcctccttcgacttaccagacacattacaggtaccaggcctgcatcgaaccgccagtggtcgcggatccgcttctgagcatcaagactgtaacggtaagagcgccagcggtcgattggcaagagccctaagacctgatgaccctccgcttgacggggacgacgccgatgatgaagggaatcttagcaaaggagagagagtgagagcttggatccgtgctcggctacccgcttgctgtcttgaacgtgactcatggagcgcgtacatcttcccaccgcagtcaaggtttaggttgctgtgccatagaatcataacccataaaatgttcgaccatgttgtcctcgtaatcatcttccttaactgtattaccatcgccatggagaggcccaaaatagacccacactcagctgaacggatatttctcacgcttagtaactacatttttaccgctgtctttttggcagagatgactgtcaaggtggtggcactggggtggtgtttcggggagcaggcctatctcaggagtagttggaacgttcttgacgggctgttggtgttgatatccgtgatcgacatattggtgagtatggtttcagacagtggtactaagatcctaggtatgctgcgggtcctgagattgcttagaacactgcgcccactgagggtgatcagcagagctcagggcttgaagctcgtagtcgagactctaatgtctagtttaaagccaattggcaatatcgtagtgatctgttgtgctttttttatcattttcggaattctgggtgtacagctgttcaagggaaaattctttgtgtgccagggagaagatacacgaaatataacaaataaaagtgattgtgcagaggcctcctaccgttgggtaagacacaaatataactttgataatctcgggcaggctctgatgagcctgttcgtgctcgcatctaaagatggatgggtggatatcatgtacgacgggctggacgccgtcggggtagaccagcagccgatcatgaaccataacccatggatgcttctctatttcatttcttttctgctgatcgtggcttttttcgttcttaacatgtttgtaggcgtcgtcgttgagaacttccataaatgtcgacaacatcaggaagaagaggaggcccgtcgtcgagaggagaagcgcttgcggagactcgaaaaaaagcgcagatcaaaggaaaagcaaatggccgaagcccagtgcaagccatactattctgattactcaaggttccgcctgctcgtccatcatctgtgtacttcacactacctggacctcttcataaccggcgtgattggccttaacgtggtgacaatggccatggagcactaccagcagccccagattcttgacgaagctctcaaaatctgtaactacatctttaccgtgattttcgtcctcgagagcgtttttaaattggtcgccttcggcttccgcagattcttccaggaccggtggaatcagctcgacttagccattgtgctgttatccatcatgggcataaccctggaagagatcgaagtcaacgcatccctccctataaaccccactatcataagaatcatgagagtgctgcgcatcgcacgcgtgctcaagttgctcaaaatggccgtggggatgagagcccttctagacacggtgatgcaggcactgccccaagtgggaaatttaggcctgctatttatgctgctgttcttcattttcgccgcactgggtgttgaactgtttggggacctggagtgcgacgaaacgcacccctgcgaggggctgggacgccacgccaccttcaggaatttcggcatggcattcttgaccttgttccgggtgagcacaggcgataactggaatggtattatgaaggataccttgagggattgtgaccaggagagcacctgctataatacggtcatatccccaatatacttcgttagcttcgttctgacagcccagttcgttcttgtgaacgtggtgatcgccgtactgatgaaacacctggaggagtcgaacaaagaagccaaggaggaggctgagctggaagctgagctggagctggaaatgaagacactgtcaccccagccgcatagtcctcttggaagtccctttctgtggcctggagtggaaggtcccgactctcccgatagccccaaaccaggggcattacatcctgcagcacatgcaagatcggcttcccatttctccctagaacaccctaccatgcagccacatcccactgaactccctgggccagatctactcacagtccgcaagagcggggtgtcccgcacacacagcctgcccaatgatagctatatgtgtcgccatggttctacagccgaagggcctctgggacataggggttggggattgcctaaagctcagtccggaagcgtacttagtgtccattcccagccggctgataccagttacatattgcagctcccgaaggatgctccacatctccttcagccccatagtgcccctacctggggaactatccccaaattgccccctccagggcgatcaccgctcgcacaaagaccactgcggaggcaggccgcaatcagaacagatagcctggacgtccagggactgggcagcagggaggacctgcttgccgaagaagaaccaccttccccacgtgacttgaaaaagtgctattcggtcgaagcccaatcttgtcagcgaagaccaaccagttggctggatgagcaaaggaggcatagcattgccgtgagctgcctagattcagggtctcaaccccacctcgggacagacccgagcaatctgggaggacaacccttaggcggaccaggatcgaggccgaaaaaaaaactttcaccccctagtatcacgattgatcccccagaatcacagggccctcgtacacccccatcccctgggatctgcttacgtcggagggcccctagcagcgatagcaaagaccccctggcctctggccctcccgacagcatggccgcatcaccaagtccgaaaaaagacgttttgtctttaagtgggctctcatcagatcccgcagatctggacccata

SEQ ID NO: 90335 - DNA, 6600 bp, Artificial Sequence
  derived and/or modified sequence
atggacgaggaggaggatggagcgggcgccgaggagtcgggacagccccggagcttcatgcggctcaacgacctgtcgggggccgggggccggccggggccggggtcagcagaaaaggacccgggcagcgcggactccgaggcggaggggctgccgtacccggcgctggccccggtggttttcttctacttgagccaggacagccgcccgcggagctggtgtctccgcacggtctgtaacccctggtttgagcgcatcagcatgttggtcatccttctcaactgcgtgaccctgggcatgttccggccatgcgaggacatcgcctgtgactcccagcgctgccggatcctgcaggcctttgatgacttcatctttgccttctttgccgtggagatggtggtgaagatggtggccttgggcatctttgggaaaaagtgttacctgggagacacttggaaccggcttgactttttcatcgtcatcgcagggatgctggagtactcgctggacctgcagaacgtcagcttctcagctgtcaggacagtccgtgtgctgcgaccgctcagggccattaaccgggtgcccagcatgcgcatccttgtcacgttgctgctggatacgctgcccatgctgggcaacgtcctgctgctctgcttcttcgtcttcttcatcttcggcatcgtcggcgtccagctgtgggcagggctgcttcggaaccgatgcttcctacctgagaatttcagcctccccctgagcgtggacctggagcgctattaccagacagagaacgaggatgagagccccttcatctgctcccagccacgcgagaacggcatgcggtcctgcagaagcgtgcccacgctgcgcggggacgggggcggtggcccaccttgcggtctggactatgaggcctacaacagctccagcaacaccacctgtgtcaactggaaccagtactacaccaactgctcagcgggggagcacaaccccttcaagggcgccatcaactttgacaacattggctatgcctggatcgccatcttccaggtcatcacgctggagggctgggtcgacatcatgtactttgtgatggatgctcattccttctacaatttcatctacttcatcctcctcatcatcgtgggctccttcttcatgatcaacctgtgcctggtggtgattgccacgcagttctcagagaccaagcagcgggaaagccagctgatgcgggagcagcgtgtgcggttcctgtccaacgccagcaccctggctagcttctctgagcccggcagctgctatgaggagctgctcaagtacctggtgtacatccttcgtaaggcagcccgcaggctggctcaggtctctcgggcagcaggtgtgcgggttgggctgctcagcagcccagcacccctcgggggccaggagacccagcccagcagcagctgctctcgctcccaccgccgcctatccgtccaccacctggtgcaccaccaccaccaccatcaccaccactaccacctgggcaatgggacgctcagggccccccgggccagcccggagatccaggacagggatgccaatgggtcccgccggctcatgctgccaccaccctcgacgcctgccctctccggggccccccctggtggcgcagagtctgtgcacagcttctaccatgccgactgccacttagagccagtccgctgccaggcgccccctcccaggtccccatctgaggcatccggcaggactgtgggcagcgggaaggtgtatcccaccgtgcacaccagccctccaccggagacgctgaaggagaaggcactagtagaggtggctgccagctctgggcccccaaccctcaccagcctcaacatcccacccgggccctacagctccatgcacaagctgctggagacacagagtacaggtgcctgccaaagctcttgcaagatctccagcccttgcttgaaagcagacagtggagcctgtggtccagacagctgcccctactgtgcccgggccggggcaggggaggtggagctcgccgaccgtgaaatgcctgactcagacagcgaggcagtttatgagttcacacaggatgcccagcacagcgacctccgggacccccacagccggcggcaacggagcctgggcccagatgcagagcccagctctgtgctggccttctggaggctaatctgtgacaccttccgaaagattgtggacagcaagtactttggccggggaatcatgatcgccatcctggtcaacacactcagcatgggcatcgaataccacgagcagcccgaggagcttaccaacgccctagaaatcagcaacatcgtcttcaccagcctctttgccctggagatgctgctgaagctgcttgtgtatggtccctttggctacatcaagaatccctacaacatcttcgatggtgtcattgtggtcatcagcgtgtgggagatcgtgggccagcaggggggcggcctgtcggtgctgcggaccttccgcctgatgcgtgtgctgaagctggtgcgcttcctgccggcgctgcagcggcagctggtggtgctcatgaagaccatggacaacgtggccaccttctgcatgctgcttatgctcttcatcttcatcttcagcatcctgggcatgcatctcttcggctgcaagtttgcctctgagcgggatggggacaccctgccagaccggaagaattttgactccttgctctgggccatcgtcactgtctttcagatcctgacccaggaggactggaacaaagtcctctacaatggtatggcctccacgtcgtcctgggcggccctttatttcattgccctcatgaccttcggcaactacgtgctcttcaatttgctggtcgccattctggtggagggcttccaggcggaggaaatcagcaaacgggaagatgcgagtggacagttaagctgtattcagctgcctgtcgactcccaggggggagatgccaacaagtccgaatcagagcccgatttcttctcacccagcctggatggtgatggggacaggaagaagtgcttggccttggtgtccctgggagagcacccggagctgcggaagagcctgctgccgcctctcatcatccacacggccgccacacccatgtcgctgcccaagagcaccagcacgggcctgggcgaggcgctgggccctgcgtcgcgccgcaccagcagcagcgggtcggcagagcctggggcggcccacgagatgaagtcaccgcccagcgcccgcagctctccgcacagcccctggagcgctgcaagcagctggaccagcaggcgctccagccggaacagcctcggccgtgcacccagcctgaagcggagaagcccaagtggagagcggcggtccctgttgtcgggagaaggccaggagagccaggatgaagaggagagctcagaagaggagcgggccagccctgcgggcagtgaccatcgccacagggggtccctggagcgggaggccaagagttcctttgacctgccagacacactgcaggtgccagggctgcatcgcactgccagtggccgagggtctgcttctgagcaccaggactgcaatggcaagtcggcttcagggcgcctggcccgggccctgcggcctgatgaccccccactggatggggatgacgccgatgacgagggcaacctgagcaaaggggaacgggtccgcgcgtggatccgagcccgactccctgcctgctgcctcgagcgagactcctggtcagcctacatcttccctcctcagtccaggttccgcctcctgtgtcaccggatcatcacccacaagatgttcgaccacgtggtccttgtcatcatcttccttaactgcatcaccatcgccatggagcgccccaaaattgacccccacagcgctgaacgcatcttcctgaccctctccaattacatcttcaccgcagtctttctggctgaaatgacagtgaaggtggtggcactgggctggtgcttcggggagcaggcgtacctgcggagcagttggaacgtgctggacgggctgttggtgctcatctccgtcatcgacattctggtgtccatggtctctgacagcggcaccaagatcctgggcatgctgagggtgctgcggctgctgcggaccctgcgcccgctcagggtgatcagccgggcgcaggggctgaagctggtggtggagacgctgatgtcctcactgaaacccatcggcaacattgtagtcatctgctgtgccttcttcatcattttcggcatcttgggggtgcagctcttcaaagggaagtttttcgtgtgccagggcgaggataccaggaacatcaccaataaatcggactgtgccgaggccagttaccggtgggtccggcacaagtacaactttgacaaccttggccaggccctgatgtccctgttcgttttggcctccaaggatggttgggtggacatcatgtacgatgggctggatgctgtgggcgtggaccagcagcccatcatgaaccacaacccctggatgctgctgtacttcatctcgttcctgctcattgtggccttctttgtcctgaacatgtttgtgggtgtggtggtggagaacttccacaagtgtcggcagcaccaggaggaagaggaggcccggcggcgggaggagaagcgcctacgaagactggagaaaaagagaaggagtaaggagaagcagatggctgaagcccagtgcaaaccttactactccgactactcccgcttccggctcctcgtccaccacttgtgcaccagccactacctggacctcttcatcacaggtgtcatcgggctgaacgtggtcaccatggccatggagcactaccagcagccccagattctggatgaggctctgaagatctgcaactacatcttcactgtcatctttgtcttggagtcagttttcaaacttgtggcctttggtttccgtcggttcttccaggacaggtggaaccagctggacctggccattgtgctgctgtccatcatgggcatcacgctggaggaaatcgaggtcaacgcctcgctgcccatcaaccccaccatcatccgcatcatgagggtgctgcgcattgcccgagtgctgaagctgctgaagatggctgtgggcatgcgggcgctgctggacacggtgatgcaggccctgccccaggtggggaacctgggacttctcttcatgttgttgtttttcatctttgcagctctgggcgtggagctctttggagacctggagtgtgacgagacacacccctgtgagggcctgggccgtcatgccacctttcggaactttggcatggccttcctaaccctcttccgagtctccacaggtgacaattggaatggcattatgaaggacaccctccgggactgtgaccaggagtccacctgctacaacacggtcatctcgcctatctactttgtgtccttcgtgctgacggcccagttcgtgctagtcaacgtggtgatcgccgtgctgatgaagcacctggaggagagcaacaaggaggccaaggaggaggccgagctagaggctgagctggagctggagatgaagaccctcagcccccagccccactcgccactgggcagccccttcctctggcctggggtcgagggccccgacagccccgacagccccaagcctggggctctgcacccagcggcccacgcgagatcagcctcccacttttccctggagcaccccacgatgcagccccaccccacggagctgccaggaccagacttactgactgtgcggaagtctggggtcagccgaacgcactctctgcccaatgacagctacatgtgtcggcatgggagcactgccgaggggcccctgggacacaggggctgggggctccccaaagctcagtcaggctccgtcttgtccgttcactcccagccagcagataccagctacatcctgcagcttcccaaagatgcacctcatctgctccagccccacagcgccccaacctggggcaccatccccaaactgcccccaccaggacgctcccctttggctcagaggccactcaggcgccaggcagcaataaggactgactccttggacgttcagggtctgggcagccgggaagacctgctggcagaggaggagcccccatccccacgggacctgaagaagtgctacagcgtggaggcccagagctgccagcgccggcctacgtcctggctggatgagcagaggagacactctatcgccgtcagctgcctggacagcggctcccaaccccacctgggcacagacccctctaaccttgggggccagcctcttggggggcctgggagccggcccaagaaaaaactcagcccgcctagtatcaccatagacccccccgagagccaaggtcctcggaccccgcccagccctggtatctgcctccggaggagggctccgtccagcgactccaaggatcccttggcctctggcccccctgacagcatggctgcctcgccctccccaaagaaagatgtgctgagtctctccggtttatcctctgacccagcagacctggacccctgagtcctgccccacttt

SEQ ID NO: 90336 - protein, 159 aa, Artificial Sequence
  derived and/or modified sequence
MLRVPEPRPGEAETLAETEPERHLGSYLLDSENTSGALPRLPQTPKQPQKRSRAAFSHTQVIELERKFSHQKYLSAPERAHLAKNLKLTETQVKIWFQNRRYKTKRKQLSSELGDLEKHSSLPALKEEAFSRASLVSVYNSYPYYPYLYCVGSWSPAFW

SEQ ID NO: 90337 - DNA, 573 bp, Artificial Sequence
  derived and/or modified sequence
atgctgagagtgcccgagcccagacccggcgaggccaaggccgagggcgccgccccccccacccccagcaagcccctgaccagcttcctgatccaggacatcctgagagacggcgcccccgaggaggccgagaccctggccgagaccgagcccgagagacacctgggcagctacctgctggacagcgagaacaccagcggcgccctgcccagactgccccagacccccaagcagccccagaagagaagcagagccgccttcagccacacccaggtgatcgagctggagagaaagttcagccaccagaagtacctgagcgcccccgagagagcccacctggccaagaacctgaagctgaccgagacccaggtgaagatctggttccagaacagaagatacaagaccaagagaaagcagctgagcagcgagctgggcgacctggagaagcacagcagcctgcccgccctgaaggaggaggccttcagcagagccagcctggtgagcgtgtacaacagctacccctactacccctacctgtactgcgtgggcagctggagccccgccttctggtag

SEQ ID NO: 90338 - DNA, 480 bp, Artificial Sequence
  derived and/or modified sequence
atgctgagagtgcccgagcccagacccggcgaggccgagaccctggccgagaccgagcccgagagacacctgggcagctacctgctggacagcgagaacaccagcggcgccctgcccagactgccccagacccccaagcagccccagaagagaagcagagccgccttcagccacacccaggtgatcgagctggagagaaagttcagccaccagaagtacctgagcgcccccgagagagcccacctggccaagaacctgaagctgaccgagacccaggtgaagatctggttccagaacagaagatacaagaccaagagaaagcagctgagcagcgagctgggcgacctggagaagcacagcagcctgcccgccctgaaggaggaggccttcagcagagccagcctggtgagcgtgtacaacagctacccctactacccctacctgtactgcgtgggcagctggagccccgccttctggtag

SEQ ID NO: 90339 - DNA, 573 bp, Artificial Sequence
  derived and/or modified sequence
atgttacgcgtccccgaaccgcgtcctggtgaggccaaggccgagggtgcagccccacccaccccctcgaagccactgacctcttttctgatccaggacatcctgagagacggagcccccgaggaagctgaaactctggcggaaactgagcctgagcgacatctgggaagctacctgctcgactccgaaaatacatccggtgctttgccgcggctgccacaaacaccgaaacaaccccaaaaacggagcagggccgccttttcccatacacaggtgatagaactggaaaggaagttttcccaccagaagtatctgtctgcgcctgaaagggcgcatctggccaaaaacctgaaactgactgagactcaggtcaagatctggttccaaaataggaggtacaaaaccaagaggaaacagttgagtagtgaactgggagacctggagaagcatagctcgcttcccgccctcaaggaagaagcatttagccgagccagtctggtgtccgtgtataactcttacccgtactacccctacttatactgtgtaggcagctggtccccggccttttggtag

SEQ ID NO: 90340 - DNA, 480 bp, Artificial Sequence
  derived and/or modified sequence
atgctccgggttccagaaccccgacccggcgaagccgagactcttgccgaaactgaaccagagagacatttagggagctatcttctggattctgagaacactagcggggcccttccccgtcttccacagaccccaaagcagccccagaagaggtctagggccgccttcagccacacacaggtgatagagctggaaaggaagttctctcaccagaaatacttatcggcaccagagcgggcccatttggccaagaatctgaaattgaccgaaacacaggttaaaatctggtttcagaaccggcgatacaagacgaagcgcaagcagttatctagcgagctcggcgatctggagaaacactcatccttgcccgccctgaaagaagaggcctttagccgtgcatccctcgtgtcagtgtacaactcatacccctactatccttacctgtactgtgtgggttcgtggtcaccagcattctggtag

SEQ ID NO: 90341 - DNA, 573 bp, Artificial Sequence
  derived and/or modified sequence
atgctgcgggtgcctgagcccaggcctggagaggccaaggccgagggcgccgccccacccacccccagcaagcccctgaccagcttcctgatccaggacatcctgagagatggagcccctgaggaggccgagaccctggccgagacagagcctgagcggcacctgggcagctacctgctggacagcgagaacaccagcggggccctgccccggctgccccagacccccaagcagccccagaagaggagcagagctgccttcagccacacccaggtgattgagctggagaggaagttcagccaccagaagtacctgagcgcccctgagcgggcccacctggccaagaacctgaagctgacagagacccaggtgaagatctggttccagaacagacgctacaagaccaagaggaagcagctgagcagcgagctgggggacctggagaagcacagcagcctgcctgccctgaaggaggaggccttcagccgggccagcctggtgtctgtgtacaacagctacccctactacccctacctgtactgtgtgggctcctggagccctgccttctggtag

SEQ ID NO: 90342 - DNA, 480 bp, Artificial Sequence
  derived and/or modified sequence
atgctgcgggtgcctgagcccaggcctggagaggccgagaccctggccgagacagagcctgagcggcacctgggcagctacctgctggacagcgagaacaccagcggggccctgccccggctgccccagacccccaagcagccccagaagaggagccgggccgccttcagccacacccaggtgattgagctggagaggaagttcagccaccagaagtacctgagcgcccctgagcgggcccacctggccaagaacctgaagctgacagagacccaggtgaagatctggttccagaacagacgctacaagaccaagaggaagcagctgagcagcgagctgggggacctggagaagcacagcagcctgcctgccctgaaggaggaggccttcagccgggccagcctggtgtctgtgtacaacagctacccctactacccctacctgtactgtgtgggctcctggagccctgccttctggtag

SEQ ID NO: 90343 - DNA, 573 bp, Artificial Sequence
  derived and/or modified sequence
atgctgcgggtgcccgagccccggcccggcgaggccaaggccgagggtgcggcacctcccacccccagcaaaccattgacttccttccttatacaggacatcctgcgcgacggtgctccagaagaggcggaaacactcgcggagacggagcccgagagacaccttggctcttatcttctggattcagagaatacttctggagccctcccacgattgcctcagactcccaaacaaccacaaaagaggtcaagagctgctttctcccatacacaggtgatagagttggaacggaagtttagtcaccaaaaatatctgagtgcccccgaaagggcccacctggcaaaaaaccttaagctgaccgaaactcaggtcaaaatctggtttcagaacaggagatacaagaccaaacgcaagcagttgtctagtgagctgggcgatttagaaaaacacagctccttgccggctttgaaagaagaagccttcagcagggcaagtttggtgagcgtctacaacagctacccttattacccctacttgtactgtgtgggatcatggtctcctgctttttggtag

SEQ ID NO: 90344 - DNA, 480 bp, Artificial Sequence
  derived and/or modified sequence
atgctgcgggtgcccgagccccggcccggcgaggccgagaccctggccgaaaccgagccagagcggcacctcggctcgtatctgctggatagcgagaatacatcaggtgcacttcccaggcttccccagacacctaagcagccccagaagaggagtagggctgctttctcccatacgcaggtgatcgaattggagaggaaattttctcaccaaaaatacctgagcgctcctgaacgagcccacttagctaaaaacctgaaacttactgagactcaagtgaaaatttggtttcagaataggcgatacaaaactaagcgtaagcagctgagctctgaactgggcgacctggagaaacattctagtctaccagccttaaaagaagaggcattctcaagggctagcctcgtatcagtgtataattcgtacccctactacccctacctctattgcgtagggtcttggtcccccgccttctggtag

SEQ ID NO: 90345 - DNA, 3101 bp, Artificial Sequence
  derived and/or modified sequence
atgctcagggttccggagccgcggcccggggaggcgaaagcggagggggccgcgccgccgaccccgtccaagccgctcacgtccttcctcatccaggacatcctgcgggacggcgcgccggaggaggccgagacgctggcagagaccgagccagaaaggcacttggggtcttatctgttggactctgaaaacacttcaggcgcccttccaaggcttccccaaacccctaagcagccgcagaagcgctcccgagctgccttctcccacactcaggtgatcgagttggagaggaagttcagccatcagaagtacctgtcggcccctgaacgggcccacctggccaagaacctcaagctcacggagacccaagtgaagatatggttccagaacagacgctataagactaagcgaaagcagctctcctcggagctgggagacttggagaagcactcctctttgccggccctgaaagaggaggccttctcccgggcctccctggtctccgtgtataacagctatccttactacccatacctgtactgcgtgggcagctggagcccagctttttggtaatgccagctcaggtgacaaccattatgatcaaaaactgccttccccagggtgtctctatgaaaagcacaaggggccaaggtcagggagcaagaggtgtgcacaccaaagctattggagatttgcgtggaaatctcagattcttcactggtgagacaatgaaacaacagagacagtgaaagttttaatacctaagtcattcctccagtgcatactgtaggtcattttttttgcttctggctacctgtttgaaggggagagagggaaaatcaagtggtattttccagcactttgtatgattttggatgagttgtacacccaaggattctgttctgcaactccatcctcctgtgtcactgaatatcaactctgaaagagcaaacctaacaggagaaaggacaaccaggatgaggatgtcaccaactgaattaaacttaagtccagaagcctcctgttggccttggaatatggccaaggctctctctgtccctgtaaaagagaggggcaaatagagagtctccaagagaacgccctcatgctcagcacatatttgcatgggagggggagatgggtgggaggagatgaaaatatcagcttttcttattcctttttattccttttaaaatggtatgccaacttaagtatttacagggtggcccaaatagaacaagatgcactcgctgtgattttaagacaagctgtataaacagaactccactgcaagagggggggccgggccaggagaatctccgcttgtccaagacaggggcctaaggagggtctccacactgctgctaggggctgttgcatttttttattagtagaaagtggaaaggcctcttctcaacttttttcccttgggctggagaatttagaatcagaagtttcctggagttttcaggctatcatatatactgtatcctgaaaggcaacataattcttccttccctccttttaaaattttgtgttcctttttgcagcaattactcactaaagggcttcattttagtccagatttttagtctggctgcacctaacttatgcctcgcttatttagcccgagatctggtctttttttttttttttttttttttttttccgtctccccaaagctttatctgtcttgactttttaaaaaagtttgggggcagattctgaattggctaaaagacatgcatttttaaaactagcaactcttatttctttcctttaaaaatacatagcattaaatcccaaatcctatttaaagacctgacagcttgagaaggtcactactgcatttataggaccttctggtggttctgctgttacgtttgaagtctgacaatccttgagaatctttgcatgcagaggaggtaagaggtattggattttcacagaggaagaacacagcgcagaatgaagggccaggcttactgagctgtccagtggagggctcatgggtgggacatggaaaagaaggcagcctaggccctggggagcccagtccactgagcaagcaagggactgagtgagccttttgcaggaaaaggctaagaaaaaggaaaaccattctaaaacacaacaagaaactgtccaaatgctttgggaactgtgtttattgcctataatgggtccccaaaatgggtaacctagacttcagagagaatgagcagagagcaaaggagaaatctggctgtccttccattttcattctgttatctcaggtgagctggtagaggggagacattagaaaaaaatgaaacaacaaaacaattactaatgaggtacgctgaggcctgggagtctcttgactccactacttaattccgtttagtgagaaacctttcaattttcttttattagaagggccagcttactgttggtggcaaaattgccaacataagttaatagaaagttggccaatttcaccccattttctgtggtttgggctccacattgcaatgttcaatgccacgtgctgctgacaccgaccggagtactagccagcacaaaaggcagggtagcctgaattgctttctgctctttacatttcttttaaaataagcatttagtgctcagtccctactgagtactctttctctcccctcctctgaatttaattctttcaacttgcaatttgcaaggattacacatttcactgtgatgtatattgtgttgcaaaaaaaaaaaaaaagtgtctttgtttaaaattacttggtttgtgaatccatcttgctttttccccattggaactagtcattaacccatctctgaactggtagaaaaacatctgaagagctagtctatcagcatctgacaggtgaattggatggttctcagaaccatttcacccagacagcctgtttctatcctgtttaataaattagtttgggttctctacatgcataacaaaccctgctccaatctgtcacataaaagtctgtgacttgaagtttagtcagcacccccaccaaactttatttttctatgtgttttttgcaacatatgagtgttttgaaaataaagtacccatgtctttattagattta

SEQ ID NO: 90346 - DNA, 713 bp, Artificial Sequence
  derived and/or modified sequence
atgctcagggttccggagccgcggcccggggaggccgagacgctggcagagaccgagccagaaaggcacttggggtcttatctgttggactctgaaaacacttcaggcgcccttccaaggcttccccaaacccctaagcagccgcagaagcgctcccgagctgccttctcccacactcaggtgatcgagttggagaggaagttcagccatcagaagtacctgtcggcccctgaacgggcccacctggccaagaacctcaagctcacggagacccaagtgaagatatggttccagaacagacgctataagactaagcgaaagcagctctcctcggagctgggagacttggagaagcactcctctttgccggccctgaaagaggaggccttctcccgggcctccctggtctccgtgtataacagctatccttactacccatacctgtactgcgtgggcagctggagcccagctttttggtaatgccagctcaggtgacaaccattatgatcaaaaactgccttccccagggtgtctctatgaaaagcacaaggggccaaggtcagggagcaagaggtgtgcacaccaaagctattggagatttgcgtggaaatctcagattcttcactggtgagacaatgaaacaacagagacagtgaaagttttaatacctaagtcattcctccagtgcatactgtaggtcattttttttgctt

SEQ ID NO: 90347 - DNA, 573 bp, Artificial Sequence
  derived and/or modified sequence
atgttgagagtccctgagcctagaccgggtgaagcaaaagccgagggcgcagcgcctcctaccccatctaaacctctgacgagctttctaatacaggatattctgagagatggagctcccgaggaggctgagacgctcgcggagacagagccggagagacacctgggctcatatttactagattcagaaaatacttctggagctctgcctagactccctcaaacacccaagcaaccccagaagcgcagcagagccgctttctctcacacccaggtgattgagctggagaggaaattctcccaccaaaagtatctttctgcgcctgaaagggctcacctggcaaagaacctgaagttgaccgaaactcaggtaaaaatttggttccaaaaccggaggtacaaaactaagcgcaagcagctgagcagcgagctcggagacctcgaaaagcactccagcctccccgcacttaaagaggaggcttttagtagggcctccttagtgtctgtgtataacagttacccctattacccctatctgtattgcgtggggtcatggtcccctgctttctggtag

SEQ ID NO: 90348 - DNA, 480 bp, Artificial Sequence
  derived and/or modified sequence
atgctcagagtgccagaacccaggcccggagaagccgagacccttgctgagactgaacctgaacgccacctcggctcatacctgctcgattctgagaatacaagcggtgccctgcccaggctgcctcagacacccaaacagccccaaaagcggtccagggccgctttctcccatactcaggttatagagttggaacgcaagtttagccatcaaaagtacctgtccgctcccgaacgcgctcatctcgctaagaatctcaagctcacagaaacccaggtcaagatctggtttcaaaacaggcggtataaaactaaacgcaagcaactctcctcggaactgggcgacttggagaaacactcgtcccttcctgcgctcaaggaggaggctttctctcgtgccagcctcgtatctgtgtacaactcttatccatactatccttacttatactgcgttgggagctggtcccccgctttctggtag

SEQ ID NO: 90349 - protein, 1088 aa, Artificial Sequence
  derived and/or modified sequence
MPCGFSPSPVAHHLVPGPPDTPAQQLRCGWTVGGWLLSLVRGLLPCLPPGARTAEGPIMVLAGPLAVSLLLPSLTLLVSHLSSSQDVSSEPSSEQQLCALSKHPTVAFEDLQPWVSNFTYPGARDFSQLALDPSGNQLIVGARNYLFRLSLANVSLLQATEWASSEDTRRSCQSKGKTEEECQNYVRVLIVAGRKVFMCGTNAFSPMCTSRQVGNLSRTIEKINGVARCPYDPRHNSTAVISSQGELYAATVIDFSGRDPAIYRSLGSGPPLRTAQYNSKWLNEPNFVAAYDIGLFAYFFLRENAVEHDCGRTVYSRVARVCKNDVGGRFLLEDTWTTFMKARLNCSRPGEVPFYYNELQSAFHLPEQDLIYGVFTTNVNSIAASAVCAFNLSAISQAFNGPFRYQENPRAAWLPIANPIPNFQCGTLPETGPNENLTERSLQDAQRLFLMSEAVQPVTPEPCVTQDSVRFSHLVVDLVQAKDTLYHVLYIGTESGTILKALSTASRSLHGCYLEELHVLPPGRREPLRSLRILHSARALFVGLRDGVLRVPLERCAAYRSQGACLGARDPYCGWDGKQQRCSTLEDSSNMSLWTQNITACPVRNVTRDGGFGPWSPWQPCEHLDGDNSGSCLCRARSCDSPRPRCGGLDCLGPAIHIANCSRNGAWTPWSSWALCSTSCGIGFQVRQRSCSNPAPRHGGRICVGKSREERFCNENTPCPVPIFWASWGSWSKCSSNCGGGMQSRRRACENGNSCLGCGVEFKTCNPEGCPEVRRNTPWTPWLPVNVTQGGARQEQRFRFTCRAPLADPHGLQFGRRRTETRTCPADGSGSCDTDALVEVLLRSGSTSPHTVSGGWAAWGPWSSCSRDCELGFRVRKRTCTNPEPRNGGLPCVGDAAEYQDCNPQACPVRGAWSCWTSWSPCSASCGGGHYQRTRSCTSPAPSPGEDICLGLHTEEALCATQACPEGWSPWSEWSKCTDDGAQSRSRHCEELLPGSSACAGNSSQSRPCPYSEIPVILPASSMEEATDCAGFNLIHLVATGISCFLGSGLLTLAVYLSCQHCQRQSQESTLVHPATPNHLHYKGGGTP

SEQ ID NO: 90350 - protein, 142 aa, Artificial Sequence
  derived and/or modified sequence
MPCGFSPSPVAHHLVPGPPDTPAQQLRCGWTVGGWLLSLVRGLLPCLPPGARTAEGPIMVLAGPLAVSLLLPSLTLLVSHLSSSQDVSSEPSSEQQLCALSKHPTVAFEDLQPWVSNFTYPGARDFSQLALDPSGNQLIVGA

SEQ ID NO: 90351 - protein, 84 aa, Artificial Sequence
  derived and/or modified sequence
MPCGFSPSPVAHHLVPGPPDTPAQQLRCGWTVGGWLLSLVRGLLPCLPPGARTAEGPIMVLAGPLAVSLLLPSLTLLVSHLSSS

SEQ ID NO: 90352 - protein, 1205 aa, Artificial Sequence
  derived and/or modified sequence
MLHLSAEEAIGCVRVRRSFIDELAFGRGHSTGTGKQKRRDRVSGSSWCLACVSWMPCGFSPSPVAHHLVPGPPDTPAQQLRCGWTVGGWLLSLVRGLLPCLPPGARTAEGPIMVLAGPLAVSLLLPSLTLLVSHLSSSQDVSSEPSSEQQLCALSKHPTVAFEDLQPWVSNFTYPGARDFSQLALDPSGNQLIVGARNYLFRLSLANVSLLQATEWASSEDTRRSCQSKGKTEEECQNYVRVLIVAGRKVFMCGTNAFSPMCTSRQVGNLSRTIEKINGVARCPYDPRHNSTAVISSQGELYAATVIDFSGRDPAIYRSLGSGPPLRTAQYNSKWLNEPNFVAAYDIGLFAYFFLRENAVEHDCGRTVYSRVARVCKNDVGGRFLLEDTWTTFMKARLNCSRPGEVPFYYNELQSAFHLPEQDLIYGVFTTNVNSIAASAVCAFNLSAISQAFNGPFRYQENPRAAWLPIANPIPNFQCGTLPETGPNENLTERSLQDAQRLFLMSEAVQPVTPEPCVTQDSVRFSHLVVDLVQAKDTLYHVLYIGTESGTILKALSTASRSLHGCYLEELHVLPPGRREPLRSLRILHSARALFVGLRDGVLRVPLERCAAYRSQGACLGARDPYCGWDGKQQRCSTLEDSSNMSLWTQNITACPVRNVTRDGGFGPWSPWQPCEHLDGDNSGSCLCRARSCDSPRPRCGGLDCLGPAIHIANCSRNGAWTPWSSWALCSTSCGIGFQVRQRSCSNPAPRHGGRICVGKSREERFCNENTPCPVPIFWASWGSWSKCSSNCGGGMQSRRRACENGNSCLGCGVEFKTCNPEGCPEVRRNTPWTPWLPVNVTQGGARQEQRFRFTCRAPLADPHGLQFGRRRTETRTCPADGSGSCDTDALVEVLLRSGSTSPHTVSGGWAAWGPWSSCSRDCELGFRVRKRTCTNPEPRNGGLPCVGDAAEYQDCNPQACPVRGAWSCWTSWSPCSASCGGGHYQRTRSCTSPAPSPGEDICLGLHTEEALCATQACPEGWSPWSEWSKCTDDGAQSRSRHCEELLPGSSACAGNSSQSRPCPYSEIPVILPASSMEEATDCAGFNLIHLVATGISCFLGSGLLTLAVYLSCQHCQRQSQESTLVHPATPNHLHYKGGGTPKNEKYTPMEFKTLNKNNLIPDDRANFYPLQQTNVYTTTYYPSPLNKHSFRPEASPGQRCFPNS

SEQ ID NO: 90353 - DNA, 3618 bp, Artificial Sequence
  derived and/or modified sequence
atgctgcacctgagcgccgaggaggccatcggctgcgtgagagtgagaagaagcttcatcgacgagctggccttcggcagaggccacagcaccggcaccggcaagcagaagagaagagacagagtgagcggcagcagctggtgcctggcctgcgtgagctggatgccctgcggcttcagccccagccccgtggcccaccacctggtgcccggcccccccgacacccccgcccagcagctgagatgcggctggaccgtgggcggctggctgctgagcctggtgagaggcctgctgccctgcctgccccccggcgccagaaccgccgagggccccatcatggtgctggccggccccctggccgtgagcctgctgctgcccagcctgaccctgctggtgagccacctgagcagcagccaggacgtgagcagcgagcccagcagcgagcagcagctgtgcgccctgagcaagcaccccaccgtggccttcgaggacctgcagccctgggtgagcaacttcacctaccccggcgccagagacttcagccagctggccctggaccccagcggcaaccagctgatcgtgggcgccagaaactacctgttcagactgagcctggccaacgtgagcctgctgcaggccaccgagtgggccagcagcgaggacaccagaagaagctgccagagcaagggcaagaccgaggaggagtgccagaactacgtgagagtgctgatcgtggccggcagaaaggtgttcatgtgcggcaccaacgccttcagccccatgtgcaccagcagacaggtgggcaacctgagcagaaccatcgagaagatcaacggcgtggccagatgcccctacgaccccagacacaacagcaccgccgtgatcagcagccagggcgagctgtacgccgccaccgtgatcgacttcagcggcagagaccccgccatctacagaagcctgggcagcggcccccccctgagaaccgcccagtacaacagcaagtggctgaacgagcccaacttcgtggccgcctacgacatcggcctgttcgcctacttcttcctgagagagaacgccgtggagcacgactgcggcagaaccgtgtacagcagagtggccagagtgtgcaagaacgacgtgggcggcagattcctgctggaggacacctggaccaccttcatgaaggccagactgaactgcagcagacccggcgaggtgcccttctactacaacgagctgcagagcgccttccacctgcccgagcaggacctgatctacggcgtgttcaccaccaacgtgaacagcatcgccgccagcgccgtgtgcgccttcaacctgagcgccatcagccaggccttcaacggccccttcagataccaggagaaccccagagccgcctggctgcccatcgccaaccccatccccaacttccagtgcggcaccctgcccgagaccggccccaacgagaacctgaccgagagaagcctgcaggacgcccagagactgttcctgatgagcgaggccgtgcagcccgtgacccccgagccctgcgtgacccaggacagcgtgagattcagccacctggtggtggacctggtgcaggccaaggacaccctgtaccacgtgctgtacatcggcaccgagagcggcaccatcctgaaggccctgagcaccgccagcagaagcctgcacggctgctacctggaggagctgcacgtgctgccccccggcagaagagagcccctgagaagcctgagaatcctgcacagcgccagagccctgttcgtgggcctgagagacggcgtgctgagagtgcccctggagagatgcgccgcctacagaagccagggcgcctgcctgggcgccagagacccctactgcggctgggacggcaagcagcagagatgcagcaccctggaggacagcagcaacatgagcctgtggacccagaacatcaccgcctgccccgtgagaaacgtgaccagagacggcggcttcggcccctggagcccctggcagccctgcgagcacctggacggcgacaacagcggcagctgcctgtgcagagccagaagctgcgacagccccagacccagatgcggcggcctggactgcctgggccccgccatccacatcgccaactgcagcagaaacggcgcctggaccccctggagcagctgggccctgtgcagcaccagctgcggcatcggcttccaggtgagacagagaagctgcagcaaccccgcccccagacacggcggcagaatctgcgtgggcaagagcagagaggagagattctgcaacgagaacaccccctgccccgtgcccatcttctgggccagctggggcagctggagcaagtgcagcagcaactgcggcggcggcatgcagagcagaagaagagcctgcgagaacggcaacagctgcctgggctgcggcgtggagttcaagacctgcaaccccgagggctgccccgaggtgagaagaaacaccccctggaccccctggctgcccgtgaacgtgacccagggcggcgccagacaggagcagagattcagattcacctgcagagcccccctggccgacccccacggcctgcagttcggcagaagaagaaccgagaccagaacctgccccgccgacggcagcggcagctgcgacaccgacgccctggtggaggtgctgctgagaagcggcagcaccagcccccacaccgtgagcggcggctgggccgcctggggcccctggagcagctgcagcagagactgcgagctgggcttcagagtgagaaagagaacctgcaccaaccccgagcccagaaacggcggcctgccctgcgtgggcgacgccgccgagtaccaggactgcaacccccaggcctgccccgtgagaggcgcctggagctgctggaccagctggagcccctgcagcgccagctgcggcggcggccactaccagagaaccagaagctgcaccagccccgcccccagccccggcgaggacatctgcctgggcctgcacaccgaggaggccctgtgcgccacccaggcctgccccgagggctggagcccctggagcgagtggagcaagtgcaccgacgacggcgcccagagcagaagcagacactgcgaggagctgctgcccggcagcagcgcctgcgccggcaacagcagccagagcagaccctgcccctacagcgagatccccgtgatcctgcccgccagcagcatggaggaggccaccgactgcgccggcttcaacctgatccacctggtggccaccggcatcagctgcttcctgggcagcggcctgctgaccctggccgtgtacctgagctgccagcactgccagagacagagccaggagagcaccctggtgcaccccgccacccccaaccacctgcactacaagggcggcggcacccccaagaacgagaagtacacccccatggagttcaagaccctgaacaagaacaacctgatccccgacgacagagccaacttctaccccctgcagcagaccaacgtgtacaccaccacctactaccccagccccctgaacaagcacagcttcagacccgaggccagccccggccagagatgcttccccaacagctag

SEQ ID NO: 90354 - DNA, 3618 bp, Artificial Sequence
  derived and/or modified sequence
atgctgcacctaagcgccgaagaagctattgggtgcgtcagagtgcgacgctcattcatcgacgaactggccttcggccgcggccattcaaccggcaccgggaagcagaagagaagggaccgggtcagcggatcttcttggtgtcttgcctgcgtgagctggatgccctgtggcttcagcccatcgcccgttgcacatcaccttgtgccagggccccccgacactccagcgcagcagctgcggtgcggatggactgtaggaggatggctgttgagcctggtccgggggcttctgccctgcctacctcccggagccagaaccgctgagggacctataatggtgctggccgggcctctggccgtcagtcttctgcttccctcccttacgctcctggtgtcccacctttcctcctcacaggatgtttcttcggagccttcatctgagcagcaactctgcgcactcagtaaacaccccaccgtggccttcgaagacttacagccgtgggtcagtaatttcacataccccggcgcacgggacttttcccagctcgcgctagatccaagtgggaatcagctcattgtgggcgctcgaaattacctctttcgcctcagcctggccaacgtgagcctgctgcaggcaacggagtgggctagctccgaagacacaagaaggagctgtcagtccaaaggtaagactgaagaggagtgtcaaaactatgtgagggtgctgatcgtggccggccgtaaggtgttcatgtgtggcacgaacgcattctctccaatgtgcacaagccggcaggtagggaatctttcacggactatcgaaaagatcaacggtgtggctcggtgcccctatgatcctaggcataatagtaccgccgtcatttccagccagggagaattgtacgcagcaactgtgattgacttttcaggtcgcgaccctgccatctaccgctcattggggagtggtcccccactcaggactgctcagtacaattcgaagtggctgaacgaacctaatttcgtcgcagcctacgacattggactctttgcttatttcttcctccgcgagaacgccgtcgaacatgattgcgggcggacagtctactcacgcgtggctagggtgtgtaagaatgacgtggggggtaggttcctgttagaagacacctggaccacttttatgaaggccaggctcaattgtagcaggcccggtgaagtgcctttctattacaacgagttgcagtctgcattccacctgccagagcaggatcttatctacggggtttttaccactaacgtcaattctatcgcagcttccgcagtgtgtgccttcaacctctccgcaatctctcaggcttttaatggtccgttccgctaccaagaaaatccacgcgctgcatggctgccaatagctaacccgatccccaacttccagtgcggaaccctgccagaaactggcccaaacgaaaacctgaccgagaggagccttcaagacgcacagagacttttcctgatgagtgaggcagttcagcccgtcacccccgagccttgcgtaacacaagacagcgttcgctttagtcatctggtcgtcgaccttgtacaggccaaagacactttatatcacgtcctctatattggtacagagagcgggactatactgaaagctctcagcactgcgtccaggtctctgcacggctgctatttagaagaactacatgtcttgcctccaggcaggcgcgagcctctacggtctctgagaatcttgcatagcgctcgcgccctgttcgtcggcctgagagacggagtgctgagagttccactggagaggtgtgccgcctaccgcagtcagggagcttgtctgggagcacgcgacccctattgtgggtgggacgggaaacaacagcgctgttcaacattggaggactcttcaaatatgtccctgtggacacagaacattaccgcgtgccctgtgaggaatgtaacaagggatggaggcttcggaccttggtctccctggcagccatgtgagcacctggatggtgacaatagcggatcttgtctgtgcagggcgcgctcttgcgacagcccgaggccacggtgcgggggccttgactgcctggggcccgctatacacatagctaattgctccaggaatggtgcgtggaccccttggtcctcatgggccttgtgctccacatcttgtggaatcggattccaggtgcgacaacgaagctgctctaaccccgctcctagacacggtggccggatttgtgttggtaaatctagggaggagagattctgtaacgagaacaccccctgcccggtgcccattttctgggcttcttggggctcttggtccaagtgctcatcaaattgtggcggcggcatgcagtctagaagaagggcctgcgagaacggaaacagctgccttggttgtggcgtggagttcaaaacctgcaaccctgaggggtgtcctgaggtgcgccgcaatacgccatggacaccgtggcttccagtcaatgtcactcagggcggagcaaggcaggaacagcgattccggtttacgtgtcgtgcacctctagccgatccccatggcctccagttcgggagacgacgaaccgagacaaggacttgccctgctgacggatccggttcatgtgatacagatgccttagtggaggtcttgctgagaagcggcagcacatccccccacaccgtgtccggtggctgggcggcttggggcccatggtcttcttgctctagagattgcgagctgggctttcgggttaggaaacgaacatgtacaaatcccgagcctcggaacggtggcttgccttgcgtcggcgacgcagccgagtaccaggactgcaacccacaagcatgtcccgttcgaggcgcttggtcctgctggaccagctggagtccctgctccgctagttgcggaggaggtcattaccagagaactagaagctgtaccagccccgcgccaagtcccggggaggatatatgtctcggcctccatacggaggaagctctatgcgctacacaggcatgtccggaagggtggtcaccctggtcagagtggtccaagtgtacggatgatggcgctcagtccaggtcccgtcactgtgaggagttgctccccggttcatcagcttgtgccggcaattcatcccagagccggccttgcccctattccgagattccagtaatactgcctgccagttccatggaagaagcaaccgactgcgccggctttaatctcattcatctagtggctacggggatttcctgcttcctcggttctggcctactcacgctggctgtgtacctgagctgccagcattgccagcggcagagccaggagtccactctcgttcacccagccacccccaatcatctgcattataagggaggagggacacccaaaaatgaaaaatataccccaatggagtttaagacactaaataagaataatctgatccctgatgaccgggccaatttctaccccctccagcagactaacgtctataccactacatactacccctcccctctgaataagcattcattccggccggaagcctctccggggcagagatgtttcccaaattcttag

SEQ ID NO: 90355 - DNA, 3618 bp, Artificial Sequence
  derived and/or modified sequence
atgctgcacctgtctgctgaggaggccatcggctgtgtgcgggtgcggcgctccttcattgatgagctggccttcggccggggccacagcactggaacaggcaagcagaagaggcgggacagagtgtctggcagctcctggtgcctggcctgtgtgtcctggatgccctgtggcttcagccccagccctgtggcccaccacctggtgcccggccccccagacaccccagcccagcagctgcgctgtggctggacagtgggcggctggctgctgagcctggtgcggggcctgctgccctgcctgcccccaggggccaggacagctgagggccccatcatggtgctggccggccccctggccgtgtccctgctgctgcccagcctgaccctgctggtgagccacctgagcagcagccaggatgtgtcctctgagcccagcagcgagcagcagctgtgtgccctgagcaagcaccccaccgtggcctttgaggacctgcagccctgggtgagcaacttcacctacccaggggcccgggacttcagccagctggccctggaccccagcggcaaccagctgattgtgggcgccaggaactacctgttccggctgagcctggccaacgtgtccctgctgcaggccacagagtgggccagcagcgaggacaccaggaggagctgccagagcaagggcaagacagaggaggagtgccagaactacgtgcgggtgctgattgtggccggcaggaaggtgttcatgtgtggcaccaatgccttcagccccatgtgcaccagccggcaggtgggcaacctgagcaggaccatcgagaagatcaacggggtggcccgctgcccctatgaccccaggcacaacagcacagctgtgatcagcagccagggcgagctgtatgctgccaccgtgattgacttcagcggccgggaccctgccatctaccgcagcctgggcagcggcccccccctgaggacagcccagtacaacagcaagtggctgaatgagcccaactttgtggccgcctatgacatcggcctgtttgcctacttcttcctgagagaaaatgctgtggagcatgactgtggccgcacagtgtacagccgggtggcccgggtgtgcaagaatgatgtgggcggccgcttcctgctggaggacacctggaccaccttcatgaaggcccggctgaactgcagcaggcctggagaggtgcccttctactacaatgagctgcagagcgccttccacctgcctgagcaggacctgatctacggcgtcttcaccaccaacgtgaacagcattgctgccagcgctgtgtgtgccttcaacctgagcgccatcagccaggccttcaacggccccttccgctaccaggagaaccccagggctgcctggctgcccatcgccaaccccatccccaacttccagtgtggcaccctgcctgagaccggccccaatgaaaacctgacagagaggagcctgcaggatgcccagaggctcttcctgatgtctgaggccgtgcagcctgtgaccccagagccctgtgtgacccaggacagcgtgcgcttcagccacctggtggtggacctggtgcaggccaaggacaccctgtaccacgtgctgtacatcggcacagaaagtggcaccatcctgaaggccctgagcacagccagccgcagcctgcacggctgctacctggaggagctgcacgtgctgcccccaggccggcgggagcccctgcggagcctgcgcatcctgcacagcgcccgggccctgtttgtgggcctgagagatggagtgctgcgggtgcccctggagcgctgtgccgcctaccgcagccagggcgcctgcctgggcgcccgggacccctactgcggctgggatggcaagcagcagcgctgcagcaccctggaggacagcagcaacatgagcctgtggacccagaacatcacagcctgccctgtgagaaatgtgaccagagatggcggcttcggcccctggagcccctggcagccctgtgagcacctggatggagacaacagcggcagctgcctgtgccgggcccggagctgtgacagcccccggccccgctgtggcggcctggactgcctgggccctgccatccacatcgccaactgcagcagaaatggagcctggaccccctggagctcctgggccctgtgcagcaccagctgtggcatcggcttccaggtgcggcagaggagctgcagcaacccagcccccaggcatggaggccgcatctgtgtgggcaagagccgggaggagcgcttctgcaatgaaaacaccccctgccctgtgcccatcttctgggcctcctggggctcctggagcaagtgcagcagcaactgtggcggcggcatgcagagcagaagaagagcctgtgaaaatggaaacagctgcctgggctgcggcgtggagttcaagacctgcaaccctgagggctgcccagaggtgagaagaaacaccccctggaccccctggctgcctgtgaatgtgacccagggcggggcccggcaggagcagcgcttccgcttcacctgccgggcccccctggccgacccccacggcctgcagtttggaagaagaagaacagagaccaggacctgcccagcagatggcagcggcagctgtgacacagatgccctggtggaggtgctgctgcggagcggcagcaccagcccccacacagtgtctgggggctgggccgcctggggcccctggagcagctgcagccgggactgtgagctgggcttccgggtgaggaagaggacctgcaccaaccctgagcccagaaatggaggcctgccctgtgtgggagatgctgctgagtaccaggactgcaacccccaggcctgccctgtgcggggggcctggagctgctggacctcctggagcccctgcagcgccagctgtggcggcggccactaccagaggaccaggagctgcaccagccctgcccccagccctggagaggacatctgcctgggcctgcacacagaggaggccctgtgtgccacccaggcctgcccagagggctggagcccctggagcgagtggagcaagtgcacagatgatggagcccagagccgcagccgccactgtgaggagctgctgcccggcagcagcgcctgtgccggcaacagcagccagagccggccctgcccctacagcgagatccctgtgatcctgcctgccagctccatggaggaggccacagactgtgccggcttcaacctgatccacctggtggccaccggcatcagctgcttcctgggcagcggcctgctgaccctggccgtgtacctgagctgccagcactgccagaggcagagccaggagagcaccctggtgcacccagccacccccaaccacctgcactacaagggcggcggcacccccaagaatgagaagtacacccccatggagttcaagaccctgaacaagaacaacctgatcccagatgaccgggccaacttctaccccctgcagcagaccaacgtgtacaccaccacctactaccccagccccctgaacaagcacagcttccggcctgaggccagccctggccagcgctgcttccccaacagctag

SEQ ID NO: 90356 - DNA, 3618 bp, Artificial Sequence
  derived and/or modified sequence
atgctgcacctgagcgccgaggaggccatcggctgcgtgcgggtgcgccggtcctttatagatgagctcgcatttgggcgcggtcactcaaccggcacaggcaagcaaaagagaagggaccgtgtgagcggtagttcatggtgtttggcatgtgtatcatggatgccctgcgggttttctccaagccctgtcgcgcaccaccttgttcctgggccgcctgatactcctgcacaacagttgaggtgcggctggaccgttgggggctggctcttgtcattagttaggggtctactcccctgcttgccacccggagctaggaccgcagaagggccaatcatggtgctagctggtccattagcagttagtctgctgcttccttcattaaccctgctggtgagccatctgagttctagtcaggacgtctcaagcgagccgtctagcgagcaacagctctgcgctctgtccaagcatccgaccgtggcatttgaagacctgcaaccgtgggtcagtaacttcacctaccccggcgcacgggatttctctcagctagctttggacccctctggcaaccaacttattgtgggtgcacgcaactacctgttccgcctgtctcttgcaaacgtttctctgctgcaggccaccgaatgggcgagttctgaggatacgcggcgtagttgtcaaagcaagggcaagacggaggaggagtgccaaaactatgttcgcgtgctcatcgttgcaggtcgaaaggtgtttatgtgcggcacaaacgccttcagccccatgtgtacgtctcgacaggtgggaaacctgtcaagaaccatagagaaaatcaatggcgttgcgcggtgcccatacgacccccgacacaacagcaccgcagtaattagcagccagggtgagctatacgccgcgacagttattgatttctcaggcagggatcctgcaatctataggtccttaggaagtggccctccattgcgtacagcccagtataactcgaagtggctcaacgagcccaattttgtagccgcgtacgacattgggctgttcgcttacttcttcttacgggaaaacgccgtggagcacgactgcggcagaactgtctattcgcgagtggcacgggtgtgtaaaaacgacgttggaggcagatttctcttagaagatacatggacaactttcatgaaagccaggctaaactgtagtcgtcccggcgaagtccctttctattataacgagttgcagtcggcgttccacctgcccgagcaggacttgatttacggggttttcacgactaatgtaaatagcattgccgccagtgccgtgtgcgctttcaatttaagtgccatatctcaggcatttaacggccctttccgatatcaggagaacccaagagctgcctggctgccaattgcaaaccctatccctaacttccagtgcggcacattgccggagaccgggcccaatgagaacctgaccgagcggagcttacaggacgctcaacgtctgttcttaatgtccgaggctgtccagcccgtcacgccagagccgtgtgtgacccaagactccgtccgttttagccacctggtagtggatctggtgcaagctaaggacaccctttaccacgtgctatacatcggcaccgaaagtggaacaatccttaaggcgttgagcaccgccagccggtcactgcacgggtgctatcttgaagaattgcatgttctcccgccgggccgaagagaacccctcaggtccctccgaatactgcactctgcaagagcactgtttgtgggcctgagggatggagtactgcgagtgccattagagaggtgtgctgcataccgttctcagggcgcctgtctcggagcccgcgacccttattgtggatgggatggcaagcaacagagatgtagcaccttagaggattcaagcaatatgtcactctggactcagaatattacggcgtgccccgttagaaatgttactagggacggaggtttcggcccatggagcccctggcaaccctgcgagcacttagatggggacaactctggtagctgtttgtgccgcgctcgcagctgtgattccccccgaccgcgctgcggggggttggattgtctcggcccagctatacatatagcaaactgctcccggaatggtgcttggaccccttggagtagttgggcgttgtgtagcacctcatgtggaattggattccaggtgcggcagaggtcctgtagcaatccagcccctcgccatggaggtagaatctgtgttggcaaaagtagggaagaaagattctgcaatgagaatacgccctgtccagtgcctattttttgggcctcttggggaagctggtccaagtgcagttcaaattgtgggggggggatgcagtctaggagacgtgcttgcgagaatggaaactcctgcctcggatgtggggttgagttcaaaacctgcaatcccgaaggatgtccagaagtgagaagaaacactccttggactccttggctgccagtcaacgttacacagggaggcgcacgtcaggagcagcgatttcggttcacttgtcgcgcaccactcgccgacccacacggcctgcagtttgggagaagaaggacggaaacccgaacgtgtcccgcggatggatccggcagttgcgatacagatgcactggtagaggttttactgagaagcggatccacaagtccacacactgtctcgggtggctgggccgcatggggaccgtggtcttcctgcagcagggactgcgagctcggatttagagtacgtaagcggacctgtaccaacccggaaccacgcaacggcggcctcccatgtgtgggcgacgccgcggaataccaggattgcaacccccaggcgtgccctgttcgcggagcatggtcttgctggacttcctggagtccatgttccgcatcttgcggtggtggtcactaccagcggacacggtcatgtacgtcccctgcgccttctccaggcgaggacatttgccttggactgcacaccgaagaggcactgtgtgctacgcaggcatgcccagaaggttggtccccttggagcgagtggtccaaatgcacagacgatggtgcacagagccgtagccgacattgtgaggagttgctgccaggttcctccgcctgcgccgggaattcatcccagtccagaccttgcccttattcggagattcccgtgatactgcctgcatcctctatggaggaagctaccgactgtgccggtttcaatctcatccatctggtggctaccgggatctcgtgttttctcggatcaggcctcctgacacttgcagtctatctaagctgccaacattgtcagcgtcagtcccaagaatcaactctggtacatccagccactcctaatcacctccattacaagggggggggaacccccaagaacgaaaagtacaccccaatggagttcaagacgttgaacaagaataacctcattccggatgacagagccaacttctatcccctgcaacagaccaacgtctatacaactacctactatccatctcccctgaacaagcacagttttagacctgaagcgagcccaggccagagatgcttcccaaactcatag

SEQ ID NO: 90357 - DNA, 3618 bp, Artificial Sequence
  derived and/or modified sequence
atgctgcacctgtctgccgaagaggcgattggatgtgtgagagttagacggagcttcatcgatgagcttgcgtttggacgaggtcacagcactggtactggaaagcaaaaacggagagacagagtctccggatcatcctggtgtctggcttgcgtctcttggatgccatgcggtttttcaccttcccctgtcgcacaccatctggtacccggtccaccggacactcccgctcagcaactccggtgtggctggaccgtcggcggttggctgttatcactagtcagaggcctgttgccctgtctgccgcctggcgcaaggaccgccgagggccctatcatggttctggcaggaccactggctgtgagtttgttgttgccgtccctcacactccttgtctctcatctgagctcaagtcaggacgtaagctctgaaccctccagcgagcagcagctatgcgcattaagtaaacatccaacggtggcctttgaagaccttcagccgtgggtctctaacttcacctatccaggtgctcgagatttctctcagttggcacttgacccatcaggaaaccagctaatcgtgggagcgagaaactacctgttccgattatctctggccaatgtctccttgctccaagctacggagtgggccagtagtgaggacactcgccgatcctgccagagcaaaggcaagaccgaggaagagtgtcagaattacgtgagggtactcatcgtcgctggcaggaaagtttttatgtgtggaacaaacgccttctcgcctatgtgcacaagcaggcaggtgggaaacctttctaggactattgagaagattaatggtgtggcccgttgtccctatgaccctagacacaactccactgcagtcatatcaagtcaaggtgagttatacgctgccacggttatcgacttctctgggagggaccccgcaatctatcgaagcctcggatctggaccacccttgcggactgcccagtataactcgaagtggttgaacgaacccaactttgtcgccgcatacgacattgggttgttcgcctacttctttctccgagagaatgcagtcgaacatgactgcggcaggactgtttacagccgcgtggccagggtttgtaagaatgacgtggggggtcggttcctgctcgaggacacctggacaacctttatgaaagctcgcctcaactgtagtcgtccaggggaggttcccttttactacaacgagctgcagtctgcgtttcacctcccagaacaggatctgatttatggggtcttcactaccaatgtgaactcaattgccgctagcgcagtgtgtgccttcaacctcagcgctatctctcaagcattcaatggaccttttaggtaccaggagaatcccagagccgcatggctgccgatagccaaccctatacccaattttcaatgtggcacactgcccgagaccgggcctaatgagaaccttactgagagatccctccaggacgcgcagcggctgtttttgatgtcagaagccgtgcagccagtgactcccgaaccctgtgtaacacaagacagtgtaagattctcacacctcgtcgttgacttagttcaagccaaagacaccctctaccacgtcctgtacatcggcacagaatccggtaccattttgaaagcattgtctactgcaagtagatccctacatggttgttacctggaagagctgcatgtgttacctccaggccgacgcgaaccactgaggagcctccgcatcttacatagcgcgcgagcgctttttgtaggtctgagggacggcgtgctgcgggtgcctctggagcgatgtgccgcttatcggagccaaggcgcttgcctaggggctcgtgacccatactgtgggtgggacggaaaacagcaacggtgctcaacactggaggatagtagcaacatgtccctgtggactcagaacatcacagcctgtccagttaggaatgtgacgcgggatggaggctttggtccctggagtccatggcagccatgcgagcacctggatggcgataacagcgggagctgcctgtgccgggctcgatcctgcgattcgccaaggcccagatgcggaggcctcgactgtctgggtcccgcaatccatattgccaactgtagtagaaacggggcatggaccccatggtcatcatgggcgttgtgctctactagttgcggcatcggcttccaagtccggcaaagaagctgttcaaaccccgctcccagacacggcggacgcatatgtgttggaaagtccagggaggagcgcttctgcaacgagaacacgccctgccccgtgcccattttctgggccagttgggggagttggtcaaaatgcagttctaattgtggcggaggaatgcagtcacgcagacgagcttgtgagaatggcaactcctgtttgggatgcggagtggagttcaaaacatgcaaccctgaaggatgcccagaagtccgacgcaatacaccctggaccccttggctgccagttaacgttacacagggaggggcaagacaagagcagagattcagatttacttgccgcgctcctttggctgacccacacggcttacagtttgggaggcgtcggacagaaacccggacctgtccagccgacgggtctggctcctgtgacacagatgctctggtggaggtgctccttagatctgggagcaccagtcctcataccgtaagtggagggtgggcagcgtggggaccatggagctcatgctcccgtgattgtgagctgggttttcgagtccggaaacgtacgtgtacaaacccagagccccgaaatggtggcctgccttgtgttggagatgctgccgagtaccaggactgcaatcctcaagcttgccccgtgcggggtgcctggtcttgttggacgtcatggtcaccgtgttcggccagctgtgggggaggccactaccaaagaacgcgttcatgcaccagccctgcgccttccccaggagaagacatttgcttgggcttgcataccgaggaagcgctctgcgctactcaggcttgtcccgagggctggagtccttggtccgagtggagcaaatgcacggacgacggtgctcagtctaggtcaaggcactgtgaagagcttctgcctggaagttccgcttgcgccggaaactcctcgcagtcccggccttgtccttactctgaaatacccgtgatactcccggcttcttccatggaggaggcaacggactgtgctggcttcaaccttatccacctagtggccactggaatttcttgtttcctcggatctggtctcctcacattggccgtgtacctatcttgccagcattgtcagaggcaatcacaggagtccaccctcgttcaccccgctaccccaaaccatttacattacaagggaggcggaaccccgaaaaacgagaagtatactccaatggagtttaagacactgaataagaataacctgatccctgacgatagggccaacttttacccactgcagcagaccaacgtgtacacaacaacatactacccttctccccttaacaaacactccttcaggcccgaagcctctccgggacaacggtgtttccctaactcttag

SEQ ID NO: 90358 - DNA, 4792 bp, Artificial Sequence
  derived and/or modified sequence
aactcctcccccaccgccccctccctccttctgctcccgcggtctcctcctccctgctctctccgagcgccgggtcgggagctagttggagcgcgggggttggtgccagagcccagctccgccgagccgggcgggtcggcagcgcatccagcggctgctgggagcccgagcgcagcgggcgcgggcccgggtggggactgcaccggagcgctgagagctggaggccgttcctgcgcggccgccccattcccagaccggccgccagcccatctggttagctcccgccgctccgcgccgcccgggagtcgggagccgcggggaaccgggcacctgcacccgcctctgggagtgagtggttccagctggtgcctggcctgtgtctcttggatgccctgtggcttcagtccgtctcctgttgcccaccacctcgtccctgggccgcctgataccccagcccaacagctaaggtgtggatggacagtagggggctggcttctctcactggtcaggggtcttctcccctgtctgcctcccggagctaggactgcagaggggcctatcatggtgcttgcaggccccctggctgtctcgctgttgctgcccagcctcacactgctggtgtcccacctctccagctcccaggatgtctccagtgagcccagcagtgagcagcagctgtgcgcccttagcaagcaccccaccgtggcctttgaagacctgcagccgtgggtctctaacttcacctaccctggagcccgggatttctcccagctggctttggacccctccgggaaccagctcatcgtgggagccaggaactacctcttcagactcagccttgccaatgtctctcttcttcaggccacagagtgggcctccagtgaggacacgcgccgctcctgccaaagcaaagggaagactgaggaggagtgtcagaactacgtgcgagtcctgatcgtcgccggccggaaggtgttcatgtgtggaaccaatgccttttcccccatgtgcaccagcagacaggtggggaacctcagccggactattgagaagatcaatggtgtggcccgctgcccctatgacccacgccacaactccacagctgtcatctcctcccagggggagctctatgcagccacggtcatcgacttctcaggtcgggaccctgccatctaccgcagcctgggcagtgggccaccgcttcgcactgcccaatataactccaagtggcttaatgagccaaacttcgtggcagcctatgatattgggctgtttgcatacttcttcctgcgggagaacgcagtggagcacgactgtggacgcaccgtgtactctcgcgtggcccgcgtgtgcaagaatgacgtggggggccgattcctgctggaggacacatggaccacattcatgaaggcccggctcaactgctcccgcccgggcgaggtccccttctactataacgagctgcagagtgccttccacttgccggagcaggacctcatctatggagttttcacaaccaacgtaaacagcatcgcggcttctgctgtctgcgccttcaacctcagtgctatctcccaggctttcaatggcccatttcgctaccaggagaaccccagggctgcctggctccccatagccaaccccatccccaatttccagtgtggcaccctgcctgagaccggtcccaacgagaacctgacggagcgcagcctgcaggacgcgcagcgcctcttcctgatgagcgaggccgtgcagccggtgacacccgagccctgtgtcacccaggacagcgtgcgcttctcacacctcgtggtggacctggtgcaggctaaagacacgctctaccatgtactctacattggcaccgagtcgggcaccatcctgaaggcgctgtccacggcgagccgcagcctccacggctgctacctggaggagctgcacgtgctgccccccgggcgccgcgagcccctgcgcagcctgcgcatcctgcacagcgcccgcgcgctcttcgtggggctgagagacggcgtcctgcgggtcccactggagaggtgcgccgcctaccgcagccagggggcatgcctgggggcccgggacccgtactgtggctgggacgggaagcagcaacgttgcagcacactcgaggacagctccaacatgagcctctggacccagaacatcaccgcctgtcctgtgcggaatgtgacacgggatgggggcttcggcccatggtcaccatggcaaccatgtgagcacttggatggggacaactcaggctcttgcctgtgtcgagctcgatcctgtgattcccctcgaccccgctgtgggggccttgactgcctggggccagccatccacatcgccaactgctccaggaatggggcgtggaccccgtggtcatcgtgggcgctgtgcagcacgtcctgtggcatcggcttccaggtccgccagcgaagttgcagcaaccctgctccccgccacgggggccgcatctgcgtgggcaagagccgggaggaacggttctgtaatgagaacacgccttgcccggtgcccatcttctgggcttcctggggctcctggagcaagtgcagcagcaactgtggagggggcatgcagtcgcggcgtcgggcctgcgagaacggcaactcctgcctgggctgcggcgtggagttcaagacgtgcaaccccgagggctgccccgaagtgcggcgcaacaccccctggacgccgtggctgcccgtgaacgtgacgcagggcggggcacggcaggagcagcggttccgcttcacctgccgcgcgccccttgcagacccgcacggcctgcagttcggcaggagaaggaccgagacgaggacctgtcccgcggacggctccggctcctgcgacaccgacgccctggtggaggtcctcctgcgcagcgggagcacctccccgcacacggtgagcgggggctgggccgcctggggcccgtggtcgtcctgctcccgggactgcgagctgggcttccgcgtccgcaagagaacgtgcactaacccggagccccgcaacgggggcctgccctgcgtgggcgatgctgccgagtaccaggactgcaacccccaggcttgcccagttcggggtgcttggtcctgctggacctcatggtctccatgctcagcttcctgtggtgggggtcactatcaacgcacccgttcctgcaccagccccgcaccctccccaggtgaggacatctgtctcgggctgcacacggaggaggcactatgtgccacacaggcctgcccagaaggctggtcgccctggtctgagtggagtaagtgcactgacgacggagcccagagccgaagccggcactgtgaggagctcctcccagggtccagcgcctgtgctggaaacagcagccagagccgcccctgcccctacagcgagattcccgtcatcctgccagcctccagcatggaggaggccaccgactgtgcagggttcaatctcatccacttggtggccacgggcatctcctgcttcttgggctctgggctcctgaccctagcagtgtacctgtcttgccagcactgccagcgtcagtcccaggagtccacactggtccatcctgccacccccaaccatttgcactacaagggcggaggcaccccgaagaatgaaaagtacacacccatggaattcaagaccctgaacaagaataacttgatccctgatgacagagccaacttctacccattgcagcagaccaatgtgtacacgactacttactacccaagccccctgaacaaacacagcttccggcccgaggcctcacctggacaacggtgcttccccaacagctgataccgccgtcctggggacttgggcttcttgccttcataaggcacagagcagatggagatgggacagtggagccagtttggttttctccctctgcactaggccaagaacttgctgccttgcctgtggggggtcccatccggcttcagagagctctggctggcattgaccatgggggaaagggctggtttcaggctgacatatggccgcaggtccagttcagcccaggtctctcatggttatcttccaacccactgtcacgctgacactatgctgccatgcctgggctgtggacctactgggcatttgaggaattggagaatggagatggcaagagggcaggcttttaagtttgggttggagacaacttcctgtggcccccacaagctgagtctggccttctccagctggccccaaaaaaggcctttgctacatcctgattatctctgaaagtaatcaatcaagtggctccagtagctctggattttctgccagggctgggccattgtggtgctgccccagtatgacatgggaccaaggccagcgcaggttatccacctctgcctggaagtctatactctacccagggcatccctctggtcagaggcagtgagtactgggaactggaggctgacctgtgcttagaagtcctttaatctgggctggtacaggcctcagccttgccctcaatgcacgaaaggtggcccaggagagaggatcaatgccataggaggcagaagtctggcctctgtgcctctatggagactatcttccagttgctgctcaacagagttgttggctgagacctgcttgggagtctctgctggcccttcatctgttcaggaacacacacacacacacactcacacacgcacacacaatcacaatttgctacagcaacaaaaaagacattgggctgtggcattattaattaaagatgatatccagtctc

SEQ ID NO: 90359 - DNA, 3791 bp, Artificial Sequence
  derived and/or modified sequence
agtgcttttgtctggtgctgggagtgaggctcagcagtgtgagggacaattggagatgctcgggggcaggctgccgcgttgtgtcctgcttttctgcggccagaccaagccgtctggagctgctggtcaggttttcttgctgacctcacctgaccacagtggcctgggtggactctacagggaaatgttgttttctccctgggagcagtagcagcagtcctggctcccctggactgagaactcctcatcagccccaggaagcccggaccccctttcagggatctggaaccggtgtgcctgtggccccaggtctgctcccaggcgtgggctgaagtcctgacttctgtcgctgggggcaaggagtgggagagcccagctgctgcctgggctttggcagacagcaggctgatggtgctggcttccccgagactgcttctcctgcctgctgtctgatttccctgcatggtgcccgcagctgagctgctacggtgagtggttccagctggtgcctggcctgtgtctcttggatgccctgtggcttcagtccgtctcctgttgcccaccacctcgtccctgggccgcctgataccccagcccaacagctaaggtgtggatggacagtagggggctggcttctctcactggtcaggggtcttctcccctgtctgcctcccggagctaggactgcagaggggcctatcatggtgcttgcaggccccctggctgtctcgctgttgctgcccagcctcacactgctggtgtcccacctctccagctcccaggatgtctccagtgagcccagcagtgagcagcagctgtgcgcccttagcaagcaccccaccgtggcctttgaagacctgcagccgtgggtctctaacttcacctaccctggagcccgggatttctcccagctggctttggacccctccgggaaccagctcatcgtgggagccaggaactacctcttcagactcagccttgccaatgtctctcttcttcaggccacagagtgggcctccagtgaggacacgcgccgctcctgccaaagcaaagggaagactgaggaggagtgtcagaactacgtgcgagtcctgatcgtcgccggccggaaggtgttcatgtgtggaaccaatgccttttcccccatgtgcaccagcagacaggtggggaacctcagccggactattgagaagatcaatggtgtggcccgctgcccctatgacccacgccacaactccacagctgtcatctcctcccagggggagctctatgcagccacggtcatcgacttctcaggtcgggaccctgccatctaccgcagcctgggcagtgggccaccgcttcgcactgcccaatataactccaagtggcttaatgagccaaacttcgtggcagcctatgatattgggctgtttgcatacttcttcctgcgggagaacgcagtggagcacgactgtggacgcaccgtgtactctcgcgtggcccgcgtgtgcaagaatgacgtggggggccgattcctgctggaggacacatggaccacattcatgaaggcccggctcaactgctcccgcccgggcgaggtccccttctactataacgagctgcagagtgccttccacttgccggagcaggacctcatctatggagttttcacaaccaacgtaaacagcatcgcggcttctgctgtctgcgccttcaacctcagtgctatctcccaggctttcaatggcccatttcgctaccaggagaaccccagggctgcctggctccccatagccaaccccatccccaatttccagtgtggcaccctgcctgagaccggtcccaacgagaacctgacggagcgcagcctgcaggacgcgcagcgcctcttcctgatgagcgaggccgtgcagccggtgacacccgagccctgtgtcacccaggacagcgtgcgcttctcacacctcgtggtggacctggtgcaggctaaagacacgctctaccatgtactctacattggcaccgagtcgggcaccatcctgaaggcgctgtccacggcgagccgcagcctccacggctgctacctggaggagctgcacgtgctgccccccgggcgccgcgagcccctgcgcagcctgcgcatcctgcacagcgcccgcgcgctcttcgtggggctgagagacggcgtcctgcgggtcccactggagaggtgcgccgcctaccgcagccagggggcatgcctgggggcccgggacccgtactgtggctgggacgggaagcagcaacgttgcagcacactcgaggacagctccaacatgagcctctggacccagaacatcaccgcctgtcctgtgcggaatgtgacacgggatgggggcttcggcccatggtcaccatggcaaccatgtgagcacttggatggggacaactcaggctcttgcctgtgtcgagctcgatcctgtgattcccctcgaccccgctgtgggggccttgactgcctggggccagccatccacatcgccaactgctccaggaatggggcgtggaccccgtggtcatcgtgggcgctgtgcagcacgtcctgtggcatcggcttccaggtccgccagcgaagttgcagcaaccctgctccccgccacgggggccgcatctgcgtgggcaagagccgggaggaacggttctgtaatgagaacacgccttgcccggtgcccatcttctgggcttcctggggctcctggagcaagtgcagcagcaactgtggagggggcatgcagtcgcggcgtcgggcctgcgagaacggcaactcctgcctgggctgcggcgtggagttcaagacgtgcaaccccgagggctgccccgaagtgcggcgcaacaccccctggacgccgtggctgcccgtgaacgtgacgcagggcggggcacggcaggagcagcggttccgcttcacctgccgcgcgccccttgcagacccgcacggcctgcagttcggcaggagaaggaccgagacgaggacctgtcccgcggacggctccggctcctgcgacaccgacgccctggtggaggtcctcctgcgcagcgggagcacctccccgcacacggtgagcgggggctgggccgcctggggcccgtggtcgtcctgctcccgggactgcgagctgggcttccgcgtccgcaagagaacgtgcactaacccggagccccgcaacgggggcctgccctgcgtgggcgatgctgccgagtaccaggactgcaacccccaggcttgcccagttcggggtgcttggtcctgctggacctcatggtctccatgctcagcttcctgtggtgggggtcactatcaacgcacccgttcctgcaccagccccgcaccctccccaggtgaggacatctgtctcgggctgcacacggaggaggcactatgtgccacacaggcctgcccagaaggctggtcgccctggtctgagtggagtaagtgcactgacgacggagcccagagccgaagccggcactgtgaggagctcctcccagggtccagcgcctgtgctggaaacagcagccagagccgcccctgcccctacagcgagattcccgtcatcctgccagcctccagcatggaggaggccaccgactgtgcagggttcaatctcatccacttggtggccacgggcatctcctgcttcttgggctctgggctcctgaccctagcagtgtacctgtcttgccagcactgccagcgtcagtcccaggagtccacactggtccatcctgccacccccaaccatttgcactacaagggcggaggcaccccg

SEQ ID NO: 90360 - DNA, 4108 bp, Artificial Sequence
  derived and/or modified sequence
gtataaaccacatgctgcatctgtcagcagaggaagccattggctgcgtgagggtcagaaggagcttcatagatgagctggcatttgggagagggcattctacagggacgggcaagcagaagcgaagggatcgagtgagtggttccagctggtgcctggcctgtgtctcttggatgccctgtggcttcagtccgtctcctgttgcccaccacctcgtccctgggccgcctgataccccagcccaacagctaaggtgtggatggacagtagggggctggcttctctcactggtcaggggtcttctcccctgtctgcctcccggagctaggactgcagaggggcctatcatggtgcttgcaggccccctggctgtctcgctgttgctgcccagcctcacactgctggtgtcccacctctccagctcccaggatgtctccagtgagcccagcagtgagcagcagctgtgcgcccttagcaagcaccccaccgtggcctttgaagacctgcagccgtgggtctctaacttcacctaccctggagcccgggatttctcccagctggctttggacccctccgggaaccagctcatcgtgggagccaggaactacctcttcagactcagccttgccaatgtctctcttcttcaggccacagagtgggcctccagtgaggacacgcgccgctcctgccaaagcaaagggaagactgaggaggagtgtcagaactacgtgcgagtcctgatcgtcgccggccggaaggtgttcatgtgtggaaccaatgccttttcccccatgtgcaccagcagacaggtggggaacctcagccggactattgagaagatcaatggtgtggcccgctgcccctatgacccacgccacaactccacagctgtcatctcctcccagggggagctctatgcagccacggtcatcgacttctcaggtcgggaccctgccatctaccgcagcctgggcagtgggccaccgcttcgcactgcccaatataactccaagtggcttaatgagccaaacttcgtggcagcctatgatattgggctgtttgcatacttcttcctgcgggagaacgcagtggagcacgactgtggacgcaccgtgtactctcgcgtggcccgcgtgtgcaagaatgacgtggggggccgattcctgctggaggacacatggaccacattcatgaaggcccggctcaactgctcccgcccgggcgaggtccccttctactataacgagctgcagagtgccttccacttgccggagcaggacctcatctatggagttttcacaaccaacgtaaacagcatcgcggcttctgctgtctgcgccttcaacctcagtgctatctcccaggctttcaatggcccatttcgctaccaggagaaccccagggctgcctggctccccatagccaaccccatccccaatttccagtgtggcaccctgcctgagaccggtcccaacgagaacctgacggagcgcagcctgcaggacgcgcagcgcctcttcctgatgagcgaggccgtgcagccggtgacacccgagccctgtgtcacccaggacagcgtgcgcttctcacacctcgtggtggacctggtgcaggctaaagacacgctctaccatgtactctacattggcaccgagtcgggcaccatcctgaaggcgctgtccacggcgagccgcagcctccacggctgctacctggaggagctgcacgtgctgccccccgggcgccgcgagcccctgcgcagcctgcgcatcctgcacagcgcccgcgcgctcttcgtggggctgagagacggcgtcctgcgggtcccactggagaggtgcgccgcctaccgcagccagggggcatgcctgggggcccgggacccgtactgtggctgggacgggaagcagcaacgttgcagcacactcgaggacagctccaacatgagcctctggacccagaacatcaccgcctgtcctgtgcggaatgtgacacgggatgggggcttcggcccatggtcaccatggcaaccatgtgagcacttggatggggacaactcaggctcttgcctgtgtcgagctcgatcctgtgattcccctcgaccccgctgtgggggccttgactgcctggggccagccatccacatcgccaactgctccaggaatggggcgtggaccccgtggtcatcgtgggcgctgtgcagcacgtcctgtggcatcggcttccaggtccgccagcgaagttgcagcaaccctgctccccgccacgggggccgcatctgcgtgggcaagagccgggaggaacggttctgtaatgagaacacgccttgcccggtgcccatcttctgggcttcctggggctcctggagcaagtgcagcagcaactgtggagggggcatgcagtcgcggcgtcgggcctgcgagaacggcaactcctgcctgggctgcggcgtggagttcaagacgtgcaaccccgagggctgccccgaagtgcggcgcaacaccccctggacgccgtggctgcccgtgaacgtgacgcagggcggggcacggcaggagcagcggttccgcttcacctgccgcgcgccccttgcagacccgcacggcctgcagttcggcaggagaaggaccgagacgaggacctgtcccgcggacggctccggctcctgcgacaccgacgccctggtggaggtcctcctgcgcagcgggagcacctccccgcacacggtgagcgggggctgggccgcctggggcccgtggtcgtcctgctcccgggactgcgagctgggcttccgcgtccgcaagagaacgtgcactaacccggagccccgcaacgggggcctgccctgcgtgggcgatgctgccgagtaccaggactgcaacccccaggcttgcccagttcggggtgcttggtcctgctggacctcatggtctccatgctcagcttcctgtggtgggggtcactatcaacgcacccgttcctgcaccagccccgcaccctccccaggtgaggacatctgtctcgggctgcacacggaggaggcactatgtgccacacaggcctgcccagaaggctggtcgccctggtctgagtggagtaagtgcactgacgacggagcccagagccgaagccggcactgtgaggagctcctcccagggtccagcgcctgtgctggaaacagcagccagagccgcccctgcccctacagcgagattcccgtcatcctgccagcctccagcatggaggaggccaccgactgtgcagggttcaatctcatccacttggtggccacgggcatctcctgcttcttgggctctgggctcctgaccctagcagtgtacctgtcttgccagcactgccagcgtcagtcccaggagtccacactggtccatcctgccacccccaaccatttgcactacaagggcggaggcaccccgaagaatgaaaagtacacacccatggaattcaagaccctgaacaagaataacttgatccctgatgacagagccaacttctacccattgcagcagaccaatgtgtacacgactacttactacccaagccccctgaacaaacacagcttccggcccgaggcctcacctggacaacggtgcttccccaacagctgataccgccgtcctggggacttgggcttcttgccttcataaggcacagagcagatggagatgggacagtggagccagtttggttttctccctctgcactaggccaagaacttgctgccttgcctgtggggggtcccatccggcttcagagagctctggctggcattgaccatgggggaaagggctggtttcaggctgacatatggccgcaggtccagttcagcccaggtctctcatggttatcttccaacccactgtcacgctgacactatgctgccatgcctgggctgtggacctactgggcatttgaggaattggagaatggagatggcaagagggcaggcttttaagtttgggttggagacaacttcctgtggcccccacaagctgagtctggccttctccagctggccccaaaaaaggcctttgctacatcctgattatctctgaaagtaatcaatcaagtggctccagtagctctg

SEQ ID NO: 90361 - protein, 1057 aa, Artificial Sequence
  derived and/or modified sequence
MVLAGPLAVSLLLPSLTLLVSHLSSSQDVSSEPSSEQQLCALSKHPTVAFEDLQPWVSNFTYPGARDFSQLALDPSGNQLIVGARNYLFRLSLANVSLLQATEWASSEDTRRSCQSKGKTEEECQNYVRVLIVAGRKVFMCGTNAFSPMCTSRQVGNLSRTIEKINGVARCPYDPRHNSTAVISSQGELYAATVIDFSGRDPAIYRSLGSGPPLRTAQYNSKWLNEPNFVAAYDIGLFAYFFLRENAVEHDCGRTVYSRVARVCKNDVGGRFLLEDTWTTFMKARLNCSRPGEVPFYYNELQSAFHLPEQDLIYGVFTTNVNSIAASAVCAFNLSAISQAFNGPFRYQENPRAAWLPIANPIPNFQCGTLPETGPNENLTERSLQDAQRLFLMSEAVQPVTPEPCVTQDSVRFSHLVVDLVQAKDTLYHVLYIGTESGTILKALSTASRSLHGCYLEELHVLPPGRREPLRSLRILHSARALFVGLRDGVLRVPLERCAAYRSQGACLGARDPYCGWDGKQQRCSTLEDSSNMSLWTQNITACPVRNVTRDGGFGPWSPWQPCEHLDGDNSGSCLCRARSCDSPRPRCGGLDCLGPAIHIANCSRNGAWTPWSSWALCSTSCGIGFQVRQRSCSNPAPRHGGRICVGKSREERFCNENTPCPVPIFWASWGSWSKCSSNCGGGMQSRRRACENGNSCLGCGVEFKTCNPEGCPEVRRNTPWTPWLPVNVTQGGARQEQRFRFTCRAPLADPHGLQFGRRRTETRTCPADGSGSCDTDALVEVLLRSGSTSPHTVSGGWAAWGPWSSCSRDCELGFRVRKRTCTNPEPRNGGLPCVGDAAEYQDCNPQACPGEDICLGLHTEEALCATQACPEGWSPWSEWSKCTDDGAQSRSRHCEELLPGSSACAGNSSQSRPCPYSEIPVILPASSMEEATDCAGFNLIHLVATGISCFLGSGLLTLAVYLSCQHCQRQSQESTLVHPATPNHLHYKGGGTPKNEKYTPMEFKTLNKNNLIPDDRANFYPLQQTNVYTTTYYPSPLNKHSFRPEASPGQRCFPNS

SEQ ID NO: 90362 - DNA, 3174 bp, Artificial Sequence
  derived and/or modified sequence
atggtgctggccggccccctggccgtgagcctgctgctgcccagcctgaccctgctggtgagccacctgagcagcagccaggacgtgagcagcgagcccagcagcgagcagcagctgtgcgccctgagcaagcaccccaccgtggccttcgaggacctgcagccctgggtgagcaacttcacctaccccggcgccagagacttcagccagctggccctggaccccagcggcaaccagctgatcgtgggcgccagaaactacctgttcagactgagcctggccaacgtgagcctgctgcaggccaccgagtgggccagcagcgaggacaccagaagaagctgccagagcaagggcaagaccgaggaggagtgccagaactacgtgagagtgctgatcgtggccggcagaaaggtgttcatgtgcggcaccaacgccttcagccccatgtgcaccagcagacaggtgggcaacctgagcagaaccatcgagaagatcaacggcgtggccagatgcccctacgaccccagacacaacagcaccgccgtgatcagcagccagggcgagctgtacgccgccaccgtgatcgacttcagcggcagagaccccgccatctacagaagcctgggcagcggcccccccctgagaaccgcccagtacaacagcaagtggctgaacgagcccaacttcgtggccgcctacgacatcggcctgttcgcctacttcttcctgagagagaacgccgtggagcacgactgcggcagaaccgtgtacagcagagtggccagagtgtgcaagaacgacgtgggcggcagattcctgctggaggacacctggaccaccttcatgaaggccagactgaactgcagcagacccggcgaggtgcccttctactacaacgagctgcagagcgccttccacctgcccgagcaggacctgatctacggcgtgttcaccaccaacgtgaacagcatcgccgccagcgccgtgtgcgccttcaacctgagcgccatcagccaggccttcaacggccccttcagataccaggagaaccccagagccgcctggctgcccatcgccaaccccatccccaacttccagtgcggcaccctgcccgagaccggccccaacgagaacctgaccgagagaagcctgcaggacgcccagagactgttcctgatgagcgaggccgtgcagcccgtgacccccgagccctgcgtgacccaggacagcgtgagattcagccacctggtggtggacctggtgcaggccaaggacaccctgtaccacgtgctgtacatcggcaccgagagcggcaccatcctgaaggccctgagcaccgccagcagaagcctgcacggctgctacctggaggagctgcacgtgctgccccccggcagaagagagcccctgagaagcctgagaatcctgcacagcgccagagccctgttcgtgggcctgagagacggcgtgctgagagtgcccctggagagatgcgccgcctacagaagccagggcgcctgcctgggcgccagagacccctactgcggctgggacggcaagcagcagagatgcagcaccctggaggacagcagcaacatgagcctgtggacccagaacatcaccgcctgccccgtgagaaacgtgaccagagacggcggcttcggcccctggagcccctggcagccctgcgagcacctggacggcgacaacagcggcagctgcctgtgcagagccagaagctgcgacagccccagacccagatgcggcggcctggactgcctgggccccgccatccacatcgccaactgcagcagaaacggcgcctggaccccctggagcagctgggccctgtgcagcaccagctgcggcatcggcttccaggtgagacagagaagctgcagcaaccccgcccccagacacggcggcagaatctgcgtgggcaagagcagagaggagagattctgcaacgagaacaccccctgccccgtgcccatcttctgggccagctggggcagctggagcaagtgcagcagcaactgcggcggcggcatgcagagcagaagaagagcctgcgagaacggcaacagctgcctgggctgcggcgtggagttcaagacctgcaaccccgagggctgccccgaggtgagaagaaacaccccctggaccccctggctgcccgtgaacgtgacccagggcggcgccagacaggagcagagattcagattcacctgcagagcccccctggccgacccccacggcctgcagttcggcagaagaagaaccgagaccagaacctgccccgccgacggcagcggcagctgcgacaccgacgccctggtggaggtgctgctgagaagcggcagcaccagcccccacaccgtgagcggcggctgggccgcctggggcccctggagcagctgcagcagagactgcgagctgggcttcagagtgagaaagagaacctgcaccaaccccgagcccagaaacggcggcctgccctgcgtgggcgacgccgccgagtaccaggactgcaacccccaggcctgccccggcgaggacatctgcctgggcctgcacaccgaggaggccctgtgcgccacccaggcctgccccgagggctggagcccctggagcgagtggagcaagtgcaccgacgacggcgcccagagcagaagcagacactgcgaggagctgctgcccggcagcagcgcctgcgccggcaacagcagccagagcagaccctgcccctacagcgagatccccgtgatcctgcccgccagcagcatggaggaggccaccgactgcgccggcttcaacctgatccacctggtggccaccggcatcagctgcttcctgggcagcggcctgctgaccctggccgtgtacctgagctgccagcactgccagagacagagccaggagagcaccctggtgcaccccgccacccccaaccacctgcactacaagggcggcggcacccccaagaacgagaagtacacccccatggagttcaagaccctgaacaagaacaacctgatccccgacgacagagccaacttctaccccctgcagcagaccaacgtgtacaccaccacctactaccccagccccctgaacaagcacagcttcagacccgaggccagccccggccagagatgcttccccaacagctag

SEQ ID NO: 90363 - DNA, 3174 bp, Artificial Sequence
  derived and/or modified sequence
atggtgctcgcgggtccactggccgtgagtcttttactcccctcactgaccctgctggtgtctcatttgagctctagccaagatgtctcaagcgagcctagttctgagcaacagctgtgcgcgttatcgaagcacccaactgtggcattcgaagatttgcagccctgggtcagcaatttcacatacccaggcgctcgtgacttctctcaactcgctctggatcctagcggaaatcagctgattgtgggggctcgcaactacctcttcaggcttagtctggcgaacgtgagcttgctccaagcaactgaatgggcatcctcagaggacaccagacggagctgtcagtccaagggcaagacagaggaagagtgccagaactatgtcagagtacttatcgtagcaggacgaaaagtcttcatgtgtggtaccaacgcgtttagccccatgtgcacatcacggcaagtagggaatttgtccagaaccattgaaaaaatcaatggtgtggcacgttgcccatatgatcctaggcacaacagcactgctgttatttctagtcagggcgagctctatgctgctaccgttattgatttcagcggccgtgacccagccatctatagaagcctgggaagcggcccaccactccgcacggctcagtacaacagtaagtggctgaacgagccgaacttcgtagctgcatacgatatcggcctgttcgcatacttctttctgcgtgaaaatgccgtagagcatgactgtggacgcaccgtgtacagtcgagttgccagggtctgtaagaatgacgtcggtggcagatttctgctggaagacacttggaccaccttcatgaaggcacgactgaattgctctcgtcccggggaggtccctttttattacaacgaactacagtccgcattccatctaccagagcaggatctcatttacggtgtgttcacaaccaacgttaactccattgccgcctcagcggtgtgcgcatttaacttgagcgcgatcagccaagcattcaatggcccctttcgatatcaagagaaccctcgagccgcttggctgccaatagccaacccaatccctaattttcagtgtggaactctgcccgagacaggtccaaatgagaatctgacagaacgatccttgcaggatgcccagagactcttcctgatgagcgaggccgtgcagcccgttacccccgaaccctgcgtcactcaggacagtgtccggttctctcacttggtggtggatctggttcaggctaaagacacactctaccacgtcctgtacatcggtaccgaaagcggcacgattctaaaagcactcagtacagctagcaggagcctgcatggatgctatctggaggagttgcatgtcctgccgccaggaaggcgagagcctctgcggagcttacgaatcctccacagcgcccgtgccctgttcgtggggcttagagatggagttctcagagtacctctggagcggtgtgccgcctaccgcagccagggcgcctgcctcggtgcgagagatccttattgtgggtgggatggcaagcagcagaggtgctctaccttggaagactcctctaatatgtcactgtggacccagaatatcactgcatgtcccgtgagaaacgttactcgggacggcggctttgggccttggagcccatggcagccctgtgaacacctggacggcgacaatagtggctcctgtttgtgtagagcccgaagctgcgacagcccgcgacctagatgtggaggactagattgtctcgggcccgcgatacacatagccaactgttctcgcaacggtgcatggacaccgtggtcttcctgggccctatgcagcacatcctgtggcatcggatttcaggtgaggcagagatcatgctccaatccagctccgcgccatggagggcggatatgcgtggggaagtcaagggaggagcggttctgcaacgagaacacaccttgccctgtgcccatattttgggcttcctggggaagctggtctaaatgctcaagcaactgtggcgggggtatgcagtccagacgacgcgcttgtgaaaatggtaatagttgtctgggttgcggagtggagttcaagacctgcaacccagaaggctgtcccgaagtcagacgtaataccccctggactccatggctgcctgtgaatgtgacacaaggtggcgcccgacaggagcagaggttcaggtttacgtgtcgtgccccactggcggacccacacggcttacaatttggccggcgcaggactgagacaaggacgtgcccagccgatggctcgggttcttgtgacaccgatgcactggtcgaggtgctgctgcggtctggatctacctcgccacatactgtctccggagggtgggctgcctggggaccatggtcaagttgtagccgagactgtgagctgggatttcgcgtccggaaacggacctgcacaaacccggagcccagaaacggcggtctcccttgtgttggtgatgcagccgaatatcaggattgtaacccccaggcatgtcctggcgaggacatctgcttgggactccacactgaggaggcattatgcgccacccaggcttgcccggaggggtggtccccctggtctgagtggtctaaatgtacagacgatggagcccagagcaggtcgcggcactgtgaggagcttcttccaggctcctccgcttgtgctggtaattcttcccagtctagaccttgcccctacagcgagatccctgttattctgccagcgtcctcaatggaggaggccaccgattgcgcgggtttcaacctgatccacctcgtcgctacgggcatctcttgttttctgggatccgggctgctgacactggcagtgtatctctcatgtcagcactgtcagcgccagagtcaagagagcactttggtccatccggcaacccctaaccatttgcactataagggaggggggacgcctaaaaatgaaaagtacacacccatggagtttaaaacacttaataaaaacaatctgattcctgatgatcgagctaacttctaccctttgcagcaaactaacgtgtacactaccacatactatccctcacccctaaataagcacagtttccgcccagaggcttcacctggccagcgctgtttcccaaatagctag

SEQ ID NO: 90364 - DNA, 3174 bp, Artificial Sequence
  derived and/or modified sequence
atggtgctggccggccccctggccgtgtccctgctgctgcccagcctgaccctgctggtgagccacctgagcagcagccaggatgtgtcctctgagcccagcagcgagcagcagctgtgtgccctgagcaagcaccccaccgtggcctttgaggacctgcagccctgggtgagcaacttcacctacccaggggcccgggacttcagccagctggccctggaccccagcggcaaccagctgattgtgggcgccaggaactacctgttccggctgagcctggccaacgtgtccctgctgcaggccacagagtgggccagcagcgaggacaccaggaggagctgccagagcaagggcaagacagaggaggagtgccagaactacgtgcgggtgctgattgtggccggcaggaaggtgttcatgtgtggcaccaatgccttcagccccatgtgcaccagccggcaggtgggcaacctgagcaggaccatcgagaagatcaacggggtggcccgctgcccctatgaccccaggcacaacagcacagctgtgatcagcagccagggcgagctgtatgctgccaccgtgattgacttcagcggccgggaccctgccatctaccgcagcctgggcagcggcccccccctgaggacagcccagtacaacagcaagtggctgaatgagcccaactttgtggccgcctatgacatcggcctgtttgcctacttcttcctgagagaaaatgctgtggagcatgactgtggccgcacagtgtacagccgggtggcccgggtgtgcaagaatgatgtgggcggccgcttcctgctggaggacacctggaccaccttcatgaaggcccggctgaactgcagcaggcctggagaggtgcccttctactacaatgagctgcagagcgccttccacctgcctgagcaggacctgatctacggcgtcttcaccaccaacgtgaacagcattgctgccagcgctgtgtgtgccttcaacctgagcgccatcagccaggccttcaacggccccttccgctaccaggagaaccccagggctgcctggctgcccatcgccaaccccatccccaacttccagtgtggcaccctgcctgagaccggccccaatgaaaacctgacagagaggagcctgcaggatgcccagaggctcttcctgatgtctgaggccgtgcagcctgtgaccccagagccctgtgtgacccaggacagcgtgcgcttcagccacctggtggtggacctggtgcaggccaaggacaccctgtaccacgtgctgtacatcggcacagaaagtggcaccatcctgaaggccctgagcacagccagccgcagcctgcacggctgctacctggaggagctgcacgtgctgcccccaggccggcgggagcccctgcggagcctgcgcatcctgcacagcgcccgggccctgtttgtgggcctgagagatggagtgctgcgggtgcccctggagcgctgtgccgcctaccgcagccagggcgcctgcctgggcgcccgggacccctactgcggctgggatggcaagcagcagcgctgcagcaccctggaggacagcagcaacatgagcctgtggacccagaacatcacagcctgccctgtgagaaatgtgaccagagatggcggcttcggcccctggagcccctggcagccctgtgagcacctggatggagacaacagcggcagctgcctgtgccgggcccggagctgtgacagcccccggccccgctgtggcggcctggactgcctgggccctgccatccacatcgccaactgcagcagaaatggagcctggaccccctggagctcctgggccctgtgcagcaccagctgtggcatcggcttccaggtgcggcagaggagctgcagcaacccagcccccaggcatggaggccgcatctgtgtgggcaagagccgggaggagcgcttctgcaatgaaaacaccccctgccctgtgcccatcttctgggcctcctggggctcctggagcaagtgcagcagcaactgtggcggcggcatgcagagcagaagaagagcctgtgaaaatggaaacagctgcctgggctgcggcgtggagttcaagacctgcaaccctgagggctgcccagaggtgagaagaaacaccccctggaccccctggctgcctgtgaatgtgacccagggcggggcccggcaggagcagcgcttccgcttcacctgccgggcccccctggccgacccccacggcctgcagtttggaagaagaagaacagagaccaggacctgcccagcagatggcagcggcagctgtgacacagatgccctggtggaggtgctgctgcggagcggcagcaccagcccccacacagtgtctgggggctgggccgcctggggcccctggagcagctgcagccgggactgtgagctgggcttccgggtgaggaagaggacctgcaccaaccctgagcccagaaatggaggcctgccctgtgtgggagatgctgctgagtaccaggactgcaacccccaggcctgccctggagaggacatctgcctgggcctgcacacagaggaggccctgtgtgccacccaggcctgcccagagggctggagcccctggagcgagtggagcaagtgcacagatgatggagcccagagccgcagccgccactgtgaggagctgctgcccggcagcagcgcctgtgccggcaacagcagccagagccggccctgcccctacagcgagatccctgtgatcctgcctgccagctccatggaggaggccacagactgtgccggcttcaacctgatccacctggtggccaccggcatcagctgcttcctgggcagcggcctgctgaccctggccgtgtacctgagctgccagcactgccagaggcagagccaggagagcaccctggtgcacccagccacccccaaccacctgcactacaagggcggcggcacccccaagaatgagaagtacacccccatggagttcaagaccctgaacaagaacaacctgatcccagatgaccgggccaacttctaccccctgcagcagaccaacgtgtacaccaccacctactaccccagccccctgaacaagcacagcttccggcctgaggccagccctggccagcgctgcttccccaacagctag

SEQ ID NO: 90365 - DNA, 3174 bp, Artificial Sequence
  derived and/or modified sequence
atggtgctggccggccccctggccgtgagcctgctgctgcccagcctgacactgctggtaagccacctgtccagcagccaggacgtgtcatccgaaccatcttctgagcagcagctttgcgccctttccaagcaccccacagttgctttcgaggatttgcagccatgggtgtcgaattttacttacccgggggcccgggatttctcgcagctagccctggatccatccggcaatcagctgatcgtaggtgcccggaattatctgtttagactctctctagccaacgtatcactgctccaagccacagagtgggcttccagtgaggatactagacgatcatgccagtccaaggggaagacggaggaagagtgccaaaactatgtaagggtactgatcgtggcagggagaaaagtttttatgtgcggtacaaatgctttttctccgatgtgcaccagccgccaagtgggaaatttgtccagaacaatcgagaaaattaatggagttgctaggtgtccctacgatcctcgccacaatagcacggcggttatcagctctcagggcgaactctatgccgctactgtgattgattttagtgggagagacccagcaatctatagaagcctgggatccggcccaccccttaggactgctcagtacaactcaaaatggctcaatgaaccgaacttcgtcgctgcatacgatattggtttgttcgcctactttttccttagggaaaatgccgtagagcacgactgtggtcgtactgtgtactccagagtagcacgtgtctgtaagaatgatgtaggggggcgatttttactcgaggacacttggactacctttatgaaagcaaggctcaattgcagccggccaggcgaggtgcccttctattataacgagttacaatccgcgttccacctgccagagcaagatctgatatatggggtctttacgaccaacgttaactcgatagcggctagcgcagtgtgcgcatttaatttatcagctatcagccaggcattcaatgggccgtttcgctatcaagagaaccctcgggcagcatggctgcccatagcaaatcccattcccaacttccaatgcgggactctgcccgaaactgggcccaacgagaacttaaccgaacgatccttgcaagacgcgcagagattgtttctcatgtcagaagcagtgcagcctgttacacctgagccttgcgtgactcaggactcagtcagattttcgcaccttgtggttgacctagtgcaggcaaaggacaccctgtaccatgtgctttacattggaaccgagtctggaaccatcctgaaagcactgagcaccgctagccgtagcttgcacggttgctacttagaagagctgcatgtgcttccaccaggcagaagggaacccctccgttcgttaaggatcctccatagcgcaagagcactcttcgtgggcctgagagacggtgtactccgagtgcccctggaacgatgtgccgcttaccgatcccagggcgcctgtttaggagcccgggacccttattgtggatgggacggaaagcagcagaggtgctctactctcgaagactccagcaatatgtccctgtggacacagaacatcactgcctgcccggtccggaatgtgacacgcgacgggggcttcggcccctggtcaccctggcagccctgcgagcacctggacggtgacaacagcggtagttgtctttgtagagccaggtcttgcgatagcccacgcccacggtgcggcggcttggattgcctcgggccagccatccacatcgccaactgttcaagaaatggagcctggactccgtggagctcctgggcactttgctcgacatcttgtgggattgggttccaagtgagacagagaagctgctctaatcccgctccaaggcacggcggtcggatctgcgtgggcaagagtcgggaggaaagattttgcaatgagaacactccctgtcctgtgccgatattttgggcttcttggggcagctggtcaaaatgttcttcaaactgtggtgggggaatgcagtcacggcgcagagcgtgtgagaatggcaattcttgtctgggctgcggcgtagaattcaagacttgcaaccctgaggggtgcccggaggtgcgccgcaataccccttggacgccatggttgcctgtgaatgtcactcaagggggtgcaaggcaggaacaacgtttcagattcacttgccgcgctccacttgcagaccctcatgggcttcagttcggtcgaaggcgcacggagacccggacatgtcctgccgacggatccggatcatgtgacaccgacgccttggtagaggtcctgcttagatccgggtccacctcaccccacactgtgagcggaggatgggctgcctggggcccatggtcaagttgctccagggactgtgaactcgggtttagggtcagaaaacgcacctgcactaatcccgagcccagaaatggcggactcccgtgtgtgggtgatgctgctgagtaccaggattgtaatcctcaggcctgccccggagaggatatctgtctgggcttgcatacagaggaggcgctctgtgcaactcaggcatgccctgaaggatggagcccctggtccgaatggtccaagtgtactgacgacggagcccagagtcgaagccgacattgcgaggagcttctgccaggaagctctgcctgcgccgggaattcttctcagagtcgcccctgtccttactctgagattcctgttatcctcccagcatctagtatggaagaggcaactgattgcgctgggttcaacctgatccacctggtcgctactggtatcagctgctttttgggcagtgggctactgacccttgccgtctatttgagctgccaacactgccagagacagagccaggaatctactttagtccaccccgctacaccgaatcatctccactataaaggaggcgggaccccaaaaaacgagaagtatactccaatggaatttaagactctaaacaagaataatcttatccctgatgacagggctaacttctaccccctgcagcagacgaacgtttacactacaacctactacccgagtcctctgaacaaacactcctttcgacctgaggcttccccaggccaaagatgcttccccaatagttag

SEQ ID NO: 90366 - DNA, 3174 bp, Artificial Sequence
  derived and/or modified sequence
atggtgcttgccggacctttggctgtgagtcttctgctgccctctcttacgcttctcgtctcccatctcagctcctcccaagatgtttcgtctgagccgtcctctgaacaacagctctgcgcgcttagcaaacatccaactgtagctttcgaagatctgcagccatgggtcagcaacttcacatacccaggtgcgcgtgacttttcccagctggctttggatccgtcaggaaaccagttaatcgtaggggctcgtaactatctgtttagactttcactagccaacgtgtccctactccaggccactgaatgggccagcagcgaggatacccggaggtcatgccagtcaaagggaaagacagaggaggagtgtcagaactatgttcgggtgttaattgtagccggtcggaaggtgtttatgtgtggaacgaacgccttcagtccaatgtgtacttctagacaggttggaaacctttcaagaactatcgaaaagattaatggtgtggctaggtgcccttatgatccccgacataactcaaccgccgtcatttcctcacagggtgaactttatgcggctacagtgatagatttcagcggcagagacccagccatttatcggtctcttggatccgggccacctctacgaacggcacagtataactctaagtggttgaacgagcccaattttgtggcagcttatgatattggactattcgcctatttctttctacgggagaacgccgtagaacatgactgtggcaggacagtctacagtagagtggcgagagtatgtaagaacgacgtcggcggacggttcttactagaagatacgtggaccacatttatgaaggcgagacttaactgctcccgacccggagaggttcccttttactacaacgagcttcaaagtgcttttcacctgcctgagcaggaccttatatacggagtttttacaactaacgttaactccatagccgcatcagcggtatgtgccttcaatttgtctgccatcagccaggcgttcaatgggccttttcgctaccaggagaatccccgtgctgcatggcttcctatcgccaatcctattcccaatttccaatgcggcacgctccccgaaaccggacccaacgaaaacctgactgaacggtccttgcaggatgcacagagattgttccttatgtccgaagcggtccagccggtgacccccgaaccatgtgtgacccaggatagtgtcaggttctcacacctggttgtggacctcgtgcaggcgaaggacactctttatcatgttctttacattggcaccgagtctgggactatcctgaaggccctgtccacagcgagcagatcactgcacgggtgttacctagaggaactccacgttctgccccctgggagaagagagcctctccgcagcctccgcattctgcattccgcccgtgctctattcgttggcctgagggatggggtgctgcgggtaccattggaaagatgcgcagcataccgctcccagggtgcatgtctaggtgcgagggacccttactgcgggtgggatggcaagcagcagaggtgctccaccctggaggacagttctaatatgtcgctgtggacacagaacatcaccgcgtgtcctgtccgaaatgtcactagggacgggggattcgggccatggagcccttggcagccatgcgagcatctggatggggacaacagcggctcctgtttgtgtcgagctcgaagttgtgacagtccaagaccgaggtgtggcggactcgattgtctgggtcctgccatccatattgctaactgctccagaaatggcgcttggacaccatggtcttcatgggctctatgcagtacatcctgtggtattggattccaggttcggcagcggtcctgctcaaatcccgctccacggcacggcggtagaatttgtgtgggaaagagtcgtgaagagcgattttgcaacgagaataccccctgcccggttcccattttttgggcgagttggggcagctggtcaaaatgcagctccaattgtgggggaggcatgcagtctcggaggcgcgcttgtgagaatggcaactcttgcctcgggtgtggagtcgaattcaaaacttgcaacccagaaggctgtccagaagtgagaaggaacaccccgtggactccatggcttcccgtgaatgtgacacaaggaggggcacgacaggagcaacggtttcgctttacatgtagggcccctcttgccgacccccatggcctgcagttcggacgacggagaacagaaactagaacctgccccgcagacggatcaggttcctgcgacactgatgctctagtggaggtgcttcttcgaagcggatccactagcccccacactgtgtccgggggttgggctgcatgggggccatggagctcttgctcgagggactgcgagctgggattccgagtgaggaaacgcacctgcactaaccccgaaccccgaaacggtgggctcccatgcgtgggcgacgcagcagaatatcaagactgtaacccacaggcctgtcccggagaagacatatgtctgggtcttcacactgaagaggcgttgtgcgcgacgcaggcatgccctgaaggttggagcccatggtccgagtggtccaagtgtacggatgacggggctcagagccggtctcgacattgcgaggagctgctgcccggatctagcgcttgcgcaggcaactcttcacaaagccgaccctgcccttactccgagatccccgtgatcctccctgctagctcaatggaagaagccaccgattgcgcaggatttaatctgatccatctagttgcaacaggcatttcgtgctttttagggagcgggctgctcactcttgcagtgtacctgtcttgtcaacattgccagaggcagagtcaagaatccactctggtccacccagccactcctaaccatctgcattacaaggggggaggcacacctaagaacgagaagtatacgcctatggaatttaagacactgaacaaaaataacctgatacctgacgatcgagctaatttttacccactccagcaaactaatgtttacacgacgacctactaccctagtccactgaacaagcactctttccggcctgaggccagtcccggtcagaggtgttttccaaattcttag

SEQ ID NO: 90367 - DNA, 3551 bp, Artificial Sequence
  derived and/or modified sequence
gtgccagagcccagctccgccgagccgggcgggtcggcagcgcatccagcggctgctgggagcccgagcgcagcgggcgcgggcccgggtggggactgcaccggagcgctgagagctggaggccgttcctgcgcggccgccccattcccagaccggccgccagcccatctggttagctcccgccgctccgcgccgcccgggagtcgggagccgcggggaaccgggcacctgcacccgcctctgggaggtcttctcccctgtctgcctcccggagctaggactgcagaggggcctatcatggtgcttgcaggccccctggctgtctcgctgttgctgcccagcctcacactgctggtgtcccacctctccagctcccaggatgtctccagtgagcccagcagtgagcagcagctgtgcgcccttagcaagcaccccaccgtggcctttgaagacctgcagccgtgggtctctaacttcacctaccctggagcccgggatttctcccagctggctttggacccctccgggaaccagctcatcgtgggagccaggaactacctcttcagactcagccttgccaatgtctctcttcttcaggccacagagtgggcctccagtgaggacacgcgccgctcctgccaaagcaaagggaagactgaggaggagtgtcagaactacgtgcgagtcctgatcgtcgccggccggaaggtgttcatgtgtggaaccaatgccttttcccccatgtgcaccagcagacaggtggggaacctcagccggactattgagaagatcaatggtgtggcccgctgcccctatgacccacgccacaactccacagctgtcatctcctcccagggggagctctatgcagccacggtcatcgacttctcaggtcgggaccctgccatctaccgcagcctgggcagtgggccaccgcttcgcactgcccaatataactccaagtggcttaatgagccaaacttcgtggcagcctatgatattgggctgtttgcatacttcttcctgcgggagaacgcagtggagcacgactgtggacgcaccgtgtactctcgcgtggcccgcgtgtgcaagaatgacgtggggggccgattcctgctggaggacacatggaccacattcatgaaggcccggctcaactgctcccgcccgggcgaggtccccttctactataacgagctgcagagtgccttccacttgccggagcaggacctcatctatggagttttcacaaccaacgtaaacagcatcgcggcttctgctgtctgcgccttcaacctcagtgctatctcccaggctttcaatggcccatttcgctaccaggagaaccccagggctgcctggctccccatagccaaccccatccccaatttccagtgtggcaccctgcctgagaccggtcccaacgagaacctgacggagcgcagcctgcaggacgcgcagcgcctcttcctgatgagcgaggccgtgcagccggtgacacccgagccctgtgtcacccaggacagcgtgcgcttctcacacctcgtggtggacctggtgcaggctaaagacacgctctaccatgtactctacattggcaccgagtcgggcaccatcctgaaggcgctgtccacggcgagccgcagcctccacggctgctacctggaggagctgcacgtgctgccccccgggcgccgcgagcccctgcgcagcctgcgcatcctgcacagcgcccgcgcgctcttcgtggggctgagagacggcgtcctgcgggtcccactggagaggtgcgccgcctaccgcagccagggggcatgcctgggggcccgggacccgtactgtggctgggacgggaagcagcaacgttgcagcacactcgaggacagctccaacatgagcctctggacccagaacatcaccgcctgtcctgtgcggaatgtgacacgggatgggggcttcggcccatggtcaccatggcaaccatgtgagcacttggatggggacaactcaggctcttgcctgtgtcgagctcgatcctgtgattcccctcgaccccgctgtgggggccttgactgcctggggccagccatccacatcgccaactgctccaggaatggggcgtggaccccgtggtcatcgtgggcgctgtgcagcacgtcctgtggcatcggcttccaggtccgccagcgaagttgcagcaaccctgctccccgccacgggggccgcatctgcgtgggcaagagccgggaggaacggttctgtaatgagaacacgccttgcccggtgcccatcttctgggcttcctggggctcctggagcaagtgcagcagcaactgtggagggggcatgcagtcgcggcgtcgggcctgcgagaacggcaactcctgcctgggctgcggcgtggagttcaagacgtgcaaccccgagggctgccccgaagtgcggcgcaacaccccctggacgccgtggctgcccgtgaacgtgacgcagggcggggcacggcaggagcagcggttccgcttcacctgccgcgcgccccttgcagacccgcacggcctgcagttcggcaggagaaggaccgagacgaggacctgtcccgcggacggctccggctcctgcgacaccgacgccctggtggaggtcctcctgcgcagcgggagcacctccccgcacacggtgagcgggggctgggccgcctggggcccgtggtcgtcctgctcccgggactgcgagctgggcttccgcgtccgcaagagaacgtgcactaacccggagccccgcaacgggggcctgccctgcgtgggcgatgctgccgagtaccaggactgcaacccccaggcttgcccaggtgaggacatctgtctcgggctgcacacggaggaggcactatgtgccacacaggcctgcccagaaggctggtcgccctggtctgagtggagtaagtgcactgacgacggagcccagagccgaagccggcactgtgaggagctcctcccagggtccagcgcctgtgctggaaacagcagccagagccgcccctgcccctacagcgagattcccgtcatcctgccagcctccagcatggaggaggccaccgactgtgcagggttcaatctcatccacttggtggccacgggcatctcctgcttcttgggctctgggctcctgaccctagcagtgtacctgtcttgccagcactgccagcgtcagtcccaggagtccacactggtccatcctgccacccccaaccatttgcactacaagggcggaggcaccccgaagaatgaaaagtacacacccatggaattcaagaccctgaacaagaataacttgatccctgatgacagagccaacttctacccattgcagcagaccaatgtgtacacgactacttactacccaagccccctgaacaaacacagcttccggcccgaggcctcacctggacaacggtgcttccccaacagctgataccgccgtcctggggacttgggcttcttgccttctatggagactatcttccagttgctgctcaacagagttgttggctg

SEQ ID NO: 90368 - protein, 212 aa, Artificial Sequence
  derived and/or modified sequence
MQVAAGTRGDTRLQEVALLPQLFDLLVLGQRRARLLRQVPSALAGKDLAQLQAGATLAGYRRAHGPEELEEIRKCGMKNFRNIQVDEANLLTWQGLIVPDNPPYDKGAFRIEINFPAEYPFKPPKITFKTKIYHPNIDEKGQVCLPVISAENWKPATKTDQVIQSLIALVNDPQPEHPLRADLAEEYSKDRKKFCKNAEEFTKKYGEKRPVD

SEQ ID NO: 90369 - DNA, 639 bp, Artificial Sequence
  derived and/or modified sequence
atgcaggtggccgccggcaccagaggcgacaccagactgcaggaggtggccctgctgccccagctgttcgacctgctggtgctgggccagagaagagccagactgctgagacaggtgcccagcgccctggccggcaaggacctggcccagctgcaggccggcgccaccctggccggctacagaagagcccacggccccgaggagctggaggagatcagaaagtgcggcatgaagaacttcagaaacatccaggtggacgaggccaacctgctgacctggcagggcctgatcgtgcccgacaaccccccctacgacaagggcgccttcagaatcgagatcaacttccccgccgagtaccccttcaagccccccaagatcaccttcaagaccaagatctaccaccccaacatcgacgagaagggccaggtgtgcctgcccgtgatcagcgccgagaactggaagcccgccaccaagaccgaccaggtgatccagagcctgatcgccctggtgaacgacccccagcccgagcaccccctgagagccgacctggccgaggagtacagcaaggacagaaagaagttctgcaagaacgccgaggagttcaccaagaagtacggcgagaagagacccgtggactag

SEQ ID NO: 90370 - DNA, 639 bp, Artificial Sequence
  derived and/or modified sequence
atgcaagtggcagctgggacaaggggtgatactaggctgcaagaggtggccctgctgccccagctgtttgacttgttggtacttgggcaaaggagggccaggcttctgcgtcaggttccttctgcactggccggaaaggacttggcacagctacaggcgggggcaaccctcgcagggtaccgacgcgctcacggcccagaagaactcgaggaaattaggaaatgtggaatgaaaaactttcgaaatatacaggtcgacgaggctaacctgctgacttggcaaggcctcatagtgcctgacaaccccccctacgataagggagcattccggatcgagattaatttccctgccgaatatcctttcaaacctcctaagattacatttaaaaccaaaatttaccacccaaacatcgatgagaaaggtcaggtatgccttccagtcattagcgccgaaaattggaagcctgccaccaaaacagaccaagtgatacagtctttaatcgctctcgtgaacgaccctcagcctgaacacccactgagagcggacttggcagaagagtactccaaggacagaaagaagttttgtaaaaacgctgaggagttcacaaagaaatatggagagaagagacctgttgattag

SEQ ID NO: 90371 - DNA, 639 bp, Artificial Sequence
  derived and/or modified sequence
atgcaggtggccgccggcaccaggggggacacccggctgcaggaggtggccctgctgccccagctgtttgacctgctggtgctgggccagaggcgggcccggctgctgcggcaggtgcccagcgccctggccggcaaggacctggcccagctgcaggccggggccaccctggccggctacagaagagcccacggccctgaggagctggaggagatcagaaaatgtggcatgaagaacttcaggaacatccaggtggatgaggccaacctgctgacctggcagggcctgattgtgcctgacaaccccccctatgacaagggggccttcagaattgagatcaacttccctgctgagtaccccttcaagccacccaagatcaccttcaagaccaagatctaccaccccaacattgatgagaagggccaggtgtgcctgcccgtcatctctgctgagaactggaagccagccaccaagacagaccaggtgatccagagcctgattgccctggtgaatgacccccagcctgagcaccccctgcgggctgacctggccgaggagtacagcaaggacaggaagaagttctgcaagaatgctgaggagttcaccaagaagtatggagagaagaggcctgtggactag

SEQ ID NO: 90372 - DNA, 639 bp, Artificial Sequence
  derived and/or modified sequence
atgcaggtggccgccggcacccggggcgacacccggctgcaggaggttgctctccttccacaactgttcgatctcctggttctcggccaacggagggccaggctgttaagacaggttccctcagccctggccggcaaggacctggctcagttacaagctggtgcaaccctcgccggctacaggcgcgcgcacggcccggaagaactggaagagataagaaaatgcggcatgaagaattttcgaaatatccaggtcgatgaggccaacctccttacttggcagggcctcatcgtccctgataatcccccatatgataaaggggcctttcgaattgagattaacttccccgccgaatatccgtttaaacctccgaagatcactttcaaaacgaagatttaccacccaaatattgacgagaagggccaggtgtgccttccagtcattagcgccgagaattggaagccagctacgaagactgaccaggtgatccagtcccttatcgctctggtaaacgatccccagcccgaacatccgctgcgcgccgacctcgccgaggaatactcaaaggatcgcaagaaattctgtaaaaacgccgaggagttcaccaagaagtatggcgaaaagcgcccagtggattag

SEQ ID NO: 90373 - DNA, 639 bp, Artificial Sequence
  derived and/or modified sequence
atgcaggtggctgccggaactcggggagatacgcggttgcaggaggtcgccctgctgcctcagctgttcgatctcctggttctgggccaaaggagggccagactcctccgccaggtccccagcgcgctggcgggtaaagatctggctcaattacaggctggagctaccctcgccggatatagacgcgctcacggcccagaggaattggaggagatcaggaaatgtggaatgaaaaacttccgaaacattcaggtggacgaagccaatctcctgacatggcagggtctcatagtgccagataacccgccatatgacaagggagcattcaggatcgagattaacttccctgccgagtatccatttaagcctcctaaaatcaccttcaaaactaaaatctatcaccctaacatagatgagaaaggccaggtatgtttgcccgtgatttcggctgaaaattggaagccagctactaaaactgaccaggtcattcagtctctgatcgctcttgttaatgatccccagcccgaacatccgctacgagctgaccttgccgaggagtacagcaaggacaggaaaaaattctgtaagaatgccgaggaatttaccaagaaatatggggagaagagacccgtggactag

SEQ ID NO: 90374 - DNA, 1225 bp, Artificial Sequence
  derived and/or modified sequence
agtatgcaggtcgctgcagggacccgaggcgacacgcgcctgcaggaggtggcactcctgccgcagctcttcgatctgcttgtccttggccagcggcgcgctcgcctgctccgacaggtcccgagcgcgctggcgggcaaagacttggcacagctccaggccggcgcaactctcgccgggtataggcgcgctcacggcccggaggagcttgaagaaatccgcaaatgtgggatgaaaaacttccgtaacatccaggttgatgaagctaatttattgacttggcaagggcttattgttcctgacaaccctccatatgataagggagccttcagaatcgaaatcaactttccagcagagtacccattcaaaccaccgaagatcacatttaaaacaaagatctatcacccaaacatcgacgaaaaggggcaggtctgtctgccagtaattagtgccgaaaactggaagccagcaaccaaaaccgaccaagtaatccagtccctcatagcactggtgaatgacccccagcctgagcacccgcttcgggctgacctagctgaagaatactctaaggaccgtaaaaaattctgtaagaatgctgaagagtttacaaagaaatatggggaaaagcgacctgtggactaaaatctgccacgattggttccagcaagtgtgagcagagaccccgtgcagtgcattcagacaccccgcaaagcaggactctgtggaaattgacacgtgccaccgcctggcgttcgcttgtggcagttactaactttctacagttttcttaatcaaaagtggtctaggtaacctgtaaagaaaggattaaaaatttaagatgttctagttctgctctctttgttttaaaaatcactgcttcaatctacttcaaaagaatggtgtttcttttcttgtccaattttatccaaaatcttcaagttacatttaacccataaggtttaaaaaaaaggaaaaaaaacggttgtggttccctttcttccctacccttgccactcccactttctggcaccgagtttatttttcacttacttacttccccagaccccgggctcgcctccacaaaggagaaaagactgccctggcggtcctggtggcttttcttagcatgtgtggcactgttgcccagtgtgggagttggtttaaattctcctgactccagtttataacatccttttaaaaaatttaaaaacaaacagccacaccc

SEQ ID NO: 90375 - protein, 122 aa, Artificial Sequence
  derived and/or modified sequence
MAASRRLMKDNPPYDKGAFRIEINFPAEYPFKPPKITFKTKIYHPNIDEKGQVCLPVISAENWKPATKTDQVIQSLIALVNDPQPEHPLRADLAEEYSKDRKKFCKNAEEFTKKYGEKRPVD

SEQ ID NO: 90376 - DNA, 369 bp, Artificial Sequence
  derived and/or modified sequence
atggccgccagcagaagactgatgaaggacaaccccccctacgacaagggcgccttcagaatcgagatcaacttccccgccgagtaccccttcaagccccccaagatcaccttcaagaccaagatctaccaccccaacatcgacgagaagggccaggtgtgcctgcccgtgatcagcgccgagaactggaagcccgccaccaagaccgaccaggtgatccagagcctgatcgccctggtgaacgacccccagcccgagcaccccctgagagccgacctggccgaggagtacagcaaggacagaaagaagttctgcaagaacgccgaggagttcaccaagaagtacggcgagaagagacccgtggactag

SEQ ID NO: 90377 - DNA, 369 bp, Artificial Sequence
  derived and/or modified sequence
atggctgcctccaggcgcctcatgaaagataaccccccctacgataagggagcgttcaggatcgaaataaactttcctgccgaatatcctttcaaacctccaaagatcacctttaaaactaaaatctaccatccaaacattgacgagaagggacaagtctgcctgcccgtcatcagtgccgaaaactggaaacccgcgaccaaaaccgaccaggttattcagagtctgattgcccttgtaaacgacccacagcccgaacaccccctccgcgcagatcttgctgaggagtattccaaggaccggaagaaattctgcaaaaacgcagaggaattcaccaagaaatacggtgaaaagcggcccgtggactag

SEQ ID NO: 90378 - DNA, 369 bp, Artificial Sequence
  derived and/or modified sequence
atggccgccagccggcggctgatgaaggacaaccccccctatgacaagggggccttcagaattgagatcaacttccctgctgagtaccccttcaagccacccaagatcaccttcaagaccaagatctaccaccccaacattgatgagaagggccaggtgtgcctgcccgtcatctctgctgagaactggaagccagccaccaagacagaccaggtgatccagagcctgattgccctggtgaatgacccccagcctgagcaccccctgcgggctgacctggccgaggagtacagcaaggacaggaagaagttctgcaagaatgctgaggagttcaccaagaagtatggagagaagaggcctgtggactag

SEQ ID NO: 90379 - DNA, 369 bp, Artificial Sequence
  derived and/or modified sequence
atggccgccagccggcggctgatgaaggacaaccccccctacgacaagggggcctttcgtattgaaatcaacttccctgcggaataccctttcaaacctccgaaaatcactttcaaaactaagatttaccacccgaatatcgacgagaaggggcaggtttgtttgcccgtaatatccgccgaaaattggaagccagccacaaaaacagaccaagttatacagtcgttgatcgcacttgtgaatgatccccagccggaacaccctctaagggctgatttggcagaggagtacagcaaggatagaaagaaattctgcaagaatgccgaggagttcaccaagaagtatggagaaaagaggccagtcgattag

SEQ ID NO: 90380 - DNA, 369 bp, Artificial Sequence
  derived and/or modified sequence
atggcagcctcacgcagactgatgaaagataacccaccttatgataaaggggctttcagaatcgaaatcaattttccagccgaatatccatttaagcccccaaagatcacattcaagacaaagatctatcaccctaacatcgacgagaagggacaggtttgtctgccagttatatctgccgaaaactggaagccagcgacgaagacggaccaggttatccagtccctgatcgcactagttaacgacccacagcctgaacatccactgagggccgatctagcagaggaatactccaaagaccgcaagaaattctgcaaaaacgctgaggaattcacaaaaaagtacggagaaaagcgtccagtagactag

SEQ ID NO: 90381 - DNA, 1057 bp, Artificial Sequence
  derived and/or modified sequence
aatccaagatggcggccagcaggaggctgatgaaggacaaccctccatatgataagggagccttcagaatcgaaatcaactttccagcagagtacccattcaaaccaccgaagatcacatttaaaacaaagatctatcacccaaacatcgacgaaaaggggcaggtctgtctgccagtaattagtgccgaaaactggaagccagcaaccaaaaccgaccaagtaatccagtccctcatagcactggtgaatgacccccagcctgagcacccgcttcgggctgacctagctgaagaatactctaaggaccgtaaaaaattctgtaagaatgctgaagagtttacaaagaaatatggggaaaagcgacctgtggactaaaatctgccacgattggttccagcaagtgtgagcagagaccccgtgcagtgcattcagacaccccgcaaagcaggactctgtggaaattgacacgtgccaccgcctggcgttcgcttgtggcagttactaactttctacagttttcttaatcaaaagtggtctaggtaacctgtaaagaaaggattaaaaatttaagatgttctagttctgctctctttgttttaaaaatcactgcttcaatctacttcaaaagaatggtgtttcttttcttgtccaattttatccaaaatcttcaagttacatttaacccataaggtttaaaaaaaaggaaaaaaaacggttgtggttccctttcttccctacccttgccactcccactttctggcaccgagtttatttttcacttacttacttccccagaccccgggctcgcctccacaaaggagaaaagactgccctggcggtcctggtggcttttcttagcatgtgtggcactgttgcccagtgtgggagttggtttaaattctcctgactccagtttataacatccttttaaaaaatttaaaaacaaacagccacacccctcctccagtccttctcctcagttcttgtgtgaaactccagctgatgttaccacagtaacatcagttaattgggcaagccctgatgtcagtgtgtgt

SEQ ID NO: 90382 - DNA, 660 bp, Artificial Sequence
  derived and/or modified sequence
atggccgccagaagcgtggacgacatcagcatcaagctgctgcacgagaagggccccgccaccgaccacggcgtgaacgtgctgcccagcaccgtgcccggcagagaggagggcatgaccgacagaaagcactggttcagcttcggcacccagcccaacgtgcccggcctgcaggagcccctggactacagagccgccaaccaggcctggcaggccgtgctggccgaggtgcccagaggcggccccggctgcgccgccctgagagacctgggcagatgcggcggccccgacgtgagcaccagaagacagtggagacccctgcccttcagctgccccctgagccacaccacccagccccccctgggcggccactgcagaggcagcagcgccggcagattccacggcagagaccagaccagccccggcaccgtgcagcagctgcccagcgcccacgtgctgaagcccggctgcacccagcacggcgacctgagccccggccaggccagccccccccccgccgccgccctgggccccagccccaaggcctggacccacaccctgggcagaccccagctgtgggccggcctgggcagccacagattcggcgtgcccggccccggcaccagaaacaccctggccgcctgctgcgtgcaggagtag

SEQ ID NO: 90383 - DNA, 660 bp, Artificial Sequence
  derived and/or modified sequence
atggccgcccggtctgtggatgacatcagcatcaagctgctgcacgagaagggccctgccacagaccatggagtgaatgtgctgcccagcacagtgcccggccgggaggagggcatgacagacaggaagcactggttctcctttggcacccagcccaacgtgcccggcctgcaggagcccctggactacagagctgccaaccaggcctggcaggccgtgctggccgaggtgccccggggcggccctggctgtgccgccctgcgggacctgggccgctgtggcggcccagatgtgtccacccggcggcagtggaggcccctgcccttcagctgccccctgagccacaccacccagccccccctgggcggccactgccggggcagcagcgctggccgcttccacggccgggaccagaccagccctggcaccgtgcagcagctgcccagcgcccacgtgctgaagccaggctgcacccagcacggggacctgagccctggccaggccagccccccacctgctgctgccctgggccccagccccaaggcctggacccacaccctgggccggccccagctgtgggccggcctgggcagccacagatttggagtgcccggccctggcaccaggaacaccctggccgcctgctgcgtgcaggagtag

SEQ ID NO: 90384 - DNA, 660 bp, Artificial Sequence
  derived and/or modified sequence
atggccgcccggagcgtggacgacatcagcatcaagctgctgcacgaaaagggccccgccacagatcacggggtgaacgtactgccctcaactgttccgggccgggaagaaggaatgacagatagaaaacactggttctcttttggaacccaacctaatgttcccggcctacaagagcccctggactatagagcggcaaaccaagcctggcaggcggtgttagcggaggtgccacgagggggccccggatgcgcagccttgagggatctaggacgatgtgggggcccggatgtgtccacgcgccgacaatggagaccactgccattttcatgcccactttcacatacgacccagcccccgctggggggccattgtcgtgggtctagcgctggtcgttttcatggccgggaccagacctcccctggaacagtgcagcagctgccaagcgctcacgtgctaaagccgggatgcacccagcatggggacctgtcacctggccaggcttctccaccccccgcagccgctctggggccctcacccaaggcatggactcacacactagggcggccacaattgtgggcaggcctggggtctcaccgcttcggcgtacctggccccggaaccaggaataccttggcggcttgttgcgtgcaggagtag

SEQ ID NO: 90385 - DNA, 660 bp, Artificial Sequence
  derived and/or modified sequence
atggccgctagaagcgtcgacgatatttcaatcaaactgctgcatgaaaagggcccagcaactgaccacggggtcaacgtgcttccctctacagtcccagggcgagaggaagggatgaccgacagaaagcactggttctcattcgggactcagccgaatgtccccggactgcaagaaccgctggactatcgggcagctaaccaggcttggcaggcagtgctggccgaggtgcccaggggaggcccaggctgtgcagcattgcgggatctgggccgatgtggcggaccagatgtgtcaacacggaggcagtggagaccactgccattctcttgccccttgagtcacacaacccagcctcctctgggcggacactgcaggggatcctctgccggaaggttccatggccgtgaccagactagccccggtaccgttcagcagttgccttcagctcacgttctgaagcccggatgcactcagcacggagatctctcacccggtcaagcaagcccacccccagcagccgcactgggaccgtcccccaaagcttggactcacactctaggtcgccctcaattatgggcaggtctcggctcacacaggtttggcgttcccggacccggaacacgcaatacccttgctgcctgctgtgtgcaggagtag

SEQ ID NO: 90386 - protein, 357 aa, Artificial Sequence
  derived and/or modified sequence
MADDYGSESTSSMEDYVNFNFTDFYCEKNNVRQFASHFLPPLYWLVFIVGALGNSLVILVYWYCTRVKTMTDMFLLNLAIADLLFLVTLPFWAIAAADQWKFQTFMCKVVNSMYKMNFYSCVLLIMCISVDRYIAIAQAMRAHTWREKRLLYSKMVCFTIWVLAAALCIPEILYSQIKEESGIAICTMVYPSDESTKLKSAVLTLKVILGFFLPFVVMACCYTIIIHTLIQAKKSSKHKALKVTITVLTVFVLSQFPYNCILLVQTIDAYAMFISNCAVSTNIDICFQVTQTIAFFHSCLNPVLYVFVGERFRRDLVKTLKNLGCISQAQWVSFTRREGSLKLSSMLLETTSGALSL

SEQ ID NO: 90387 - DNA, 1074 bp, Artificial Sequence
  derived and/or modified sequence
atggcagacgactatggatcggaatccacctccagcatggaggattacgtgaacttcaacttcactgatttttattgtgagaaaaacaatgtgagacaatttgcctctcacttcctgcctccactctattggctcgtgtttattgtgggagcgctgggaaactctctggtgattctcgtgtattggtattgtactcgggtgaagaccatgaccgacatgtttctattgaatttggctattgctgatttgcttttcttggttaccctgcccttttgggcaatcgccgccgctgatcaatggaagttccagacctttatgtgcaaggtggtgaatagtatgtacaaaatgaacttctatagttgtgttctgcttatcatgtgcatctccgtggatcgatatattgctattgcccaggccatgagggcccatacctggcgggaaaaacggttactatactcaaaaatggtatgcttcaccatctgggtcctggcggcagccttgtgcatccctgagatcctctacagccagatcaaagaagaatctgggatcgcaatttgtacaatggtataccccagcgatgagtccaccaaacttaagtctgcggtactgacccttaaggttatcctgggattctttctgcccttcgtcgtaatggcttgttgttatacaattataattcacactcttattcaggcaaagaagagcagcaaacataaagctcttaaggtaacgattacagttctcacagtgtttgtgctgtcacagttcccatacaattgcatcctactggtccaaactatcgacgcttacgcaatgtttatttccaactgcgccgtaagcactaacatcgacatctgtttccaggtgacgcagacaattgcattctttcattcatgcctgaaccccgtcctatacgttttcgtgggtgagcgcttccggcgagacctggtgaagaccctcaaaaaccttggatgcatcagccaagctcagtgggtaagctttacccggcgtgaggggagtctgaaactgagctcaatgctgttagagaccacttccggcgctctgtctttatag

SEQ ID NO: 90388 - DNA, 1074 bp, Artificial Sequence
  derived and/or modified sequence
atggccgatgactacggttcggagtcgacatcctctatggaggactatgtgaattttaatttcaccgatttctactgcgaaaagaacaatgtcagacagttcgcctcccactttctcccccccttatactggctcgtctttatcgtgggggccctcggcaacagtcttgtgattctggtgtactggtattgtacccgcgtaaaaactatgactgatatgtttcttttaaacctggctattgccgacctcctgttcctggtgacactccctttttgggctatcgccgctgctgatcagtggaaatttcaaacgtttatgtgcaaagttgttaactccatgtacaaaatgaacttttattcttgtgtgctcctcataatgtgtatttctgttgacagatatattgctattgcccaggcgatgcgggctcacacgtggcgcgagaaaaggctgctgtactccaagatggtgtgttttaccatctgggtccttgcagcggccttgtgtatccccgaaatcctctattcacagattaaagaagaaagtggtatcgccatttgcaccatggtgtatcccagcgatgagagcaccaaactgaagtccgcggttttaactctcaaggtgattctgggtttcttcctgccattcgtcgttatggcatgctgctatacaattatcatccacacactgatccaggcaaagaaaagctcgaagcacaaagcactcaaagttactataacagtgctgacagtgttcgtgctgagtcagtttccatacaactgcatcctactcgtccaaactattgatgcctatgctatgttcatatccaattgcgccgtcagcaccaacatcgacatatgcttccaggtcacgcaaacaattgccttttttcactcctgcctgaacccagtgctatatgtgtttgtgggcgaacgatttagaagagacctggtgaaaacactaaaaaatctaggctgcatctcacaggctcagtgggtcagtttcaccagacgagagggatccctgaagcttagctctatgctgctagagacaacttctggggccctgagcctgtag

SEQ ID NO: 90389 - DNA, 1074 bp, Artificial Sequence
  derived and/or modified sequence
atggctgatgattatggcagcgagagcaccagctccatggaggactatgtgaacttcaacttcacagacttctactgtgagaagaacaacgtgcggcagtttgccagccacttcctgccccccctgtactggctggtgttcatcgtgggcgccctgggcaacagcctggtgatcctggtgtactggtactgcaccagggtgaagaccatgacagacatgttcctgctgaacctggccatcgctgacctgctcttcctggtgaccctgcccttctgggccatcgctgctgctgaccagtggaagttccagaccttcatgtgcaaggtggtgaacagcatgtacaagatgaacttctacagctgtgtgctgctgatcatgtgcatctctgtggaccgctacatcgccatcgcccaggccatgagggcccacacctggagggagaagaggctgctgtacagcaagatggtgtgcttcaccatctgggtgctggccgccgccctgtgcatccctgagatcctgtacagccagatcaaggaggagagcggcatcgccatctgcaccatggtgtaccccagtgatgagagcaccaagctgaagtctgctgtgctgaccctgaaggtgatcctgggcttcttcctgccctttgtggtgatggcctgctgctacaccatcatcatccacaccctcatccaggccaagaagagcagcaagcacaaggccctgaaggtgaccatcaccgtgctgactgtgtttgtgctgagccagttcccctacaactgcatcctgctggtgcagaccattgatgcctatgccatgttcatcagcaactgtgctgtgtccaccaacatcgacatctgcttccaggtgacccagaccatcgccttcttccacagctgcctgaaccctgtgctgtatgtgtttgtgggggagcgcttcagaagagacctggtgaagaccctgaagaacctgggctgcatcagccaggcccagtgggtgtccttcacccggcgggagggcagcctgaagctgagctccatgctgctggagaccaccagcggggccctgagcctgtag

SEQ ID NO: 90390 - DNA, 1074 bp, Artificial Sequence
  derived and/or modified sequence
atggccgacgactacggcagcgagagcaccagcagcatggaggactatgtgaattttaattttactgacttttactgcgaaaagaacaacgtcaggcaattcgcatctcacttcctgccaccactatactggctcgtgtttattgttggtgctctagggaattctttggtcatcttggtgtattggtattgtacccgggtgaagaccatgacagacatgttcctgctgaacctggcgattgccgacctgttatttttggtgacactccccttctgggccattgctgccgctgatcagtggaaattccagacattcatgtgcaaagtcgttaatagtatgtataagatgaatttttactcttgtgtgctgcttataatgtgtattagcgtcgacagatacatcgcaatcgctcaggcaatgcgagcccatacctggcgagagaaacggctgctatattctaagatggtatgttttaccatttgggttctggctgctgcattgtgtataccggaaatcctgtatagccaaataaaagaggagtctggaattgccatttgcactatggtttacccctccgacgagagcacaaaactgaagagcgccgtcctcaccctgaaggtaatcttgggattttttctccccttcgtggttatggcttgttgctataccattatcatccatactcttatacaggctaaaaagagctcaaaacacaaagccttgaaagtgaccatcactgtgctgactgtgtttgtgctcagccagttcccatataattgtattctcctggtccaaaccatagacgcatacgctatgtttatctccaactgcgctgtgagcaccaacatcgatatttgtttccaggtgacgcaaacaattgccttctttcattcatgcctgaatccagttctttacgtctttgttggcgagcggttcagaagggatttagtaaagaccctcaaaaacctggggtgtatcagccaggcccaatgggtctctttcacccgaagagaaggttccctcaagttgtctagtatgctgctagaaacaacgtctggcgcgctgtctttgtag

SEQ ID NO: 90391 - DNA, 1074 bp, Artificial Sequence
  derived and/or modified sequence
atggccgacgactacggcagcgagagcaccagcagcatggaggactacgtgaacttcaattttaccgacttttactgtgaaaaaaacaatgtgaggcaattcgccagccatttcttacccccactgtattggctcgtcttcatcgtcggtgcgctggggaactccctggtgatcctcgtctactggtattgtacgcgggtgaaaacaatgactgacatgttcctgctgaaccttgccattgcggacctgctgtttctagttaccctgcccttctgggcgatagcagccgctgatcagtggaagttccagaccttcatgtgtaaagtcgtgaattccatgtataaaatgaatttttactcctgtgtgctgttgattatgtgcatttcagtcgaccgctacatcgccatcgcccaggctatgcgggcacatacatggcgagaaaagcgtctcctgtattctaagatggtatgttttaccatttgggtcctcgcggccgcactgtgcatcccagaaattctttactctcaaattaaggaggaatccggtatcgccatctgtacaatggtctacccatcagacgaatctaccaagctgaaatccgctgtgctgacactcaaagttattctgggtttctttctaccatttgttgtgatggcgtgctgttacactatcatcatacacactctcattcaggccaagaagagtagcaaacacaaagcactgaaggtcactataacggtgttgactgtattcgtgctctcgcaattcccatataactgtatcttgttggtccaaaccatcgatgcctatgcgatgttcatcagtaactgtgctgtctccactaatatagatatttgttttcaggttacccagacaatagcttttttccattcttgcctcaatccggtgctctatgtgttcgtgggagagcgtttccggagggatctggttaagactttaaagaatctgggttgtatctctcaagcccaatgggtgtcctttaccagacgggaggggtccttgaaactctcttccatgctcctagagactacaagcggcgctttatccctgtag

SEQ ID NO: 90392 - DNA, 1074 bp, Artificial Sequence
  derived and/or modified sequence
atggctgatgactatggcagtgagtctactagcagtatggaggattatgttaattttaatttcacagatttctactgcgagaagaacaatgtgcggcaatttgcctcgcactttttgccacctctgtattggctcgtgttcatcgtgggggctttagggaattctcttgtcatcttggtgtattggtattgcacacgtgtgaaaaccatgacggacatgttcttgcttaatctggccatcgctgatctgctttttctggttaccctgcctttctgggcaatcgcagctgcagatcagtggaagtttcagacctttatgtgtaaagtcgtgaactctatgtacaaaatgaatttctattcatgcgttctgctcatcatgtgcatcagcgtggaccgctacatcgctatcgctcaggcaatgagggctcatacttggcgggaaaagagactattatatagcaaaatggtgtgtttcactatttgggtactagcagccgcactatgcattccagagatcctgtatagtcagatcaaggaggaatcagggattgccatatgtaccatggtttacccttccgatgagtccaccaaacttaagtcagcggttcttaccctcaaagtaattctgggctttttcttgccctttgttgtaatggcttgctgttatacaatcatcattcatacattgatacaggcaaagaaaagctccaagcacaaggccctcaaagtcactataactgtcctgacagttttcgtgctgagccagttcccttataattgcatcttgctggtccagaccatcgatgcttatgccatgtttattagcaactgtgcggtgtctacaaacattgacatctgcttccaggtcactcaaaccatagcgttctttcatagttgcctcaacccggtcctgtatgtattcgttggcgagcgatttaggagagatctggttaagactttaaaaaacctgggatgcatttcacaggcccagtgggtctcattcactcgccgtgaaggcagccttaaattgtcttccatgcttttggagaccacctctggggctctgtccctgtag

SEQ ID NO: 90393 - DNA, 1074 bp, Artificial Sequence
  derived and/or modified sequence
atggccgacgattatggcagcgaatcaacgtcctccatggaggattacgtaaatttcaactttacggacttttattgtgagaaaaataacgtgcgccagttcgccagccacttcttgcccccactgtactggctcgtgttcatcgtgggagcactcggtaacagcttggtcatcctggtgtactggtattgcacacgcgtcaaaacgatgacagacatgtttctcctgaatcttgcaatcgctgacctgctgtttttggtgactcttcctttttgggccattgccgctgcagatcaatggaagttccagactttcatgtgtaaggtagtgaattctatgtataagatgaatttctactcatgtgtcttgctgatcatgtgcatcagtgtcgaccgctacatcgccatagctcaggccatgagggcacatacgtggcgcgagaagagattactgtactcaaaaatggtgtgtttcacaatttgggtgctcgcggctgctttgtgtattcctgaaatactatattcacagatcaaagaggaaagtggcatcgctatctgcacaatggtttacccaagtgacgagtcgaccaagttaaagtctgccgttctgactctgaaggttatcctaggcttcttcctaccttttgtggttatggcttgctgctacaccataattatacacaccctgatccaggctaaaaaaagctctaagcacaaagctctcaaagtgaccatcacggtgctcaccgtgtttgtactttctcaattcccttacaattgtatcctcctcgttcagacaatcgacgcttacgcaatgttcatctccaactgcgccgtgtccacaaacatcgacatctgtttccaggtgacccagacaattgcattctttcactcttgcctcaatccggtactctatgtctttgtgggggagaggttcagacgcgacctcgtgaagacactgaaaaatctcggatgcattagtcaagctcagtgggtatcattcactaggagagagggatcactgaaactcagcagcatgctcctggagaccacatctggcgctctcagtctgtag

SEQ ID NO: 90394 - DNA, 1074 bp, Artificial Sequence
  derived and/or modified sequence
atggccgacgactacggcagcgagagcaccagcagcatggaggactacgtgaacttcaacttcaccgacttctactgcgagaagaacaacgtgagacagttcgccagccacttcctgccccccctgtactggctggtgttcatcgtgggcgccctgggcaacagcctggtgatcctggtgtactggtactgcaccagagtgaagaccatgaccgacatgttcctgctgaacctggccatcgccgacctgctgttcctggtgaccctgcccttctgggccatcgccgccgccgaccagtggaagttccagaccttcatgtgcaaggtggtgaacagcatgtacaagatgaacttctacagctgcgtgctgctgatcatgtgcatcagcgtggacagatacatcgccatcgcccaggccatgagagcccacacctggagagagaagagactgctgtacagcaagatggtgtgcttcaccatctgggtgctggccgccgccctgtgcatccccgagatcctgtacagccagatcaaggaggagagcggcatcgccatctgcaccatggtgtaccccagcgacgagagcaccaagctgaagagcgccgtgctgaccctgaaggtgatcctgggcttcttcctgcccttcgtggtgatggcctgctgctacaccatcatcatccacaccctgatccaggccaagaagagcagcaagcacaaggccctgaaggtgaccatcaccgtgctgaccgtgttcgtgctgagccagttcccctacaactgcatcctgctggtgcagaccatcgacgcctacgccatgttcatcagcaactgcgccgtgagcaccaacatcgacatctgcttccaggtgacccagaccatcgccttcttccacagctgcctgaaccccgtgctgtacgtgttcgtgggcgagagattcagaagagacctggtgaagaccctgaagaacctgggctgcatcagccaggcccagtgggtgagcttcaccagaagagagggcagcctgaagctgagcagcatgctgctggagaccaccagcggcgccctgagcctgtag

SEQ ID NO: 90395 - protein, 441 aa, Artificial Sequence
  derived and/or modified sequence
MEIRLDTLSASLGRSSTLNNCNLEDKLAWYEGEAYMWHHWKPFPENPLWTCLDFQIAQVGPWDHCSSCIRHTRLKSSCSDMDLLHSWRSSSFGNFDRFRNNSLSKPDDSTEAHEGDPTNGSGEQSKTSNNGGGLGKKMRAISWTMKKKVGKKYIKALSEEKDEEDGENAHPYRNSDPVIGTHTEKVSLKASDSMDSLYSGQSSSSGITSCSDGTSNRDSFRLDDDGPYSGPFCGRARVHTDFTPSPYDTDSLKIKKGDIIDIICKTPMGMWTGMLNNKVGNFKFIYVDVISEEEAAPKKIKANRRSNSKKSKTLQEFLERIHLQEYTSTLLLNGYETLEDLKDIKESHLIELNIENPDDRRRLLSAAENFLEEEIIQEQENEPEPLSLSSDISLNKSQLDDCPRDSGCYISSGNSDNGKEDLESENLSDMVHKIIITEPSD

SEQ ID NO: 90396 - DNA, 1326 bp, Artificial Sequence
  derived and/or modified sequence
atggaaatccggctagacacactcagtgccagtttgggccgcagctctacgcttaacaactgcaaccttgaagataagctagcctggtatgagggtgaggcttacatgtggcatcactggaaaccctttcccgagaacccgctctggacctgcttagatttccagatcgcacaagtcggtccctgggatcattgctccagctgcatcagacacaccagattgaaaagttcttgctctgatatggatctcctgcattcctggaggagttcttcttttgggaactttgaccgctttagaaataactctctgagcaagcctgacgattcgacggaggctcacgaaggcgacccgacaaatggatccggggagcaatccaaaacaagtaacaatggtggaggcctaggcaagaagatgcgggccatttcatggacaatgaaaaaaaaagtgggaaagaagtatatcaaggcattgtccgaggagaaggacgaggaagacggtgagaacgctcacccttatagaaacagtgacccagtcatcgggacccacactgagaaggtttcactgaaggctagtgactccatggatagcctgtactcaggccagtcctcctcctccggtatcacctcatgttccgacggtacgagcaatcgcgattccttccgcttggatgatgacggtccctactcaggtcctttttgtggcagggccagagtgcatacggactttacgccatctccttacgacactgacagtttgaaaataaaaaagggtgatattattgatattatttgtaaaacgccaatgggcatgtggacaggtatgctcaacaataaagtgggcaattttaaatttatctatgtggatgtcatttccgaggaagaggcagccccgaagaagataaaagccaatagaaggtccaatagtaagaagagcaaaactcttcaggagttcctggaacggatccatctgcaggagtatacttcaaccctcttgcttaatggatacgagactcttgaggaccttaaggacataaaggaatctcatctaatcgagctgaatatcgagaatcctgatgaccggcggagattgctctctgccgcggaaaacttcctagaagaggagatcattcaggaacaggaaaacgagcctgagcctctctcactctccagtgacattagtttgaacaagagccagctggacgactgccctagggactcagggtgttacatctcctccgggaattcagataacggcaaggaggacctagaatccgagaacctgtctgacatggtccataagatcattattacagaacccagcgattag

SEQ ID NO: 90397 - DNA, 1326 bp, Artificial Sequence
  derived and/or modified sequence
atggagatccggctggacaccctgagcgccagcctgggccgcagcagcaccctgaacaactgcaacctggaggacaagctggcctggtatgaaggagaggcctacatgtggcaccactggaagcccttccctgagaaccccctgtggacctgcctggacttccagatcgcccaggtgggcccctgggaccactgcagcagctgcatccgccacacccggctgaagagcagctgcagcgacatggacctgctgcacagctggaggagcagcagctttggaaactttgaccgcttcaggaacaacagcctgagcaagccagatgacagcacagaggcccatgaaggagaccccaccaatggaagtggagagcagagcaagaccagcaacaacggcggcggcctgggcaagaagatgagggccatctcctggaccatgaagaagaaggtgggcaagaagtacatcaaggccctgtctgaggagaaggatgaggaggatggagaaaatgcccacccctacagaaacagcgaccctgtgattggcacccacacagagaaggtgtccctgaaggccagtgacagcatggacagcctgtacagcggccagagcagcagcagcggcatcaccagctgcagtgatggcaccagcaacagagacagcttccggctggatgatgatggcccctacagcggccccttctgtggccgggcccgggtgcacacagacttcacccccagcccctatgacacagacagcctgaagatcaagaagggggacatcatcgacatcatctgcaagacccccatgggcatgtggacaggcatgctgaacaacaaggtgggcaacttcaagttcatctacgtggatgtgatcagcgaggaggaggccgcccccaagaagatcaaggccaacagaagaagcaacagcaagaagagcaagaccctgcaggagttcctggagcgcatccacctgcaggagtacaccagcaccctgctgctgaatggctatgagaccctggaggacctgaaggacatcaaggagagccacctgattgagctgaacattgaaaatccagatgacagaagaaggctgctgtctgctgctgagaacttcctggaggaggagatcatccaggagcaggagaatgaacctgagcccctgagcctgagcagtgacatcagcctgaacaagagccagctggatgactgcccccgggacagcggctgctacatcagcagcggcaacagcgacaatggcaaggaggacctggagagcgagaacctgagtgacatggtgcacaagatcatcatcacagagcccagcgactag

SEQ ID NO: 90398 - DNA, 1326 bp, Artificial Sequence
  derived and/or modified sequence
atggagatccggctggacaccctgagcgccagcctgggccggagcagtaccctgaataattgtaatctagaggataaactggcatggtatgaaggcgaggcctatatgtggcaccactggaagccttttcctgagaaccctttatggacctgtctggatttccagatcgcgcaggtgggtccctgggatcattgctcttcttgcatcaggcatacccggctgaagtcatcctgttcagatatggatttgctgcatagttggcggtcgtcatctttcgggaatttcgatcgctttcgcaataacagcctgtccaaacccgacgacagtacagaagcacatgaaggggaccctaccaacgggagcggcgaacaaagcaagacaagtaataacgggggcgggttagggaagaaaatgagggcaattagttggaccatgaaaaagaaggtggggaaaaagtacattaaggctctttctgaggaaaaagacgaggaggacggcgagaacgcccacccataccgcaactccgaccccgtcatcggcacacacaccgaaaaggtctctctgaaggcttctgatagcatggactcactgtattcaggtcagagcagctcctccggaataaccagctgttctgacggcacctccaaccgggattcattccgcctcgacgacgacggtccgtattcagggcccttttgcggacgtgcccgggtgcacactgacttcactccatcaccctatgatacagatagcctcaaaatcaaaaaaggggacatcattgacattatatgcaaaacccccatgggaatgtggacagggatgctgaacaataaagtcggcaactttaaattcatatatgtggatgtcattagcgaggaggaagctgctccaaagaaaatcaaggctaaccgccgaagcaattctaaaaagtctaaaacacttcaggagttcctggagcggattcacttacaggagtatactagtactctgctgttgaatggatatgaaaccctggaggatctgaaggacatcaaggaatctcacctcatcgagcttaacatcgaaaaccccgacgatagacgtagattactctccgcagccgagaattttctggaggaggaaattatccaggaacaggagaatgagcccgaacctctgtctctgagtagcgatatttctctgaacaagtcccaattagacgactgcccacgcgactcaggctgctacatttcctcaggaaactcagataatggaaaagaagacctggaatctgaaaatttgtcagacatggtgcacaagatcatcataaccgagccaagcgattag

SEQ ID NO: 90399 - DNA, 1326 bp, Artificial Sequence
  derived and/or modified sequence
atggagatacgcctggacacactgagcgcctcattaggaaggagctctaccctgaataattgcaatctggaagataaattggcgtggtacgagggggaggcatatatgtggcatcactggaaaccatttccagagaaccccctttggacatgtctggattttcagattgcccaggtgggcccatgggaccactgctctagctgtatccggcacactcgacttaagagctcttgtagcgacatggatctccttcacagctggagatcatcatcctttgggaactttgatcggttcagaaataattctctatccaaacctgatgactctacggaagcccatgagggagacccaacaaatggaagtggagagcagagtaagacatccaacaacggcggtggtctgggcaaaaagatgagggctatctcatggactatgaaaaaaaaggtgggcaaaaaatatattaaggctctgtccgaagaaaaagacgaagaagacggggaaaacgcccatccatatagaaattcagatcccgtcatcgggactcacacagagaaagtgtcactgaaggcttctgacagcatggacagcctttattccggccagagttcttcttccggcatcactagctgctcagacggtacgtccaatcgcgactcattccgccttgacgacgacggtccgtattctgggcctttctgtgggagagctcgcgtgcatacagactttactcctagcccctacgacacagattcactcaagataaagaaaggggacattatagacattatttgcaaaactcccatgggcatgtggaccgggatgctaaacaataaagtgggcaactttaaatttatatatgtagatgtcatcagtgaggaggaggcagcccctaagaaaatcaaagctaacagaaggagtaattcaaagaagtccaaaaccctgcaggaattcctggagcggattcatttgcaggagtacacgagcacattattactgaatggttacgaaaccctcgaagatctgaaggacataaaagagtcccatttgattgagttaaatattgagaacccggatgaccggcgtagattgctgtctgccgcagaaaatttcctggaagaggagatcattcaggagcaggaaaatgagcccgagccactctccctgagttcggatataagcctcaataaatcccagctggacgactgtccgcgagatagcggatgttacatcagtagtgggaactccgacaacggtaaggaggatttggagtccgaaaacctgtctgacatggtccataagataataataacagaaccctccgactag

SEQ ID NO: 90400 - DNA, 2185 bp, Artificial Sequence
  derived and/or modified sequence
ggaagctcagcagtgtccactgtcgccattccttggccatagaaaacaatgtatttgaattttgatgtaagcataacaaattgaagatgaagatgacacgttgatttcttgtttgaaattaaccaagtcccgagaaaagaaagtgaatagtgttagcacgaggaggaaggaagaaatggagattagattggatactctttctgcatcactgggtagatccagcactttaaataactgcaacttggaagataaattagcttggtatgaaggtgaagcttacatgtggcatcactggaagccttttcctgaaaaccctctctggacatgtcttgatttccaaatagcacaagttggaccctgggaccactgctcctcttgtattcgccacacacgtctcaagtcttcctgctcagatatggatctcctacattcatggcgaagcagcagttttgggaatttcgatcgttttcggaataattctttatcaaaaccagatgattcaactgaggcacatgaaggagatcccacaaatggaagtggagaacaaagtaaaacttcaaataatggaggcggtttgggtaaaaaaatgagagctatttcatggacaatgaagaaaaaagtgggtaaaaagtacatcaaagccctttctgaggaaaaggatgaggaagatggagagaatgcccacccatatagaaacagtgaccctgtgattgggacccacacagagaaggtgtccctcaaagccagtgactccatggatagtctctacagtggacagagctcatcaagtggcataacaagctgttcagatggtacaagtaaccgggacagctttcgactggatgacgatggcccctattcaggaccattctgtggccgtgccagagtgcatacggatttcacgccaagtccctatgacactgactccctcaaaatcaagaaaggagacatcatagacattatttgcaaaacaccaatggggatgtggacaggaatgttgaacaataaagtgggaaacttcaaattcatttatgtggatgtcatctcagaagaggaagcagcccccaagaaaataaaggcaaaccgaaggagtaacagcaaaaaatccaagactctgcaggagttcctagagaggattcatctgcaggaatacacctcaacacttttgctcaatggttatgagactctagaagatttaaaagatataaaagagagtcacctcattgaattaaatattgaaaacccagatgacagaagaaggttactatcagctgctgaaaacttccttgaagaagaaattattcaagagcaagaaaatgaacctgagcccctatccttgagctcagacatctccttaaataagtcacagttagatgactgcccaagggactctggttgctatatctcatcaggaaattcagataatggcaaagaggatctggagtctgaaaatctgtctgacatggtacataagattattatcacagagccaagtgactgaacacgcattcccaactatatatctacagatgcattccattttaactcttcttgagctaaaacgtcaaataggagaggaagataagataaatatttgtaaataaaacctaaagtttaaatgttttaatctgaataattgtacataaaattttgtatctctaacattccaaattactgtcaataaaatatatatttattattttaaatgctatgtgttaatatttcacttgcttgtattagaaaggcaaaatgtaagactttggtatgtgtgacatatgctttatttggctttattttacaagtacagtatctgcaaaaaacaaagtaaccttttttcatacctgccagttttgaatttatatatgttattgaacaaatagtaatagaggattcgctgttgaaacaagttgtccaagcaatgttatattcatttttatacttattgggaaagtgtgagttaatattggacacattttatcctgatccacagtggagttttagtaattatattttgttgatttcttcattttgttttctggtataaaagtagagataatgtgtagtcacttctgatttagtgaaaccaattgtaataattgtggaaatgttttgtctttaagtgtaaatattttaaaatttgacataccctaatgttaataataaaaagaactatttgcatattgca

SEQ ID NO: 90401 - DNA, 1326 bp, Artificial Sequence
  derived and/or modified sequence
atggagatcagactggacaccctgagcgccagcctgggcagaagcagcaccctgaacaactgcaacctggaggacaagctggcctggtacgagggcgaggcctacatgtggcaccactggaagcccttccccgagaaccccctgtggacctgcctggacttccagatcgcccaggtgggcccctgggaccactgcagcagctgcatcagacacaccagactgaagagcagctgcagcgacatggacctgctgcacagctggagaagcagcagcttcggcaacttcgacagattcagaaacaacagcctgagcaagcccgacgacagcaccgaggcccacgagggcgaccccaccaacggcagcggcgagcagagcaagaccagcaacaacggcggcggcctgggcaagaagatgagagccatcagctggaccatgaagaagaaggtgggcaagaagtacatcaaggccctgagcgaggagaaggacgaggaggacggcgagaacgcccacccctacagaaacagcgaccccgtgatcggcacccacaccgagaaggtgagcctgaaggccagcgacagcatggacagcctgtacagcggccagagcagcagcagcggcatcaccagctgcagcgacggcaccagcaacagagacagcttcagactggacgacgacggcccctacagcggccccttctgcggcagagccagagtgcacaccgacttcacccccagcccctacgacaccgacagcctgaagatcaagaagggcgacatcatcgacatcatctgcaagacccccatgggcatgtggaccggcatgctgaacaacaaggtgggcaacttcaagttcatctacgtggacgtgatcagcgaggaggaggccgcccccaagaagatcaaggccaacagaagaagcaacagcaagaagagcaagaccctgcaggagttcctggagagaatccacctgcaggagtacaccagcaccctgctgctgaacggctacgagaccctggaggacctgaaggacatcaaggagagccacctgatcgagctgaacatcgagaaccccgacgacagaagaagactgctgagcgccgccgagaacttcctggaggaggagatcatccaggagcaggagaacgagcccgagcccctgagcctgagcagcgacatcagcctgaacaagagccagctggacgactgccccagagacagcggctgctacatcagcagcggcaacagcgacaacggcaaggaggacctggagagcgagaacctgagcgacatggtgcacaagatcatcatcaccgagcccagcgactag

SEQ ID NO: 90402 - protein, 640 aa, Artificial Sequence
  derived and/or modified sequence
MPCGEDWLSHPLGIVQGFFAQNGVNPDWEKKVIEYFKEKLKENNAPKWVPSLNEVPLHYLKPNSFVKFRCMIQDMFDPEFYMGVYETVNQNTKAHVLHFGKYRDVAECGPQQELDLNSPRNTTLERQTFYCVPVPGESTWVKEAYVNANQARVSPSTSYTPSRHKRSYEDDDDMDLQPNKQKDQHAGARQAGSVGGLQWCGEPKRLETEASTGQQLNSLNLSSPFDLNFPLPGEKGPACLVKVYEDWDCFKVNDILELYGILSVDPVLSILNNDERDASALLDPMECTDTAEEQRVHSPPASLVPRIHVILAQKLQHINPLLPACLNKEESKTFVSSFMSELSPVRAELLGFLTHALLGDSLAAEYLILHLISTVYTRRDVLPLGKFTVNLSGCPRNSTFTEHLYRIIQHLVPASFRLQMTIENMNHLKFIPHKDYTANRLVSGLLQLPSNTSLVIDETLLEQGQLDTPGVHNVTALSNLITWQKVDYDFSYHQMEFPCNINVFITSEGRSLLPADCQIHLQPQLIPPNMEEYMNSLLSAVLPSVLNKFRIYLTLLRFLEYSISDEITKAVEDDFVEMRKNDPQSITADDLHQLLVVARCLSLSAGQTTLSRERWLRAKQLESLRRTRLQQQKCVNGNEL

SEQ ID NO: 90403 - DNA, 1923 bp, Artificial Sequence
  derived and/or modified sequence
atgccctgcggggaggattggctgtcacaccccctcggcatcgtgcaagggttcttcgcccagaacggcgtgaaccccgactgggagaaaaaagtaattgaatatttcaaggagaaacttaaggagaataatgcccccaaatgggtgcctagtttgaatgaggtgccacttcattacctgaagcctaactctttcgtcaagtttaggtgtatgattcaggatatgttcgaccccgagttctacatgggcgtgtacgagactgttaatcagaacactaaagcccatgtcctgcacttcggcaaatatcgagacgtggctgagtgcgggccgcagcaggaactagacctgaattccccgagaaacacaacacttgaacggcagactttttactgtgtgcccgtgccgggggagagcacttgggtgaaagaggcatatgtgaacgctaaccaggcacgggtgagtcctagcaccagttataccccgtctcgtcacaaaagatcttatgaagatgatgacgatatggacctccagcctaataaacagaaggaccaacatgccggtgcccggcaggccggctcagttggaggtcttcaatggtgcggcgagcctaagcgtctggaaacagaagcttcaactggtcagcagctaaactcgctcaatttgagttctcctttcgacctcaactttcctctaccgggtgagaaagggccagcctgtttggtgaaagtgtatgaggattgggattgttttaaagtcaacgacattttggaattgtatggaatcctctctgtggaccccgtgttaagtatcctgaataatgacgagagagacgcctctgcacttcttgatccaatggaatgcacagacacggcagaagagcagagagtgcactccccccccgctagtttagtgcctcggattcatgtaatcctcgcccagaagctgcaacatatcaatcctctactgcccgcctgcctgaataaggaagagtcaaagacctttgtgtcctcattcatgtcggagctgagtcccgtgagggcggagctcctcggatttcttacccacgctctgttaggcgattctttggcagcggagtacttgattctgcacttgatatctacagtctacactaggagggacgtcctgcctctaggcaaatttaccgtgaatctatcgggttgccctaggaacagcacatttaccgagcacctgtataggatcatccagcatttagtaccagccagttttcgcctacagatgaccatcgaaaacatgaatcatctcaagttcatccctcacaaggactatacggcgaacaggctcgtgtcaggcctcctccagctgccaagtaatacaagtttagttatcgacgaaaccctcctcgagcagggccagctggatacccccggggtccataatgtaacagcacttagcaacctgattacctggcagaaggtggactacgatttctcctaccaccagatggaattcccttgtaacattaacgtgttcatcacttccgagggcaggagcctgctgcctgccgattgtcagatccatctccaaccgcaactgattcctcctaacatggaagagtacatgaattctctcctgtcagcagtactgccttctgtactgaacaaattccgcatctacctgaccttgctccgatttctagagtattcgatcagcgatgaaatcactaaggccgtcgaggatgacttcgtggaaatgcgaaaaaatgacccgcagagtataactgccgacgacttgcaccaactccttgtggtggcccggtgtctgtctttgtcagccggccaaactacactgagtagagagcgctggctccgggctaaacagctcgagagtctccgccgcactcgtttgcagcagcaaaagtgcgtaaacggaaacgaactctag

SEQ ID NO: 90404 - DNA, 1923 bp, Artificial Sequence
  derived and/or modified sequence
atgccctgtggggaggactggctgagccaccccctgggcatcgtgcagggcttctttgcccagaatggagtgaacccagactgggagaagaaggtgattgagtacttcaaggagaagctgaaggagaacaatgcccccaagtgggtgcccagcctgaatgaggtgcccctgcactacctgaagcccaacagctttgtgaagttccgctgcatgatccaggacatgtttgatcctgagttctacatgggcgtgtatgaaacagtgaaccagaacaccaaggcccacgtgctgcactttgggaagtacagagatgtggctgaatgtggcccccagcaggagctggacctgaacagccccaggaacaccaccctggagcggcagaccttctactgtgtgcctgtgcctggagagagcacctgggtgaaggaggcctacgtgaatgccaaccaggcccgggtgagccccagcaccagctacacccccagccgccacaagaggagctatgaagatgatgatgacatggacctgcagcccaacaagcagaaggaccagcacgccggggcccggcaggccggctctgtgggcggcctgcagtggtgtggggagcccaagaggctggagacagaggccagcacaggccagcagctgaacagcctgaacctgagcagcccctttgacctgaacttccccctgcccggggagaagggccctgcctgcctggtgaaggtgtatgaggactgggactgcttcaaggtgaatgacatcctggagctgtatggcatcctgtctgtggaccctgtgctgagcatcctgaacaatgatgaaagagatgccagcgccctgctggaccccatggagtgcacagacacagctgaggagcagagggtgcacagccccccagccagcctggtgccccgcatccacgtgatcctggcccagaagctgcagcacatcaaccccctgctgcctgcctgcctgaacaaggaggagagcaagacctttgtgtcctccttcatgtctgagctgagccctgtgcgggcagagctgctgggcttcctgacccacgccctgctgggggacagcctggccgctgagtacctgatcctgcacctgatcagcacagtgtacaccaggagagatgtgctgcccctgggcaagttcaccgtgaacctgagcggctgccccaggaacagcaccttcacagagcacctgtaccgcatcatccagcacctggtgcctgccagcttccggctgcagatgaccatcgagaacatgaaccacctgaagttcatcccccacaaggactacacagccaaccggctggtgtctggcctgctgcagctgcccagcaacaccagcctggtgattgatgagaccctgctggagcagggccagctggacaccccaggagtgcacaacgtgacagccctgagcaacctgatcacctggcagaaggtggactatgacttctcctaccaccagatggagttcccctgcaacatcaacgtgttcatcaccagcgagggccgcagcctgctgcctgctgactgccagatccacctgcagccccagctgatcccccccaacatggaggagtacatgaacagcctgctgtctgctgtgctgcccagcgtgctgaacaagttccgcatctacctgaccctgctgcgcttcctggagtacagcatcagtgatgagatcaccaaggctgtggaggatgactttgtggagatgaggaagaatgacccccagagcatcacagcagatgacctgcaccagctgctggtggtggcccgctgcctgagcctgtctgctggccagaccaccctgagccgggagcgctggctgcgggccaagcagctggagagcctgcggaggacccggctgcagcagcagaagtgtgtgaatggaaatgagctgtag

SEQ ID NO: 90405 - DNA, 2465 bp, Artificial Sequence
  derived and/or modified sequence
cccgccattgtgcgaagtgaaggctaggggcccgtacgcgcccgcctgactgtcgccagcagctcctcggcggccccaccgcagccgccgctccctgaggcgcgggaggcccgcgccccgcggctcgctgtgcgtgggagggcgcgagcgaacgcgggcgaggagcggccgagccgctgaagaggagctgggcgccggccgcccggccgcgctcggcccgcggatcgcctccgcccggtcttcgccggccccggcccctggcgagatgccgtgtggggaggattggctcagccacccgctgggaatcgtgcagggattcttcgcccaaaatggagttaatcctgactgggagaagaaagtaattgagtattttaaggaaaagctgaaggaaaataatgctcctaagtgggtaccatcactgaacgaagttccccttcattatttgaaacctaatagttttgtgaaatttcgttgcatgattcaggatatgtttgaccctgagttttacatgggagtttatgaaacggttaaccaaaacacaaaagcacatgttcttcattttggaaaatatagagatgtagcagagtgtgggcctcaacaagaacttgatttaaactctccacgaaataccactttggaaagacagactttctattgtgttccggtgcctggggaatctacgtgggtaaaagaagcctatgttaatgcaaaccaagctcgagtcagtccctcaacatcctacactcctagtcgccacaagaggagttatgaagatgatgacgatatggacctacagcccaataagcagaaagaccaacatgcaggtgccagacaagcagggagtgttggtggtcttcaatggtgtggagagccaaaacgtttagaaactgaagcttctactgggcaacagctgaactctctgaacttgtcttctccttttgatttgaattttccattgccaggagagaagggccctgcatgccttgtgaaggtttatgaagattgggattgtttcaaagtaaatgacattcttgagctatatggcatactgtctgtggatcctgtgctgagtatactgaataatgatgaaagggatgcctctgcactgctggatccgatggagtgcacagacacagcagaggagcagagagtacacagtcctcctgcttcattagtgccgagaattcatgtgatcttagcccagaagttgcaacacatcaacccattattgcctgcctgccttaacaaagaggagagcaaaacctttgtttcaagtttcatgtccgaattgtctccagtcagagcagaacttcttgggttccttactcatgcccttctgggggatagtttggctgctgaataccttatattacatctcatctccacagtatatacaagaagagatgtccttccactaggaaaatttacagttaacttgagtggttgcccacggaatagtaccttcacagaacacttgtatcgaattattcaacatcttgttccagcatcttttcgtctgcagatgactatagagaacatgaaccatttgaaattcattccccacaaagactacacagccaatcgcttggtcagtgggctcctccagctgcccagcaatacttcccttgtaatcgatgagactctcctggaacaggggcagctggataccccaggtgttcataatgtgacagccctgagcaacctcataacgtggcagaaggtggattatgacttcagctaccatcagatggaattcccctgcaatattaacgttttcattacttcggaggggaggtcactcctcccggcagactgccagattcacttacagccccagctaattccaccaaacatggaggagtacatgaacagccttctctcagcggtgctgccttccgtgctgaacaaattccgcatttatctaactcttttgagattcttggaatatagcatatctgatgaaataaccaaggcagttgaagatgactttgtggaaatgcggaagaacgaccctcagagcatcactgctgatgatcttcaccagctgctcgtggtggctcggtgtctgtctctcagtgctggtcagacaacgctgtcaagagaacgatggctgagagcaaagcagctagagtctttaagaagaacgaggcttcagcagcaaaaatgtgtgaatggaaatgaactttaaagatgtaatacctatgaagagtaatgggcaaactgtagccacataattgtaaaattcagatattcatttataccacattgttttataggtaatttctatcacaaaccagtgacatttcctgaaatcaagcctggtaacacctgatgtttatatgatattcagtaaggacttttaccttactgatttcatggagcttttgaagtttgttttataataattatataaattagtaatgatgtaaaaaaagtatttgatattaaaagtttaatattgataa

SEQ ID NO: 90406 - DNA, 1923 bp, Artificial Sequence
  derived and/or modified sequence
atgccctgcggcgaggactggctgagccaccccctgggcatcgtgcagggattctttgcccagaacggagtgaatccagactgggagaagaaagtgatagagtactttaaagaaaaactgaaggaaaataatgcccccaaatgggtgccttccctgaatgaagtcccgctccattatctgaaaccaaactcgtttgtgaagtttaggtgcatgattcaggatatgtttgaccccgagttctacatgggcgtgtacgagacggtaaaccagaataccaaagcccacgtgctgcattttggcaagtaccgagatgtggccgaatgcggcccgcaacaggaactggatctgaattccccgaggaataccactctggagcggcaaaccttctactgtgtccccgtgcccggggaatcaacctgggttaaagaagcttacgttaatgccaatcaagcgcgagtgtctccctctacctcctatactccctctcgtcacaaacggagttacgaagacgacgacgacatggatctgcagccgaacaaacaaaaggatcagcacgccggggccaggcaagctgggagcgtgggcgggcttcaatggtgtggcgaaccaaaacgtctagagacagaggccagtactgggcagcagctcaacagtttgaacctgtcatctccttttgacctgaattttcctctgcccggcgagaagggcccagcatgccttgtaaaggtctacgaggattgggattgcttcaaagttaacgatatcttagaactctacggcatcctctcagttgaccctgtgctcagtatactgaataatgacgaaagagatgcctcagccctgttagacccaatggaatgtacggacacagccgaagagcagcgggtgcatagtcccccagcatctcttgtgccaagaatccatgtgatcctcgcgcagaagcttcaacatatcaaccctctgctgcctgcatgtctgaataaggaggaatccaagacctttgtgtccagtttcatgagcgaactcagtcccgtgcgcgccgaacttctcggatttctaacacacgcacttctgggagacagcctggccgctgagtatctaatcctgcatctcatctctacggtctatacacgaagagacgtgcttcccctgggcaaatttaccgttaacctgagcggctgccccagaaactccaccttcaccgagcacctgtatcgaattattcagcatctggtgcccgccagtttcagactgcaaatgaccattgaaaatatgaaccatctgaagttcattcctcacaaagactatacggccaatcgattggtgagcgggttgttgcagctcccatccaatacttccttagtgatcgacgaaacactccttgaacaggggcaattagatacccccggggtccataatgtgacagccctgtctaatcttattacatggcagaaagttgattatgatttcagctatcaccaaatggaattcccatgcaacatcaatgttttcatcacctcagaagggcgaagccttctgcccgccgactgtcagatccatctgcagccacaactgatccctcccaacatggaagagtatatgaactcactcctgtcagctgttcttccctctgtcctaaataagttcagaatctacctgaccctgcttcgctttctcgagtactcgatctccgacgaaataacaaaagccgtcgaggatgattttgtggagatgcgcaaaaacgatccacaatccatcactgctgacgatctccatcagcttttggtagttgcccgctgtcttagcctgagcgctggacaaacaacactgagcagggagagatggttaagggccaagcagttagaatctctgcggagaactcgtctccagcagcagaaatgcgtaaacggaaacgaactgtag

SEQ ID NO: 90407 - DNA, 1923 bp, Artificial Sequence
  derived and/or modified sequence
atgccatgcggggaggattggttgtcccaccctctgggaattgtacaaggtttcttcgcccaaaatggcgttaaccccgactgggaaaagaaagtgatagagtactttaaggaaaagctgaaggagaacaacgcccctaaatgggtgccctcgcttaacgaagttcctctgcattacttaaaaccaaattcatttgtgaagttcagatgtatgattcaagacatgttcgatcccgaattttatatgggagtctatgaaaccgttaaccagaataccaaagcacatgtgctgcacttcggaaaataccgcgatgttgctgagtgtggtcctcaacaggagctggacctgaactctcctcggaacactactttggagcgccagaccttttactgcgtacccgttcccggagagtctacttgggtgaaggaagcttatgtgaatgcaaatcaggctagagtttcaccgtcaacctcatacacgccctccagacacaagcgctcttacgaagacgatgatgatatggatctccagccaaataagcaaaaggatcagcacgcaggtgctcgccaggccggatcagtgggtggattgcagtggtgcggagagccaaagcggctggagacagaagcctcaaccggacagcaattgaattctctcaacctatcttcacccttcgacctcaattttccgctccccggagagaaggggccagcctgccttgtaaaggtgtacgaagattgggattgcttcaaggtgaacgatattctcgaactttacgggatactgagtgtggatcccgttctctccattttgaataatgacgagagggatgcttcagctctattggacccgatggagtgtactgatacagctgaagagcaacgagtccacagcccccctgcctctctggtgccgagaattcatgttatcctcgcccaaaagctccagcatatcaatccactcctgccggcttgcctgaataaggaagagagtaaaacttttgtgtcttcgtttatgagcgaactgtcacctgtccgggcagaactcctggggttccttactcacgcattgcttggagattcactggccgctgaatatcttattctgcacttaatctcaaccgtgtacacacgcagagacgtcctgccactagggaaatttacagttaatctatccgggtgcccacggaactctacatttacagaacatctctatcgaataattcaacatctcgtgccggcatcttttcgactgcagatgactatcgagaacatgaatcatcttaagttcatcccccataaagattacacagcgaaccgactagtgagtggcctgctgcagctgcccagtaacacttccctcgttatagatgagacgcttttagaacaaggacagctggacaccccgggtgtccacaatgtgaccgcactttccaatctgatcacatggcagaaagttgactacgatttctcttaccaccagatggaatttccatgcaacatcaacgtatttataacatctgaaggccgtagcctattgcccgcagactgtcaaatccatttgcagccccagctcattccccctaatatggaagagtacatgaacagtttactctctgctgtgctgccatccgtcttgaacaagttccggatttacctgaccctgctaagatttctcgagtatagcatcagtgacgaaattactaaagccgttgaggacgacttcgtggaaatgaggaagaacgacccacaatctataactgccgacgatttgcatcagttactcgtggtcgctcgatgtctcagtctgtcagcaggccagacaactctgtccagagagagatggttgcgggctaaacagctcgagtctctccgcagaaccagactccagcagcaaaagtgcgtcaatggcaatgagctttag

SEQ ID NO: 90408 - DNA, 1923 bp, Artificial Sequence
  derived and/or modified sequence
atgccctgcggcgaggactggctgagccaccccctgggcatcgtgcagggcttcttcgcccagaacggcgtgaaccccgactgggagaagaaggtgatcgagtacttcaaggagaagctgaaggagaacaacgcccccaagtgggtgcccagcctgaacgaggtgcccctgcactacctgaagcccaacagcttcgtgaagttcagatgcatgatccaggacatgttcgaccccgagttctacatgggcgtgtacgagaccgtgaaccagaacaccaaggcccacgtgctgcacttcggcaagtacagagacgtggccgagtgcggcccccagcaggagctggacctgaacagccccagaaacaccaccctggagagacagaccttctactgcgtgcccgtgcccggcgagagcacctgggtgaaggaggcctacgtgaacgccaaccaggccagagtgagccccagcaccagctacacccccagcagacacaagagaagctacgaggacgacgacgacatggacctgcagcccaacaagcagaaggaccagcacgccggcgccagacaggccggcagcgtgggcggcctgcagtggtgcggcgagcccaagagactggagaccgaggccagcaccggccagcagctgaacagcctgaacctgagcagccccttcgacctgaacttccccctgcccggcgagaagggccccgcctgcctggtgaaggtgtacgaggactgggactgcttcaaggtgaacgacatcctggagctgtacggcatcctgagcgtggaccccgtgctgagcatcctgaacaacgacgagagagacgccagcgccctgctggaccccatggagtgcaccgacaccgccgaggagcagagagtgcacagcccccccgccagcctggtgcccagaatccacgtgatcctggcccagaagctgcagcacatcaaccccctgctgcccgcctgcctgaacaaggaggagagcaagaccttcgtgagcagcttcatgagcgagctgagccccgtgagagccgagctgctgggcttcctgacccacgccctgctgggcgacagcctggccgccgagtacctgatcctgcacctgatcagcaccgtgtacaccagaagagacgtgctgcccctgggcaagttcaccgtgaacctgagcggctgccccagaaacagcaccttcaccgagcacctgtacagaatcatccagcacctggtgcccgccagcttcagactgcagatgaccatcgagaacatgaaccacctgaagttcatcccccacaaggactacaccgccaacagactggtgagcggcctgctgcagctgcccagcaacaccagcctggtgatcgacgagaccctgctggagcagggccagctggacacccccggcgtgcacaacgtgaccgccctgagcaacctgatcacctggcagaaggtggactacgacttcagctaccaccagatggagttcccctgcaacatcaacgtgttcatcaccagcgagggcagaagcctgctgcccgccgactgccagatccacctgcagccccagctgatcccccccaacatggaggagtacatgaacagcctgctgagcgccgtgctgcccagcgtgctgaacaagttcagaatctacctgaccctgctgagattcctggagtacagcatcagcgacgagatcaccaaggccgtggaggacgacttcgtggagatgagaaagaacgacccccagagcatcaccgccgacgacctgcaccagctgctggtggtggccagatgcctgagcctgagcgccggccagaccaccctgagcagagagagatggctgagagccaagcagctggagagcctgagaagaaccagactgcagcagcagaagtgcgtgaacggcaacgagctgtag

SEQ ID NO: 90409 - protein, 1099 aa, Artificial Sequence
  derived and/or modified sequence
MSVLNKTKWKGGTLQIQLAKESFLHRLAQEREAAKAKKEESTTGNANLLEKTGGVDFHMKAVPGTEVPGHKNWVVSKFGRVLPVLHLKNQHKRKIIKYDPSKYCHNLKKIGEDFSNTIPISSLTWELEGGNDPMSKKRRGEFSDFHGPPKKIIKVQKDESSTGSLAMSTRPRRVIERPPLTQQQAAQKRTCDSITPSKSSPVPVSDTQKLKNLPFKTSGLETAKKRNSISDDDTDSEDELRMMIAKEENLQRTTQPSINESESDPFEVVRDDFKSGVHKLHSLIGLGIKNRVSCHDSDDDIMRNDREYDSGDTDEIIAMKKNVAKVKNSTEFSQMEKSTKKTSFKNRENCELSDHCIKLQKRKSNVESALSHGLKSLNRKSPSHSSSSEDADSASELADSEGGEEYNAMMKNCLRVNLTLADLEQLAGSDLKVPNEDTKSDGPETTTQCKFDRGSKSPKTPTGLRRGRQCIRPAEIVASLLEGEENTCGKQKPKENNLKPKFQAFKGVGCLYEKESMKKSLKDSVASNNKDQNSMKHEDPSIISMEDGSPYVNGSLGEVTPCQHAKKANGPNYIQPQKRQTTFESQDRKAVSPSSSEKRSKNPISRPLEGKKSLSLSAKTHNIGFDKDSCHSTTKTEASQEERSDSSGLTSLKKSPKVSSKDTREIKTDFSLSISNSSDVSAKDKHAEDNEKRLAALEARQKAKEVQKKLVHNALANLDGHPEDKPTHIIFGSDSECETEETSTQEQSHPGEEWVKESMGKTSGKLFDSSDDDESDSEDDSNRFKIKPQFEGRAGQKLMDLQSHFGTDDRFRMDSRFLETDSEEEQEEVNEKKTAEEEELAEEKKKALNVVQSVLQINLSNSTNRGSVAAKKFKDIIHYDPTKQDHATYERKRDDKPKESKAKRKKKREEAEKLPEVSKEMYYNIAMDLKEIFQTTKYTSEKEEGTPWNEDCGKEKPEEIQDPAALTSDAEQPSGFTFSFFDSDTKDIKEETYRVETVKPGKIVWQEDPRLQDSSSEEEDVTEETDHRNSSPGEASLLEKETTRFFFFSKNDERLQGSDLFWRGVGSNMSRNSWEARTTNLRMDCRKKHKDAKRKMKPK

SEQ ID NO: 90410 - protein, 539 aa, Artificial Sequence
  derived and/or modified sequence
MGNTPQKKAVFGQCRGLPCVAPLLTTVEEAPRGISARVWGHFPKWLNGSLLRIGPGKFEFGKDKYNHWFDGMALLHQFRMAKGTVTYRSKFLQSDTYKANSAKNRIVISEFGTLALPDPCKNVFERFMSRFELPGKAAAMTDNTNVNYVRYKGDYYLCTETNFMNKVDIETLEKTEKVDWSKFIAVNGATAHPHYDLDGTAYNMGNSFGPYGFSYKVIRVPPEKVDLGETIHGVQVICSIASTEKGKPSYYHSFGMTRNYIIFIEQPLKMNLWKIATSKIRGKAFSDGISWEPQCNTRFHVVEKRTGQLLPGRYYSKPFVTFHQINAFEDQGCVIIDLCCQDNGRTLEVYQLQNLRKAGEGLDQVHNSAAKSFPRRFVLPLNVSLNAPEGDNLSPLSYTSASAVKQADGTIWCSHENLHQEDLEKEGGIEFPQIYYDRFSGKKYHFFYGCGFRHLVGDSLIKVDVVWREDGFYPSEPVFVPAPGTNEEDGGVILSVVITPNQNESNFILVLDAKNFEELGRAEVPVQMPYGFHGTFIPI

SEQ ID NO: 90411 - DNA, 1620 bp, Artificial Sequence
  derived and/or modified sequence
atggggaacaccccccagaagaaggccgtatttggtcagtgcagaggtctgccatgcgtggcaccccttctgaccacggtggaggaagccccaaggggcattagcgccagagtgtgggggcattttcctaaatggctgaatgggtccttgttacgtatcgggcccggcaaattcgaattcgggaaagacaagtacaaccactggtttgatggcatggccctgctgcatcagtttcggatggcaaaaggtaccgtgacttatagaagcaaatttttacagagtgacacatataaggccaatagcgcaaaaaatagaattgttatcagcgaattcgggacactggcactgccggacccatgcaagaacgtcttcgaaaggtttatgtcgcgttttgaattacctggaaaggccgcagccatgactgacaacacaaacgtcaactacgttcgctataaaggggattattatctttgcaccgagacaaatttcatgaacaaagtcgatattgaaactctggagaagactgagaaggttgactggagcaagtttattgccgtaaatggtgctactgcccacccgcactatgaccttgacggaacggcctataacatgggtaactctttcggaccttatggcttttcctataaggtgattagagtccctccagaaaaggtcgatctgggtgagaccatccatggcgtgcaggtgatctgctctatagccagcacggaaaaaggtaaacccagctattaccactcctttggtatgaccagaaactatatcatattcatcgagcagccacttaagatgaacctttggaagatcgctacaagcaaaatcaggggcaaggccttttcagacggaatttcatgggagccccagtgtaatacgcgtttccacgtcgtggagaagaggacaggccagctgctgcctggaaggtattatagcaagccttttgtaacgtttcaccagatcaatgcgttcgaggaccagggatgtgtgatcattgatctgtgttgtcaggataatggtagaaccctcgaggtctatcaactgcagaatctcagaaaggcaggtgagggtctcgaccaggtgcacaacagtgcagctaagtccttcccgagacgattcgtgctccctttaaacgtctcactcaacgcgcccgagggggacaatctgtctccattgtcgtacactagtgccagcgcagttaaacaggcagatggcactatatggtgtagtcatgaaaacctgcaccaggaagacctagagaaggagggtggtattgaattcccacaaatatactacgacagattctctggaaagaaataccacttcttctatggctgtggcttcaggcacttggtcggagactcactcatcaaggtagatgtcgtctggagagaggacgggttctacccgtcggagccagtgtttgtacccgcgcccggtaccaatgaggaagatggcggagtgatcttgtctgtggttatcacccctaaccagaacgagagcaacttcatactcgtgttggatgcaaaaaatttcgaagagttaggccgtgccgaggtgcctgtccaaatgccctatggattccacggtacattcattccaatctag

SEQ ID NO: 90412 - DNA, 1620 bp, Artificial Sequence
  derived and/or modified sequence
atgggcaacaccccccagaagaaggctgtgtttggccagtgccggggcctgccctgtgtggcccccctgctgaccaccgtggaggaggccccccggggcatcagcgcccgggtgtggggccacttccccaagtggctgaatggcagcctgctgagaattggccctgggaagtttgaatttgggaaggacaagtacaaccactggtttgatggcatggccctgctgcaccagttcaggatggccaagggcaccgtgacctaccgcagcaagttcctgcagagcgacacctacaaggccaacagcgccaagaaccgcatcgtcatcagcgagtttggcaccctggccctgcctgacccctgcaagaatgtgtttgagcgcttcatgagcagatttgagctgcccgggaaggccgccgccatgacagacaacaccaacgtgaactacgtgcgctacaagggggactactacctgtgcacagagaccaacttcatgaacaaggtggacatcgagaccctggagaagacagagaaggtggactggagcaagttcatcgctgtgaatggagccacagcccacccccactatgacctggatggaacagcctacaacatgggcaacagctttggcccctacggcttctcctacaaggtgatccgggtgcccccagagaaggtggacctgggggagaccatccacggcgtgcaggtgatctgcagcatcgccagcacagagaagggcaagcccagctactaccacagctttggcatgaccaggaactacatcatcttcatcgagcagcccctgaagatgaacctgtggaagatcgccaccagcaagatccggggcaaggccttcagtgatggcatctcctgggagccccagtgcaacacccgcttccacgtggtggagaagaggacaggccagctgctgcccggccgctactacagcaagccctttgtgaccttccaccagatcaatgcctttgaggaccagggctgtgtgatcatcgacctgtgctgccaggacaatggaagaaccctggaggtgtaccagctgcagaacctgaggaaggccggggagggcctggaccaggtgcacaacagcgctgccaagagcttccccaggagatttgtgctgcccctgaatgtgtccctgaatgcccctgagggggacaacctgagccccctgagctacaccagcgccagcgctgtgaagcaggctgatggcaccatctggtgcagccatgagaacctgcaccaggaggacctggagaaggagggcggcatcgagttcccccagatctactatgaccgcttcagcggcaagaagtaccacttcttctacggctgcggcttccgccacctggtgggggacagcctcatcaaggtggatgtggtgtggagagaagatggcttctaccccagcgagcctgtgtttgtgcctgcccctggcaccaatgaggaggatggaggagtcatcctgtctgtggtgatcacccccaaccagaatgaaagcaacttcatcctggtgctggatgccaagaactttgaggagctgggccgggcagaggtgcctgtgcagatgccctacggcttccacggcaccttcatccccatctag

SEQ ID NO: 90413 - DNA, 1620 bp, Artificial Sequence
  derived and/or modified sequence
atgggcaacaccccccagaagaaggccgtgttcggccagtgccggggcctgccttgcgtggcacccttgctgaccacagtggaggaggccccccgcggaatctccgcaagagtgtggggccatttccccaaatggctgaatggctctctcctcaggatcggccccggaaagttcgaatttggcaaggataaatataatcactggtttgatggaatggcattacttcatcagttcaggatggccaagggcaccgtgacctataggtccaaatttctacagagcgatacttataaggcaaatagtgccaaaaaccgtattgttatcagtgaattcgggaccctcgcacttcctgatccgtgtaaaaacgtgttcgagcgatttatgtctagatttgagctgccgggcaaggcggcggccatgacagacaacactaacgtgaattacgtgcgatacaagggggattactacctgtgcaccgaaactaacttcatgaataaagtggacatcgagacgctggagaagaccgagaaggtggactggtccaagttcatcgcagtcaatggggccacagctcacccccattatgatcttgacgggacggcatacaacatgggaaactcttttggaccgtacggtttctcatataaggttatacgagtgcctcctgagaaagtggatctgggagaaactattcatggcgtgcaggtgatctgcagcattgcatcaacagaaaaggggaaacccagctattatcactcatttgggatgacccggaattacattattttcatagaacaacccctcaagatgaacctgtggaagattgccactagcaaaatccggggcaaggcttttagcgacggcatatcctgggagccccagtgcaacacacggttccacgtagtcgagaagcgcacaggccaactcttgccgggcaggtactacagcaaacccttcgtaactttccatcaaatcaacgcctttgaggaccaagggtgcgtgatcatcgacctgtgctgtcaggataacggcaggactctggaggtttaccagcttcagaacctgcgaaaggcaggcgaaggcctggatcaggtgcataactctgccgcaaagtccttccctagacggttcgtcctcccccttaacgtatctttgaacgcccccgagggagacaacctatcccctttgtcttataccagcgcgtcagcagttaagcaggccgacgggaccatttggtgttcacatgaaaatttacaccaagaggacctggaaaaggaaggaggcatcgaatttcctcagatatactatgatcgcttctccggaaaaaagtaccacttcttctacggctgcggttttcggcacttagtgggtgactctctaatcaaggtcgatgtcgtctggagggaagacgggttttacccttctgaaccggtgttcgtgccagctccggggactaatgaagaggacggcggtgttatcttatccgtggtcattacaccaaaccagaatgagagtaatttcatactcgttctggatgccaagaatttcgaagaactaggccgagcggaagtacctgtgcagatgccgtatggattccatgggacctttatcccgatttag

SEQ ID NO: 90414 - DNA, 1620 bp, Artificial Sequence
  derived and/or modified sequence
atggggaatacaccacaaaaaaaagcagtatttggacagtgcagaggcctcccatgtgtggcacccttactcactaccgtcgaagaggcaccccgtggaatttcagccagagtttggggtcacttcccgaagtggctcaacggctcgctgctccggatcggccctggaaagtttgaattcggcaaagataagtacaaccactggttcgatgggatggctctgctacatcaattcaggatggcaaagggcaccgtcacatatagaagcaagtttctccaaagcgatacatataaagcaaatagtgctaaaaatcgaatcgtcatctcagaattcggcacccttgcgttgccagatccctgcaagaatgtgttcgagagatttatgagcaggtttgaactcccaggaaaagctgccgcaatgactgacaacacaaatgttaactatgttagatacaagggcgattattatctgtgcacagaaacaaacttcatgaacaaggtggatatcgaaacgttggaaaagacggagaaagttgactggtcgaaattcatcgccgtaaacggcgcaacagcacacccccactacgatctggatgggaccgcttacaacatggggaatagcttcggaccctacggatttagttacaaggttatacgggtgcccccagagaaagttgacttgggagaaacaatacacggcgtgcaggttatatgcagcatagcctccaccgagaaaggaaaaccctcttattatcatagctttgggatgaccaggaattacattatatttatcgagcaacccctgaagatgaatctgtggaagattgcgaccagcaaaatacgagggaaagctttcagcgatggtatttcttgggagccgcaatgcaatacgagattccacgtagttgaaaaaaggaccgggcagcttctgcccggacggtactattctaaaccgtttgtgacctttcatcagattaatgccttcgaagatcagggatgtgtaatcattgacttgtgttgccaggacaatgggcgtacattagaagtatatcagctgcagaaccttaggaaggcaggcgaaggcctagatcaggtacataactccgcagcgaagagcttcccccgaaggtttgtgcttccacttaatgtttcccttaacgcgcctgaaggagacaaccttagcccacttagctatacatcggcatctgcggtcaagcaagccgacgggacgatctggtgtagtcacgaaaatttgcaccaagaagatttggagaaggagggcggtatcgaatttccccaaatctattatgacaggttctctgggaaaaagtaccattttttctacggctgtggcttcaggcacctggtgggggacagtttgatcaaggtggatgtggtttggcgggaagacggattctacccttcggagcctgtcttcgtgccagctccgggtactaatgaagaggatgggggtgtgatcctttctgttgttattacacccaatcagaacgagagtaattttattttggtgctggacgctaagaacttcgaagagcttggcagggctgaagtgcccgttcagatgccgtacggctttcatggaaccttcatccccatctag

SEQ ID NO: 90415 - DNA, 1620 bp, Artificial Sequence
  derived and/or modified sequence
atgggcaacaccccccagaagaaggccgtgttcggccagtgcagaggcctgccctgcgtggcccccctgctgaccaccgtggaggaggcccccagaggcatcagcgccagagtgtggggccacttccccaagtggctgaacggcagcctgctgagaatcggccccggcaagttcgagttcggcaaggacaagtacaaccactggttcgacggcatggccctgctgcaccagttcagaatggccaagggcaccgtgacctacagaagcaagttcctgcagagcgacacctacaaggccaacagcgccaagaacagaatcgtgatcagcgagttcggcaccctggccctgcccgacccctgcaagaacgtgttcgagagattcatgagcagattcgagctgcccggcaaggccgccgccatgaccgacaacaccaacgtgaactacgtgagatacaagggcgactactacctgtgcaccgagaccaacttcatgaacaaggtggacatcgagaccctggagaagaccgagaaggtggactggagcaagttcatcgccgtgaacggcgccaccgcccacccccactacgacctggacggcaccgcctacaacatgggcaacagcttcggcccctacggcttcagctacaaggtgatcagagtgccccccgagaaggtggacctgggcgagaccatccacggcgtgcaggtgatctgcagcatcgccagcaccgagaagggcaagcccagctactaccacagcttcggcatgaccagaaactacatcatcttcatcgagcagcccctgaagatgaacctgtggaagatcgccaccagcaagatcagaggcaaggccttcagcgacggcatcagctgggagccccagtgcaacaccagattccacgtggtggagaagagaaccggccagctgctgcccggcagatactacagcaagcccttcgtgaccttccaccagatcaacgccttcgaggaccagggctgcgtgatcatcgacctgtgctgccaggacaacggcagaaccctggaggtgtaccagctgcagaacctgagaaaggccggcgagggcctggaccaggtgcacaacagcgccgccaagagcttccccagaagattcgtgctgcccctgaacgtgagcctgaacgcccccgagggcgacaacctgagccccctgagctacaccagcgccagcgccgtgaagcaggccgacggcaccatctggtgcagccacgagaacctgcaccaggaggacctggagaaggagggcggcatcgagttcccccagatctactacgacagattcagcggcaagaagtaccacttcttctacggctgcggcttcagacacctggtgggcgacagcctgatcaaggtggacgtggtgtggagagaggacggcttctaccccagcgagcccgtgttcgtgcccgcccccggcaccaacgaggaggacggcggcgtgatcctgagcgtggtgatcacccccaaccagaacgagagcaacttcatcctggtgctggacgccaagaacttcgaggagctgggcagagccgaggtgcccgtgcagatgccctacggcttccacggcaccttcatccccatctag

SEQ ID NO: 90416 - protein, 420 aa, Artificial Sequence
  derived and/or modified sequence
MCSGRFQNIQVNPDFPRGRISNSFRRTSSTENKTKTLGKLHQEPRQLQSDGKRKILLEELANSDPKLALTGVPIVQWPKRDKLKFPTRPKVRVPTIPITKPHTMKPAPRLTPVRPAAASPIVSGARRRRVRCRKCKACVQGECGVCHYCRDMKKFGGPGRMKQSCVLRQCLAPRLPHSVTCSLCGEVDQNEETQDFEKKLMECCICNEIVHPGCLQMDGEGLLNEELPNCWECPKCYQEDSSEKAQKRKMEESDEEAVQAKVLRPLRSCDEPLTPPPHSPTSMLQLIHDPVSPRGMVTRSSPGAGPSDHHSASRDERFKRRQLLRLQATERTMVREKENNPSGKKELSEVEKAKIRGSYLTVTLQRPTKELHGTSIVPKLHGQVLVVSSARLSSITLSRLAQEGPAAPGVPDPCRSHWCC

SEQ ID NO: 90417 - protein, 723 aa, Artificial Sequence
  derived and/or modified sequence
MCSGRFQNIQVNPDFPRGRISNSFRRTSSTENKTKTLGKLHQEPRQLQSDGKRKILLEELANSDPKLALTGVPIVQWPKRDKLKFPTRPKVRVPTIPITKPHTMKPAPRLTPVRPAAASPIVSGARRRRVRCRKCKACVQGECGVCHYCRDMKKFGGPGRMKQSCVLRQCLAPRLPHSVTCSLCGEVDQNEETQDFEKKLMECCICNEIVHPGCLQMDGEGLLNEELPNCWECPKCYQEDSSEKAQKRKMEESDEEAVQAKVLRPLRSCDEPLTPPPHSPTSMLQLIHDPVSPRGMVTRSSPGAGPSDHHSASRDERFKRRQLLRLQATERTMVREKENNPSGKKELSEVEKAKIRGSYLTVTLQRPTKELHGTSIVPKLQAITASSANLRHSPRVLVQHCPARTPQRGDEEGLGGEEEEEEEEEEEDDSAEEGGAARLNGRGSWAQDGDESWMQREVWMSVFRYLSRRELCECMRVCKTWYKWCCDKRLWTKIDLSRCKAIVPQALSGIIKRQPVSLDLSWTNISKKQLTWLVNRLPGLKDLLLAGCSWSAVSALSTSSCPLLRTLDLRWAVGIKDPQIRDLLTPPADKPGQDNRSKLRNMTDFRLAGLDITDATLRLIIRHMPLLSRLDLSHCSHLTDQSSNLLTAVGSSTRYSLTELNMAGCNKLTDQTLIYLRRIANVTLIDLRGCKQITRKACEHFISDLSINSLYCLSDEKLIQKIS

SEQ ID NO: 90418 - DNA, 3629 bp, Artificial Sequence
  derived and/or modified sequence
gttgcaaagcatttctgggagctgcatgtgggtgacgcagcagcattgttcgcaggcacaggaagccgcggctgagctgaagggctcgagaaggagcccagagcgctgcacgctgctccctctgggtagtctgaagggtcagagctggactgccctgccctatgtgctctgggagattccagaatattcaagtaaatccggattttcccagaggcagaatatctaactccttcaggagaacttccagtacagaaaacaaaacaaagacgctggggaaacttcaccaagagcctcggcagctccagagcgacgggaaacgaaagattttgctggaggagcttgccaacagcgatcccaagttagccctcactggagttcctatagtacagtggccaaaaagggataagcttaaattccccactcggccaaaggtgcgggttcctaccatccccattacgaagcctcacactatgaaaccagctccacggttaacacctgtgaggccagctgctgcctccccgattgtgtcaggagccagacggagacgagtgcgatgtcgaaaatgcaaagcctgtgtgcaaggagagtgtggtgtttgccactactgcagagacatgaagaagtttggggggcctggacgcatgaagcagtcctgtgtcctccgacagtgcttggcacccagactgcctcactcagtcacatgttccctctgtggagaggtggatcagaatgaagagacacaagactttgagaagaaactcatggaatgctgtatctgcaatgagattgttcatcctggctgcctccagatggacggagaggggttgcttaacgaagaattgccaaattgctgggaatgtccaaagtgctaccaggaggacagctcggagaaagcccagaagcggaaaatggaagagagtgacgaagaagctgtgcaagccaaagtcctgcggcccctgcggagctgcgatgagcctctcacgcccccgcctcattcacccacttccatgctgcagctcatccatgacccggtttccccccggggtatggtgactcggtcatcccctggggctggccccagcgaccaccacagtgccagccgcgatgagcgcttcaaacggcggcagttgctgcggctgcaggccacagagcgcaccatggtacgggaaaaggagaacaatcccagcggcaaaaaggagctgtctgaagttgagaaagccaagatccggggatcgtacctcactgtcacgctacagaggcccaccaaagagctccacgggacatccattgtgcccaagctgcaggccatcacggcctcctctgccaaccttcgccattccccccgtgtgctagtgcagcactgcccagcccgaaccccccagcgtggggatgaggaggggctggggggagaggaggaggaagaggaggaggaggaggaggaagatgacagtgcagaggaggggggtgcagccaggctgaatggccggggcagttgggctcaggatggagacgaaagctggatgcagcgggaggtctggatgtctgtcttccgctacctcagccgcagagaactttgtgaatgtatgcgagtgtgcaagacgtggtataaatggtgctgcgacaagagactttggacaaaaattgacttgagtaggtgtaaggccattgtgccccaggccctcagtggcatcatcaagaggcagccagtcagccttgacctcagttggaccaacatctctaaaaagcaactgacatggctcgtcaataggctgccaggactgaaagacctcctcctagcaggctgctcctggtctgcagtctctgccctcagcacctccagctgcccccttctcaggacccttgatcttcggtgggcagtaggaatcaaggaccctcaaattcgggacttgcttactccaccggctgataaaccaggtcaggacaatcgcagcaagctccggaacatgaccgacttccggctggcaggccttgacatcacagatgccacgcttcgcctcataattcgccacatgcccctcctgtctcgactcgacctcagtcactgcagccaccttacagatcagtcctccaatctactcactgctgtcgggtcttccactcgctactctctcacagagctcaatatggcaggttgcaataaattgacagaccagaccctgatctacctacggcgcattgccaacgtcaccttgatcgaccttcgaggatgcaagcagatcactcgaaaagcctgcgagcacttcatctcagacttgtccatcaacagcctctactgcctgtctgacgagaagctgatacagaagatcagctaagacacacccagcccagattcaacaggaaaccgatcttcccctgactccccaccgaggagagcctctcctcgaccctgcacgggctctgaggccagcgtcacactccctctctgctctcctgtcccttgagcccttcctctacaggtggggcagagagggtggtggacaccaggcttatctgcctgctcctctccctcctaaggaaaagggagtagcagattgatctgaggggaaagcacaggctgtgctgtcgaggcgcctgctcgcttactcgcctgccaggaggccgggctctcagtttggggtgtttgtgcaaccttcatctgcactgggccctgtgcccctcctccccatccatggtccccagcagtgcctggttctgagcaaactcccagggaagaaaacggccctgtctccatggccaggttcttgtggtgtccagtgcgcgtctctcctccatcacactctcccggcttgcgcaggaggggccagcagccccaggagtcccagacccgtgccgatcacactggtgctgttgagatctcccaaacctcacgtccttaactgtgctctccctcctttcctctcccttgagcttggttctgcccagcactcgtgcttgttcacataattaggtttcccaccccagcctacccgacttacttgctagtctctatgaggtccttattgcacttattggggttgaagctcttcagaggagctggaactgtctaccccagggacacacccatttcgttgctacccaagtggattctgagacaggcaccatctccttgttccccctctctcttttgcctcccactgactgcccttttccatgtgtcttcattctgcctgaagaaggctttcccaggatgcacgtcctcagagggagcagcctatctcccccaagctggaggcggcagaggactgggccaagccccaacctgcctcccagccaggctcctccaggcctctggtttagcggagccccctgagcccaggcctgtgtctagccccagtggctcactgaactttcagggcagtcagggggtcctgcttagaagccagtcaccagccctctgcctgcagccatggaagggggtgtgcacgtgcctctgtgtgtgtggctgagtgtattctgcgcgtgtgtgtggagggagggagggaggggagcatggtgtctcccgctccaccgccctttgttgagccccatcagctgcccccttttactttgcattgaacggcctgtccaaagatcctctctctagggcagcagagagctttttgcacttt

SEQ ID NO: 90419 - DNA, 1424 bp, Artificial Sequence
  derived and/or modified sequence
gttgcaaagcatttctgggagctgcatgtgggtgacgcagcagcattgttcgcaggcacaggaagccgcggctgagctgaagggctcgagaaggagcccagagcgctgcacgctgctccctctgggtagtctgaagggtcagagctggactgccctgccctatgtgctctgggagattccagaatattcaagtaaatccggattttcccagaggcagaatatctaactccttcaggagaacttccagtacagaaaacaaaacaaagacgctggggaaacttcaccaagagcctcggcagctccagagcgacgggaaacgaaagattttgctggaggagcttgccaacagcgatcccaagttagccctcactggagttcctatagtacagtggccaaaaagggataagcttaaattccccactcggccaaaggtgcgggttcctaccatccccattacgaagcctcacactatgaaaccagctccacggttaacacctgtgaggccagctgctgcctccccgattgtgtcaggagccagacggagacgagtgcgatgtcgaaaatgcaaagcctgtgtgcaaggagagtgtggtgtttgccactactgcagagacatgaagaagtttggggggcctggacgcatgaagcagtcctgtgtcctccgacagtgcttggcacccagactgcctcactcagtcacatgttccctctgtggagaggtggatcagaatgaagagacacaagactttgagaagaaactcatggaatgctgtatctgcaatgagattgttcatcctggctgcctccagatggacggagaggggttgcttaacgaagaattgccaaattgctgggaatgtccaaagtgctaccaggaggacagctcggagaaagcccagaagcggaaaatggaagagagtgacgaagaagctgtgcaagccaaagtcctgcggcccctgcggagctgcgatgagcctctcacgcccccgcctcattcacccacttccatgctgcagctcatccatgacccggtttccccccggggtatggtgactcggtcatcccctggggctggccccagcgaccaccacagtgccagccgcgatgagcgcttcaaacggcggcagttgctgcggctgcaggccacagagcgcaccatggtacgggaaaaggagaacaatcccagcggcaaaaaggagctgtctgaagttgagaaagccaagatccggggatcgtacctcactgtcacgctacagaggcccaccaaagagctccacgggacatccattgtgcccaagctccatggccaggttcttgtggtgtccagtgcgcgtctctcctccatcacactctcccggcttgcgcaggaggggccagcagccccaggagtcccagacccgtgccgatcacactggtgctgttga

SEQ ID NO: 90420 - DNA, 3651 bp, Artificial Sequence
  derived and/or modified sequence
gttgcaaagcatttctgggagctgcatgtgggtgacgcagcagcattgttcgcaggcacaggaagccgcggctgagctgaagggctcgagaaggagcccagagcgctgcacgctgctccctctgggtagtctgaagggtcagagctggactgccctgccctatgtgctctgggagattccagaatattcaagtaaatccggattttcccagaggcagaatatctaactccttcaggagaacttccagtacagaaaacaaaacaaagacgctggggaaacttcaccaagagcctcggcagctccagagcgacgggaaacgaaagattttgctggaggagcttgccaacagcgatcccaagttagccctcactggagttcctatagtacagtggccaaaaagggataagcttaaattccccactcggccaaaggtgcgggttcctaccatccccattacgaagcctcacactatgaaaccagctccacggttaacacctgtgaggccagctgctgcctccccgattgtgtcaggagccagacggagacgagtgcgatgtcgaaaatgcaaagcctgtgtgcaaggagagtgtggtgtttgccactactgcagagacatgaagaagtttggggggcctggacgcatgaagcagtcctgtgtcctccgacagtgcttggcacccagactgcctcactcagtcacatgttccctctgtggagaggtggatcagaatgaagagacacaagactttgagaagaaactcatggaatgctgtatctgcaatgagattgttcatcctggctgcctccagatggacggagaggggttgcttaacgaagaattgccaaattgctgggaatgtccaaagtgctaccaggaggacagctcggagaaagcccagaagcggaaaatggaagagagtgacgaagaagctgtgcaagccaaagtcctgcggcccctgcggagctgcgatgagcctctcacgcccccgcctcattcacccacttccatgctgcagctcatccatgacccggtttccccccggggtatggtgactcggtcatcccctggggctggccccagcgaccaccacagtgccagccgcgatgagcgcttcaaacggcggcagttgctgcggctgcaggccacagagcgcaccatggtacgggaaaaggagaacaatcccagcggcaaaaaggagctgtctgaagttgagaaagccaagatccggggatcgtacctcactgtcacgctacagaggcccaccaaagagctccacgggacatccattgtgcccaagctgcaggccatcacggcctcctctgccaaccttcgccattccccccgtgtgctagtgcagcactgcccagcccgaaccccccagcgtggggatgaggaggggctggggggagaggaggaggaagaggaggaggaggaggaggaagatgacagtgcagaggaggggggtgcagccaggctgaatggccggggcagttgggctcaggatggagacgaaagctggatgcagcgggaggtctggatgtctgtcttccgctacctcagccgcagagaactttgtgaatgtatgcgagtgtgcaagacgtggtataaatggtgctgcgacaagagactttggacaaaaattgacttgagtaggtgtaaggccattgtgccccaggccctcagtggcatcatcaagaggcagccagtcagccttgacctcagttggaccaacatctctaaaaagcaactgacatggctcgtcaataggctgccaggactgaaagacctcctcctagcaggctgctcctggtctgcagtctctgccctcagcacctccagctgcccccttctcaggacccttgatcttcggtgggcagtaggaatcaaggaccctcaaattcgggacttgcttactccaccggctgataaaccaggtcaggacaatcgcagcaagctccggaacatgaccgacttccggctggcaggccttgacatcacagatgccacgcttcgcctcataattcgccacatgcccctcctgtctcgactcgacctcagtcactgcagccaccttacagatcagtcctccaatctactcactgctgtcgggtcttccactcgctactctctcacagagctcaatatggcaggttgcaataaattgacagaccagaccctgatctacctacggcgcattgccaacgtcaccttgatcgaccttcgaggatgcaagcagatcactcgaaaagcctgcgagcacttcatctcagacttgtccatcaacagcctctactgcctgtctgacgagaagctgatacagaagatcagctaagacacacccagcccagattcaacaggaaaccgatcttcccctgactccccaccgaggagagcctctcctcgaccctgcacgggctctgaggccagcgtcacactccctctctgctctcctgtcccttgagcccttcctctacaggtggggcagagagggtggtggacaccaggcttatctgcctgctcctctccctcctaaggaaaagggagtagcagattgatctgaggggaaagcacaggctgtgctgtcgaggcgcctgctcgcttactcgcctgccaggaggccgggctctcagtttggggtgtttgtgcaaccttcatctgcactgggccctgtgcccctcctccccatccatggtccccagcagtgcctggttctgagcaaactcccagggaagaaaacggccctgtctccatggccaggttcttgtggtgtccagtgcgcgtctctcctccatcacactctcccggcttgcgcaggaggggccagcagccccaggagtcccagacccgtgccgatcacactggtgctgttgagatctcccaaacctcacgtccttaactgtgctctccctcctttcctctcccttgagcttggttctgcccagcactcgtgcttgttcacataattaggtttcccaccccagcctacccgacttacttgctagtctctatgaggtccttattgcacttattggggttgaagctcttcagaggagctggaactgtctaccccagggacacacccatttcgttgctacccaagtggattctgagacaggcaccatctccttgttccccctctctcttttgcctcccactgactgcccttttccatgtgtcttcattctgcctgaagaaggctttcccaggatgcacgtcctcagagggagcagcctatctcccccaagctggaggcggcagaggactgggccaagccccaacctgcctcccagccaggctcctccaggcctctggtttagcggagccccctgagcccaggcctgtgtctagccccagtggctcactgaactttcagggcagtcagggggtcctgcttagaagccagtcaccagccctctgcctgcagccatggaagggggtgtgcacgtgcctctgtgtgtgtggctgagtgtattctgcgcgtgtgtgtggagggagggagggaggggagcatggtgtctcccgctccaccgccctttgttgagccccatcagctgcccccttttactttgcattgaacggcctgtccaaagatcctctctctagggcagcagagagctttttgcactttaaaaaaaaaaagaaagaaagaa

SEQ ID NO: 90421 - DNA, 1263 bp, Artificial Sequence
  derived and/or modified sequence
atgtgttctggcagattccagaatatccaggtaaatccagattttcccagaggccggatttctaattccttcaggcgcaccagctcgacagaaaataaaaccaagaccctgggcaagctgcaccaggagcccagacagctgcagagcgacggcaagcgaaagattctgctggaggagctggcgaattctgatccaaagctggccctcaccggagtgccaattgtacagtggccgaagagggacaaacttaaattccctacaaggcctaaggtgcgggtaccaacaatcccaatcaccaaaccgcacactatgaagcctgcgccgagactgactcctgttaggcccgcggcagcctcccccattgtgagcggggcccggcgccggcgggtgaggtgcaggaagtgtaaagcctgcgtgcaaggggaatgcggggtatgccattactgccgcgatatgaagaagttcggcggaccaggcagaatgaaacagtcctgcgtcctgaggcagtgtctggctccaagactgccacacagtgtgacctgcagcttatgcggtgaggtggaccagaacgaagagactcaggacttcgaaaaaaagctgatggagtgctgtatttgcaatgaaatagtccaccccggatgtttgcaaatggacggagaaggattgctgaatgaggagctgcccaattgttgggagtgtccaaagtgctaccaagaggatagctcagaaaaagcccagaaacgtaaaatggaagagtccgacgaggaagccgttcaggctaaggtcctaagaccactccgatcttgcgatgaaccacttactccaccccctcattccccgacatctatgctgcaattgatccatgatcccgtgtcaccccgcgggatggtgacccgcagttccccgggggcaggaccctctgaccaccattcagccagcagagatgaaagattcaagaggcggcagctgctgcggctgcaggctaccgagcgcacaatggtgcgcgagaaggagaataacccgagcggcaaaaaggaattaagtgaagtggaaaaagccaaaatcagaggctcttaccttaccgtgactctacagcgaccgaccaaggagctccacgggacctcaatcgtgcccaaactgcatggacaggtgctcgtggtctccagtgcccgactctcttccataacactgtccagactggcccaagaaggtcctgccgctccaggcgtgcctgatccttgcagatcacactggtgttgttag

SEQ ID NO: 90422 - DNA, 2172 bp, Artificial Sequence
  derived and/or modified sequence
atgtgttctgggcggttccagaatatccaggttaatcctgactttcctaggggcagaatcagtaattcttttagacgtaccagctctacagagaacaagaccaagacacttgggaaactccaccaggagcctagacagttacagagcgatggtaaacgcaaaatcctgctggaggaactggcgaattcagaccctaagttggcactgacaggagtcccaattgtgcagtggcccaaacgcgacaagctgaaatttccaaccaggccaaaggtgagggtgccgacaatcccaattacaaaaccacacacgatgaaacccgcaccgcggcttacaccagtgagaccggctgctgctagcccaatcgtctccggtgcacgtcggcgcagggtacggtgtaggaaatgtaaggcctgtgtccaaggtgagtgcggtgtctgccattactgccgcgacatgaaaaaattcgggggtcctggccgcatgaagcagagctgtgttctccggcagtgtctggcaccaaggttgccccacagcgtgacatgttccttgtgtggtgaagtggaccaaaatgaggagacacaggactttgagaagaagctgatggaatgctgcatctgtaacgaaatcgtacatccgggctgcctgcagatggatggagagggactgttgaatgaggaattacccaactgttgggaatgccccaaatgctaccaggaggatagctcagagaaggcccaaaaacgtaagatggaagagtccgacgaagaggccgtgcaggcaaaagtactgcgtcctctgcgctcctgtgacgaaccactgactccgccccctcattctcctaccagcatgcttcagctgatacacgatccagtctccccccgcgggatggtgacccggagcagccctggcgccgggcccagcgaccatcactctgcaagtagagacgaacggtttaaacggcgacagctgcttaggttgcaggccacggagagaacaatggtacgcgaaaaggaaaacaatccaagcggtaagaaagaactctcggaggttgaaaaagctaagattaggggttcctatctcacagtgacacttcagaggccaacaaaggaattacacggtacctctattgtccctaagctgcaggctatcacagcgtcttccgccaacttacgccatagtcctcgcgtgctggtgcagcactgccctgcccgcactccccagcgcggcgacgaggagggactgggaggcgaggaggaagaagaggaagaagaagaggaggaagacgatagcgcagaagagggtggcgccgcacgactgaacggacggggcagttgggcccaggatggggacgagtcttggatgcaaagggaggtgtggatgagcgtgttcaggtacctgagccgacgagagctctgtgaatgcatgcgagtctgcaagacctggtacaagtggtgctgtgacaaaagactgtggacaaaaatcgacctgagccggtgtaaggccatcgtgcctcaggctctgagcggcattattaagagacagccggtgagccttgacctgagctggacaaatatttcaaaaaagcagcttacctggttggtgaaccggctccccggactgaaggacctgctgttggctggttgttcttggtccgcggtgagcgccctgtcaacttcgagttgcccactcctccggactctggatctcaggtgggctgttgggatcaaagatcctcaaattagagatctgctcacaccccctgcagacaagcccggacaagataataggagtaaactgaggaacatgacagacttccggctggctggactcgacattactgacgcaaccctgagactgattatcaggcatatgccactgctctctcggctggatctcagtcactgttcacaccttacagatcaatcatccaacctgctcacagctgttgggagctcaactcgttatagcctaaccgagctgaacatggcaggctgtaacaagctgaccgaccagacattaatttacctcagaagaattgccaatgttaccctcattgacctgcgcggatgcaagcagattacacgaaaagcttgcgaacactttatttccgacctgagcatcaattccctgtactgcctgtctgatgagaagctgatccagaagatctcatag

SEQ ID NO: 90423 - DNA, 1263 bp, Artificial Sequence
  derived and/or modified sequence
atgtgcagcggccgcttccagaacatccaggtgaacccagacttcccccggggccgcatcagcaacagcttccggaggaccagcagcacagagaacaagaccaagaccctgggcaagctgcaccaggagccccggcagctgcagagtgatggcaagaggaagatcctgctggaggagctggccaacagcgaccccaagctggccctgactggagtgcccatcgtgcagtggcccaagagggacaagctgaagttccccacccggcccaaggtgcgggtgcccaccatccccatcaccaagccccacaccatgaagccagccccccggctgacccctgtgcggcctgctgctgccagccccatcgtgtctggggccaggagaagaagagtgcgctgcaggaagtgcaaggcctgtgtgcagggagaatgtggggtgtgccactactgccgggacatgaagaagtttggaggccctggccgcatgaagcagagctgtgtgctgcggcagtgcctggccccccggctgccccacagcgtgacctgcagcctgtgtggggaggtggaccagaatgaggagacccaggactttgagaagaagctgatggagtgctgcatctgcaatgaaattgtgcaccctggctgcctgcagatggatggagagggcctgctgaatgaggagctgcccaactgctgggagtgccccaagtgctaccaggaggacagcagcgagaaggcccagaagaggaagatggaggagagtgatgaggaggccgtgcaggccaaggtgctgcggcccctgcggagctgtgatgagcccctgaccccaccaccccacagccccacctccatgctgcagctgattcatgaccctgtgagcccccggggcatggtgaccaggagcagccctggggccggccccagcgaccaccacagcgccagcagagatgagcgcttcaagaggcggcagctgctgcggctgcaggccacagagaggaccatggtgcgggagaaggagaacaaccccagcggcaagaaggagctgtctgaggtggagaaggccaagatccggggcagctacctgactgtgaccctgcagaggcccaccaaggagctgcacggcaccagcatcgtgcccaagctgcacggccaggtgctggtggtgtcctctgcccggctgagcagcatcaccctgagccggctggcccaggagggccctgctgcccctggggtgcctgacccctgccgcagccactggtgctgctag

SEQ ID NO: 90424 - DNA, 2172 bp, Artificial Sequence
  derived and/or modified sequence
atgtgcagcggccgcttccagaacatccaggtgaacccagacttcccccggggccgcatcagcaacagcttccggaggaccagcagcacagagaacaagaccaagaccctgggcaagctgcaccaggagccccggcagctgcagagtgatggcaagaggaagatcctgctggaggagctggccaacagcgaccccaagctggccctgactggagtgcccatcgtgcagtggcccaagagggacaagctgaagttccccacccggcccaaggtgcgggtgcccaccatccccatcaccaagccccacaccatgaagccagccccccggctgacccctgtgcggcctgctgctgccagccccatcgtgtctggggccaggagaagaagagtgcgctgcaggaagtgcaaggcctgtgtgcagggagaatgtggggtgtgccactactgccgggacatgaagaagtttggaggccctggccgcatgaagcagagctgtgtgctgcggcagtgcctggccccccggctgccccacagcgtgacctgcagcctgtgtggggaggtggaccagaatgaggagacccaggactttgagaagaagctgatggagtgctgcatctgcaatgaaattgtgcaccctggctgcctgcagatggatggagagggcctgctgaatgaggagctgcccaactgctgggagtgccccaagtgctaccaggaggacagcagcgagaaggcccagaagaggaagatggaggagagtgatgaggaggccgtgcaggccaaggtgctgcggcccctgcggagctgtgatgagcccctgaccccaccaccccacagccccacctccatgctgcagctgattcatgaccctgtgagcccccggggcatggtgaccaggagcagccctggggccggccccagcgaccaccacagcgccagcagagatgagcgcttcaagaggcggcagctgctgcggctgcaggccacagagaggaccatggtgcgggagaaggagaacaaccccagcggcaagaaggagctgtctgaggtggagaaggccaagatccggggcagctacctgactgtgaccctgcagaggcccaccaaggagctgcacggcaccagcatcgtgcccaagctgcaggccatcacagccagcagcgccaacctgcggcacagcccccgggtgctggtgcagcactgcccagcccggaccccccagagaggagatgaggagggcctgggcggggaggaggaggaggaggaggaggaggaggaggaggatgacagcgctgaggagggcggggccgcccggctgaatggccggggctcctgggcccaggatggagatgagagctggatgcagcgggaggtgtggatgtctgtgttccgctacctgagccggcgggagctgtgtgagtgcatgagggtgtgcaagacctggtacaagtggtgctgtgacaagaggctgtggaccaagattgacctgagccgctgcaaggccatcgtgccccaggccctgagcggcatcatcaagaggcagcctgtgtccctggacctgtcctggaccaacatcagcaagaagcagctgacctggctggtgaaccggctgcccggcctgaaggacctgctgctggccggctgctcctggagcgctgtgtctgccctgagcaccagcagctgccccctgctgcggaccctggacctgcgctgggccgtgggcatcaaggacccccagatccgggacctgctgaccccacctgctgacaagccaggccaggacaacagaagcaagctgaggaacatgacagacttccggctggccggcctggacatcacagatgccaccctgcggctcatcatccgccacatgcccctgctgagccggctggacctgagccactgcagccacctgacagaccagagcagcaacctgctgacagctgtgggcagcagcacccgctacagcctgacagagctgaacatggccggctgcaacaagctgacagaccagaccctcatctacctgcggagaattgccaacgtgaccctgattgacctgcggggctgcaagcagatcaccaggaaggcctgtgagcacttcatcagtgacctgagcatcaacagcctgtactgcctgagtgatgagaagctgatccagaagatctcctag

SEQ ID NO: 90425 - DNA, 1263 bp, Artificial Sequence
  derived and/or modified sequence
atgtgcagcggccggttccagaacatccaggtgaaccccgacttcccaagggggcgcatctctaattcttttaggcgaacctctagcacagaaaataagaccaagactctgggcaagctgcatcaagagcctcgccagctgcagagcgatggaaaacggaagatcctgctggaggaattggcaaattctgacccaaaactagccctaaccggagtcccgatagttcagtggccaaaaagagacaagctgaaatttcccacccggcctaaagtcagagtccccactattccaatcaccaagcctcacaccatgaagcctgcacctcgcctaaccccagtccggccagctgctgcatctcccatcgtgtctggcgctaggcgacgccgcgtgcgatgcaggaaatgtaaagcctgtgtgcagggggagtgcggggtatgccattattgcagagacatgaagaagttcggcggcccaggtaggatgaaacagagctgcgtccttagacagtgtctagcccccaggctgcctcactccgtcacttgttctctatgcggtgaagttgatcagaacgaagagacccaggattttgagaagaagctgatggaatgttgtatctgtaacgagatcgtacacccaggctgcctccagatggacggcgagggcctcctgaacgaagaactgcctaattgttgggagtgcccaaagtgctaccaggaggatagctccgaaaaagctcagaaacggaaaatggaagagtcagacgaagaggctgttcaggccaaagttcttcgcccactgcggagctgtgatgagccgctcacgccccccccccatagccctaccagcatgcttcaacttatccacgaccctgtgtctccaagaggtatggtaactagatcttcccccggagcaggcccatcagatcaccattccgcctcaagggacgagaggttcaaacgcaggcaactgcttcgcctgcaggcgaccgaacgaaccatggtgcgggagaaggagaataacccatccggcaaaaaagagctcagtgaggttgagaaggccaaaatacgcggatcctatctgacagttactttgcagcggccaaccaaagagttacacggaacgtcgatcgtgcctaagctgcacggacaggtgctggtggtcagtagtgctcggctgagcagcatcaccctgtcacgactggctcaggaagggccagctgctccaggtgtgcctgacccatgccgatctcactggtgctgctag

SEQ ID NO: 90426 - DNA, 2172 bp, Artificial Sequence
  derived and/or modified sequence
atgtgcagcggccggttccagaacatccaggtgaaccccgacttccccaggggacggatcagcaactcttttagaaggactagctccactgagaacaaaaccaagactttggggaaactccaccaagagccacgacaactccagtctgacggcaaaagaaagatactcctggaagagttggccaactctgacccaaagctggctctgacaggcgtccctatcgttcaatggcctaaaagagataagctgaaattccccacccggccgaaagtcagagtgccaacaattcctatcactaagcctcacactatgaaacccgcccctcggctgacaccagtgcggccagcagctgctagcccaattgtgtccggggcccgaaggagacgtgttcgttgtcgtaagtgcaaggcctgtgtgcaaggagagtgtggcgtgtgccactactgccgggatatgaagaagttcggcggcccagggagaatgaagcaaagctgcgtcctgcgccagtgcctagctcccagattaccgcacagcgtgacctgctctctgtgcggagaggtggatcagaacgaagagacccaggacttcgaaaaaaaactgatggagtgttgtatttgtaacgagatagtgcacccagggtgtcttcagatggatggtgagggtcttctgaatgaggagctgccaaattgttgggaatgccccaaatgctatcaggaggattcctcggagaaagcgcagaagcgcaaaatggaggagtcagacgaagaggccgtgcaagccaaggtccttagacctctgaggtcatgtgacgaacccctgacccccccaccccatagccccacttccatgctgcagctaatccacgacccagtctctcctagaggaatggttacgaggagcagtccaggcgcaggtccatctgaccatcatagcgccagccgcgatgaaaggtttaaaagaagacagttgctgcgtttgcaagctactgagcggacgatggtgagagaaaaggagaataatcctagcggcaagaaggaactttcagaggtggagaaagctaagatacggggcagttatctgaccgtgaccttgcagcggccaactaaggagcttcatggaacctctattgttccaaaactgcaagccatcaccgctagctcagccaaccttagacatagccccagggtgctggtccagcactgccccgctagaacaccacagaggggcgatgaggaaggactcgggggcgaagaggaggaggaggaggaagaagaagaggaagatgacagcgcagaagaaggtggtgccgcaaggcttaatggacgagggagctgggcccaggatggtgacgaaagctggatgcagagggaggtctggatgagcgtgtttcggtacctgagccggcgtgagctgtgtgaatgcatgcgcgtgtgtaaaacatggtataaatggtgctgtgacaagcggctatggactaagatcgacttatcaagatgcaaagccattgtcccacaggccctgtccggcattattaagagacagccagtaagcctggacttatcctggaccaatattagtaaaaagcagctcacatggcttgtaaacaggctgcccgggctgaaggacttactgttagccggttgctcctggtccgccgtttccgccctgagcacctcatcttgtcctcttctacgcacacttgatctgcgatgggcagtaggtatcaaggacccacagatacgggacctgctgacccccccagctgataagcccggacaagacaaccggtctaagttacggaatatgaccgactttcgactggcaggcttagatattacagatgccaccttgaggctgatcattcgccatatgcccctgctctctcggctggatctgagccactgctcccacctgacggaccaatcttccaacctgctgactgcggttggtagctcgactcgatactcactgactgaactgaacatggctggctgtaacaaacttaccgatcagaccctgatttatctccgaagaatagcaaacgtcacattgatcgacttaagagggtgcaaacagatcacacgcaaagcatgcgaacacttcatctctgatctgagcataaactctctatactgcctttctgacgagaagctgattcagaagattagctag

SEQ ID NO: 90427 - DNA, 1263 bp, Artificial Sequence
  derived and/or modified sequence
atgtgtagcggaagattccagaacatccaagttaaccccgactttcctcgcggaaggatcagcaacagcttcaggcgaacctctagtacagagaacaaaacaaagaccttaggtaaattgcaccaggagcctagacaattgcagagcgatggaaagcgtaagattttgctggaagaactggctaatagtgacccaaagcttgccctgacgggagtcccgatcgtgcagtggccaaagcgcgataaactcaagtttcccacccgtcctaaagtgagagttcccactatcccaattactaaaccacataccatgaagccggcaccccgactgacgcccgttaggccagctgccgcaagccccatagtgtcaggggcaaggcgccgtagggtgcgttgccggaagtgcaaggcttgcgtccaaggggaatgcggggtttgtcactattgtcgcgacatgaaaaagtttgggggtcctggccgtatgaagcagtcctgcgtactgaggcagtgtctggccccacgactaccccacagcgtcacatgttctttatgtggggaggtggaccagaatgaggaaacgcaggacttcgaaaaaaagctgatggagtgttgtatttgcaacgaaatagtgcacccaggatgcctccagatggatggtgagggtctcctgaacgaggaactgcctaactgctgggagtgtccaaagtgctaccaggaagactcatcagaaaaagcgcagaagcgcaagatggaggagtccgacgaggaagccgtccaggccaaggttctccgtccgctgagatcatgcgacgaacctcttacccctccccctcattcccccactagcatgctgcagctgattcacgaccctgtgtcccccagaggcatggttactagaagcagcccaggagccggtccaagtgatcaccactctgcttcgagagacgagaggtttaagaggagacagttgctgcgccttcaagccactgagcggactatggtgcgagaaaaggagaataatccgtcgggtaagaaggaactgagtgaggtcgaaaaagcaaaaattaggggaagttatctgaccgttaccctgcagcggcctacaaaggaactgcatggaacatccatcgtgcctaaactgcacggccaggtacttgtggtgagttcagcccgtctgtctagtattacactttctcgtctagcccaagagggccctgcggctccgggagtgccagatccctgcaggagtcactggtgttgctag

SEQ ID NO: 90428 - DNA, 2172 bp, Artificial Sequence
  derived and/or modified sequence
atgtgttccggcagattccagaacattcaggtgaatcccgacttccccaggggcaggatctcaaatagtttccgccgtacatcttctaccgagaacaaaaccaaaacattggggaagcttcaccaggagccacggcaattacagtccgacgggaaaagaaagatactgctggaggagctggccaattctgatcccaaacttgctttaactggtgtgccaatagttcagtggccgaagcgggacaaactaaagttcccgaccagacccaaagttagggtgcctaccataccaatcaccaaaccacacaccatgaagccggctccgagactgacaccagtgagaccagcagccgcatccccaattgttagtggggcacgcaggcggagggtgagatgcaggaaatgtaaggcctgtgtgcagggcgagtgcggagtctgtcactactgcagggatatgaagaaatttggcggaccaggtagaatgaagcagtcatgtgtgctgcgacaatgcctagctcccagattgcctcactccgttacctgttcgctttgcggggaagtcgatcagaacgaagagacccaggactttgaaaaaaagctgatggagtgctgtatctgtaacgagatcgtgcaccccggttgtttacagatggacggagagggtctacttaacgaggagctgcccaactgctgggagtgtcccaaatgctatcaggaggatagctcagagaaagcccagaagagaaagatggaggagtccgacgaggaagctgtgcaagctaaagttctgcggcctctacgtagctgcgacgagcccttaacacccccaccacacagccctacgagtatgctgcaacttatccacgaccctgtcagccctcggggaatggtgacaaggtccagtcccggtgcaggtcccagcgaccatcactcagcctcaagggacgagagatttaagaggcggcagttactccggctccaggctaccgaaaggactatggtgagagagaaggagaataaccctagtggcaaaaaggagctatccgaagttgaaaaggctaagatcagagggagctaccttaccgttacgctgcaacggcctaccaaggaacttcacgggacaagcatcgtgccaaagttgcaggccatcacggcatccagtgctaacttaaggcattccccccgagttctggtccaacactgtcctgcaagaacgccgcagagaggggatgaggagggcctgggcggtgaagaggaggaagaggaggaggaggaagaggaagatgattccgctgaagagggcggtgccgctcgcctgaacggccgaggctcctgggcccaggacggtgacgaatcctggatgcagagagaagtgtggatgagtgtattccgctacttgagcaggcgcgaactctgcgagtgcatgcgcgtgtgcaaaacatggtacaaatggtgttgtgacaagcgactctggacaaagatagatctgtcgagatgcaaggcaatcgtcccccaagccctgagtggcattatcaagagacagcctgtatcgctcgacctgtcctggactaatatcagcaagaaacagctgacctggctcgtaaatagactccctggcctgaaggacctcctacttgccggttgtagctggagcgcggtgtctgctctctccacgtcgtcttgcccccttttgaggactttggacctacggtgggccgtggggatcaaggatccccagattagggacttgcttaccccaccagccgataagccaggccaggacaatcggtcgaaactgaggaatatgacggatttccgactggccggactggacatcaccgacgctaccctgcgcctcattattcgccacatgcccctccttagtaggctcgatctgagccactgttcccacctgactgaccagtcctcaaatctcctgaccgccgtcggcagctctacacgctattcgcttacggagttgaacatggccggatgtaataaacttacggaccagaccctaatttacctgaggcggatagcaaatgtcaccctgatagacctgcggggttgcaagcagattacccggaaggcctgtgagcacttcataagtgacttgagcatcaattctctgtactgcttgtctgacgaaaaactgatccagaagatctcctag

SEQ ID NO: 90429 - DNA, 1263 bp, Artificial Sequence
  derived and/or modified sequence
atgtgcagcggcagattccagaacatccaggtgaaccccgacttccccagaggcagaatcagcaacagcttcagaagaaccagcagcaccgagaacaagaccaagaccctgggcaagctgcaccaggagcccagacagctgcagagcgacggcaagagaaagatcctgctggaggagctggccaacagcgaccccaagctggccctgaccggcgtgcccatcgtgcagtggcccaagagagacaagctgaagttccccaccagacccaaggtgagagtgcccaccatccccatcaccaagccccacaccatgaagcccgcccccagactgacccccgtgagacccgccgccgccagccccatcgtgagcggcgccagaagaagaagagtgagatgcagaaagtgcaaggcctgcgtgcagggcgagtgcggcgtgtgccactactgcagagacatgaagaagttcggcggccccggcagaatgaagcagagctgcgtgctgagacagtgcctggcccccagactgccccacagcgtgacctgcagcctgtgcggcgaggtggaccagaacgaggagacccaggacttcgagaagaagctgatggagtgctgcatctgcaacgagatcgtgcaccccggctgcctgcagatggacggcgagggcctgctgaacgaggagctgcccaactgctgggagtgccccaagtgctaccaggaggacagcagcgagaaggcccagaagagaaagatggaggagagcgacgaggaggccgtgcaggccaaggtgctgagacccctgagaagctgcgacgagcccctgaccccccccccccacagccccaccagcatgctgcagctgatccacgaccccgtgagccccagaggcatggtgaccagaagcagccccggcgccggccccagcgaccaccacagcgccagcagagacgagagattcaagagaagacagctgctgagactgcaggccaccgagagaaccatggtgagagagaaggagaacaaccccagcggcaagaaggagctgagcgaggtggagaaggccaagatcagaggcagctacctgaccgtgaccctgcagagacccaccaaggagctgcacggcaccagcatcgtgcccaagctgcacggccaggtgctggtggtgagcagcgccagactgagcagcatcaccctgagcagactggcccaggagggccccgccgcccccggcgtgcccgacccctgcagaagccactggtgctgctag

SEQ ID NO: 90430 - DNA, 2172 bp, Artificial Sequence
  derived and/or modified sequence
atgtgcagcggcagattccagaacatccaggtgaaccccgacttccccagaggcagaatcagcaacagcttcagaagaaccagcagcaccgagaacaagaccaagaccctgggcaagctgcaccaggagcccagacagctgcagagcgacggcaagagaaagatcctgctggaggagctggccaacagcgaccccaagctggccctgaccggcgtgcccatcgtgcagtggcccaagagagacaagctgaagttccccaccagacccaaggtgagagtgcccaccatccccatcaccaagccccacaccatgaagcccgcccccagactgacccccgtgagacccgccgccgccagccccatcgtgagcggcgccagaagaagaagagtgagatgcagaaagtgcaaggcctgcgtgcagggcgagtgcggcgtgtgccactactgcagagacatgaagaagttcggcggccccggcagaatgaagcagagctgcgtgctgagacagtgcctggcccccagactgccccacagcgtgacctgcagcctgtgcggcgaggtggaccagaacgaggagacccaggacttcgagaagaagctgatggagtgctgcatctgcaacgagatcgtgcaccccggctgcctgcagatggacggcgagggcctgctgaacgaggagctgcccaactgctgggagtgccccaagtgctaccaggaggacagcagcgagaaggcccagaagagaaagatggaggagagcgacgaggaggccgtgcaggccaaggtgctgagacccctgagaagctgcgacgagcccctgaccccccccccccacagccccaccagcatgctgcagctgatccacgaccccgtgagccccagaggcatggtgaccagaagcagccccggcgccggccccagcgaccaccacagcgccagcagagacgagagattcaagagaagacagctgctgagactgcaggccaccgagagaaccatggtgagagagaaggagaacaaccccagcggcaagaaggagctgagcgaggtggagaaggccaagatcagaggcagctacctgaccgtgaccctgcagagacccaccaaggagctgcacggcaccagcatcgtgcccaagctgcaggccatcaccgccagcagcgccaacctgagacacagccccagagtgctggtgcagcactgccccgccagaaccccccagagaggcgacgaggagggcctgggcggcgaggaggaggaggaggaggaggaggaggaggaggacgacagcgccgaggagggcggcgccgccagactgaacggcagaggcagctgggcccaggacggcgacgagagctggatgcagagagaggtgtggatgagcgtgttcagatacctgagcagaagagagctgtgcgagtgcatgagagtgtgcaagacctggtacaagtggtgctgcgacaagagactgtggaccaagatcgacctgagcagatgcaaggccatcgtgccccaggccctgagcggcatcatcaagagacagcccgtgagcctggacctgagctggaccaacatcagcaagaagcagctgacctggctggtgaacagactgcccggcctgaaggacctgctgctggccggctgcagctggagcgccgtgagcgccctgagcaccagcagctgccccctgctgagaaccctggacctgagatgggccgtgggcatcaaggacccccagatcagagacctgctgaccccccccgccgacaagcccggccaggacaacagaagcaagctgagaaacatgaccgacttcagactggccggcctggacatcaccgacgccaccctgagactgatcatcagacacatgcccctgctgagcagactggacctgagccactgcagccacctgaccgaccagagcagcaacctgctgaccgccgtgggcagcagcaccagatacagcctgaccgagctgaacatggccggctgcaacaagctgaccgaccagaccctgatctacctgagaagaatcgccaacgtgaccctgatcgacctgagaggctgcaagcagatcaccagaaaggcctgcgagcacttcatcagcgacctgagcatcaacagcctgtactgcctgagcgacgagaagctgatccagaagatcagctag

SEQ ID NO: 90431 - protein, 291 aa, Artificial Sequence
  derived and/or modified sequence
  misc_feature (1)..(1): Xaa can be any naturally occurring amino acid
XRLPGSRPLPGPSSLGRSPSCSAEKTPFRGPPLGRQSAVKELDLVTAGKFRFSVRSECFSRGPPLKIKCNCYFSFCHILWRQKISVVLSFFTFSLGKIILTVELSISLLLRFTDDTFDPELAATIGVDFKVKTISVDGNKAKLAIWVTLHQQTANFFLKSQIGNSPILKWAMWQYDTAGQERFRTLTPSYYRGAQGVILVYDVTRRDTFVKLDNWLNELETYCTRNDIVNMLVGNKIDKENREVDRNEGLKFARKHSMLFIEASAKTCDGVQCAFEELVEKIIQTPGLWES

SEQ ID NO: 90432 - DNA, 876 bp, Artificial Sequence
  derived and/or modified sequence
tgacggttgccaggctcacgccctctgcctggcccaagcagcctcgggagaagcccctcttgttctgccgaaaaaacccccttccggggcccacctcttggtcgtcagtccgctgtgaaggagctggacttagtaacagcaggcaagtttcggttcagtgtgcgctccgaatgtttcagtcgggggccgcctctgaagatcaagtgtaattgctacttttctttttgccacatcctttggagacagaaaatctctgtggtgctgtcattctttaccttttccttgggcaaaatcatcctgacggttgagctctctatatcgctgttactcaggtttaccgacgatactttcgatccggaactggctgcaaccatcggcgtagacttcaaagttaaaactattagtgtagatggtaacaaggcgaaacttgccatctgggtgactctgcaccagcaaaccgccaactttttcctcaaaagtcagatcggaaattctccgatcctgaaatgggccatgtggcagtatgatactgccgggcaagagcgatttcggacacttactcctagttactacaggggcgctcaaggcgttatcctggtgtatgacgttacgaggcgggacacctttgttaagctggacaactggctgaatgagctggagacatattgcactagaaacgatatcgtgaacatgctggttggcaataagattgacaaagagaacagagaggtggatagaaatgagggtttaaagttcgctcgtaaacattcaatgttgttcatcgaggcaagcgcaaagacctgtgacggcgttcaatgcgcattcgaggaacttgttgaaaagatcatacagacccccggactgtgggaatcttag

SEQ ID NO: 90433 - DNA, 876 bp, Artificial Sequence
  derived and/or modified sequence
tgaagactgcccggcagccggcccctgcccggccccagcagcctgggccgcagccccagctgcagcgctgagaagacccccttccggggcccccccctgggccggcagagcgctgtgaaggagctggacctggtgacagctgggaagttccgcttctctgtgcgctctgagtgcttcagccggggcccccccctgaagatcaagtgcaactgctacttctccttctgccacatcctgtggaggcagaagatctctgtggtgctgtccttcttcaccttcagcctgggcaagatcatcctgactgtggagctgagcatcagcctgctgctgcgcttcacagatgacacctttgatcctgagctggccgccaccatcggcgtggacttcaaggtgaagaccatctctgtggatggcaacaaggccaagctggccatctgggtgaccctgcaccagcagacagccaacttcttcctgaagagccagatcggcaacagccccatcctgaagtgggccatgtggcagtatgacacagctggccaggagcgcttccgcaccctgacccccagctactacagaggagcccagggcgtcatcctggtgtatgatgtgacccggcgggacacctttgtgaagctggacaactggctgaatgagctggagacctactgcaccagaaatgacatcgtgaacatgctggtgggcaacaagattgacaaggagaaccgggaggtggacagaaatgaaggcctgaagtttgccaggaagcacagcatgctgttcatcgaggccagcgccaagacctgtgatggagtgcagtgtgcctttgaggagctggtggagaagatcatccagaccccaggcctgtgggagagctag

SEQ ID NO: 90434 - DNA, 876 bp, Artificial Sequence
  derived and/or modified sequence
tgacggctgcccggcagccggcccctgcccggccccagcagcctgggccgaagcccatcatgcagcgctgaaaaaacccccttcaggggtccccccctgggaaggcagtcagccgtaaaggagctggacctcgtcaccgccggaaagttccggttttcagtccgtagcgaatgctttagtcgcggaccgccccttaaaatcaaatgtaattgctatttcagtttttgccacatactctggcgccaaaagatatcggtagtgctttcattttttacgttttctctgggtaagattatcctaaccgtggaactgagtatttcgttattactgcggtttactgacgacacctttgatcccgagctcgctgctaccataggtgtggatttcaaggtaaagacaatctctgtcgacggaaataaagctaaattggccatctgggttacccttcaccagcagactgccaactttttcctcaaaagccaaatcggcaattcccctatcttgaagtgggcgatgtggcagtacgacaccgcaggacaggaaagatttcgaactctgactccaagttactatagaggcgcccagggcgttatcctggtttacgacgtaacccgccgagacacattcgtcaagctggacaactggctcaatgagttggagacttattgcaccagaaatgacatcgtgaacatgctggtgggcaacaagatcgataaagagaaccgcgaggtggaccgaaacgaaggactcaagttcgctcggaagcattcaatgttatttatagaggcttcagccaaaacatgcgacggtgtgcagtgcgccttcgaggaacttgttgaaaagatcattcaaactccaggcctttgggaatcttag

SEQ ID NO: 90435 - DNA, 876 bp, Artificial Sequence
  derived and/or modified sequence
tgacgcttaccgggttcacggccacttcctggcccatcctccttaggcaggagcccctcttgtagtgcagaaaaaacgccgttccggggaccccctctcgggcgacagtccgctgtcaaggagctggacctggtgacggctgggaagtttagattcagcgtgagaagtgaatgcttctcaagaggcccaccactgaagattaaatgcaactgttatttttccttctgtcatatcttgtggcgccagaagatcagcgtagtgctgtcattcttcactttcagcctaggaaagattatactgactgtggagctgagcatcagtctgctgctacggttcacggatgataccttcgacccagagctggctgctacaataggcgtcgattttaaggtgaagaccatctctgtggacggcaacaaggcaaagctcgcaatatgggtaacccttcaccagcagaccgcaaatttctttctgaagtcccaaattggcaatagtccaatcctcaagtgggccatgtggcagtacgatactgccggacaggaacgcttcaggacactgactcccagttattataggggtgcccagggggtgatcttagtgtatgatgtcacgcggagagatactttcgttaaactagacaattggctgaacgagcttgagacctactgtacccggaatgacatcgttaacatgttggtggggaataaaatcgacaaagaaaaccgcgaggttgatagaaacgagggtctaaaattcgcaagaaaacattcaatgctcttcattgaggcgtccgccaagacatgtgacggggtgcagtgtgcatttgaagaactcgttgaaaaaattattcagacgcctggtctctgggaatcatag

SEQ ID NO: 90436 - DNA, 873 bp, Artificial Sequence
  derived and/or modified sequence
gcgcctgcctggttcccggcctttgccaggcccaagttctctgggtcgctctccctcctgtagcgccgagaaaacaccattccgagggccgccgctcggccggcagtcggctgtgaaagaactggatcttgtgactgctggaaaatttcgctttagtgtaaggtccgagtgcttcagccgtgggccacctttgaaaataaaatgtaattgttatttctcattttgccacatcctgtggagacagaagattagtgttgtgctttcattttttactttttccttggggaaaataatattgacagtggagttgagtataagcctgctcttgaggttcacagatgatacgtttgatccagaacttgcagcaacaataggtgttgactttaaggtgaaaacaatttcagtggatggaaataaggctaaacttgcaatatgggttactttgcatcagcagactgcaaactttttcttaaagagccagataggaaatagtccaatcctgaagtgggccatgtggcaatacgatactgctggtcaagagaggtttagaacattaactcccagctattatagaggtgcacagggtgttatattagtttatgatgtcacaagaagagatacatttgttaaactggataattggttaaatgaattggaaacatactgtacaagaaatgacatagtaaacatgctagttggaaataaaatcgataaggaaaatcgtgaagtcgatagaaatgaaggcctgaaatttgcacgaaagcattccatgttatttatagaggcaagtgcaaaaacctgtgatggtgtacaatgtgcctttgaagaacttgttgaaaagatcattcagacccctggactgtgggaaagtga

SEQ ID NO: 90437 - DNA, 876 bp, Artificial Sequence
  derived and/or modified sequence
tgaagactgcccggcagcagacccctgcccggccccagcagcctgggcagaagccccagctgcagcgccgagaagacccccttcagaggcccccccctgggcagacagagcgccgtgaaggagctggacctggtgaccgccggcaagttcagattcagcgtgagaagcgagtgcttcagcagaggcccccccctgaagatcaagtgcaactgctacttcagcttctgccacatcctgtggagacagaagatcagcgtggtgctgagcttcttcaccttcagcctgggcaagatcatcctgaccgtggagctgagcatcagcctgctgctgagattcaccgacgacaccttcgaccccgagctggccgccaccatcggcgtggacttcaaggtgaagaccatcagcgtggacggcaacaaggccaagctggccatctgggtgaccctgcaccagcagaccgccaacttcttcctgaagagccagatcggcaacagccccatcctgaagtgggccatgtggcagtacgacaccgccggccaggagagattcagaaccctgacccccagctactacagaggcgcccagggcgtgatcctggtgtacgacgtgaccagaagagacaccttcgtgaagctggacaactggctgaacgagctggagacctactgcaccagaaacgacatcgtgaacatgctggtgggcaacaagatcgacaaggagaacagagaggtggacagaaacgagggcctgaagttcgccagaaagcacagcatgctgttcatcgaggccagcgccaagacctgcgacggcgtgcagtgcgccttcgaggagctggtggagaagatcatccagacccccggcctgtgggagagctag

SEQ ID NO: 90438 - protein, 142 aa, Artificial Sequence
  derived and/or modified sequence
MDEDVLTTLKILIIGESGVGKSSLLLRFTDDTFDPELAATIGVDFKVKTISVDGNKAKLAIWENREVDRNEGLKFARKHSMLFIEASAKTCDGVQCAFEELVEKIIQTPGLWESENQNKGVKLSHREEGQGGGACGGYCSVL

SEQ ID NO: 90439 - DNA, 429 bp, Artificial Sequence
  derived and/or modified sequence
atggacgaggatgtcctaacaaccttaaagattctcatcattggggaaagcggggtcggaaagtcatcactcttgctgagatttactgatgacacattcgatcctgagctggccgcaaccataggggtggatttcaaagtgaaaactatctccgtcgacggaaataaagcaaagctggcgatctgggaaaatcgggaagttgaccgaaacgagggtctgaagtttgcccgcaaacatagcatgctgtttattgaagcttcagcaaagacgtgcgatggggtgcagtgtgctttcgaagaactggtggagaaaattattcagacacccgggctttgggaatccgagaatcagaataaaggcgtgaaattgagccaccgagaggagggccagggaggcggagcttgtggcggatactgttctgtcctgtag

SEQ ID NO: 90440 - DNA, 429 bp, Artificial Sequence
  derived and/or modified sequence
atggatgaagatgtgctgaccaccctgaagatcctgatcatcggggagagcggcgtgggcaagagcagcctgctgctgcgcttcacagatgacacctttgatcctgagctggccgccaccatcggcgtggacttcaaggtgaagaccatctctgtggatggcaacaaggccaagctggccatctgggagaaccgggaggtggacagaaatgaaggcctgaagtttgccaggaagcacagcatgctgttcatcgaggccagcgccaagacctgtgatggagtgcagtgtgcctttgaggagctggtggagaagatcatccagaccccaggcctgtgggagagcgagaaccagaacaagggcgtgaagctgagccaccgggaggagggccagggcggcggggcctgtggcggctactgcagcgtgctgtag

SEQ ID NO: 90441 - DNA, 429 bp, Artificial Sequence
  derived and/or modified sequence
atggacgaggacgtgctgaccaccctgaagatcctgatcatcggcgagagtggagtaggcaagagctcgctgctcctgagatttacagatgatacctttgacccagagcttgccgccaccatcggggtagactttaaggtcaagactatatctgtggacgggaataaagccaaactagctatctgggagaatagggaagttgaccgaaatgaaggattaaaatttgcccggaaacattccatgctgtttattgaggcctccgccaagacttgtgatggagtgcaatgtgcattcgaagagcttgttgagaaaatcatccagactccaggtctctgggaatccgagaatcagaataaaggcgtgaagctctcccacagagaggagggccagggcgggggcgcatgtggtggatactgtagcgtgctttag

SEQ ID NO: 90442 - DNA, 429 bp, Artificial Sequence
  derived and/or modified sequence
atggacgaagatgttctgactaccttaaaaatcctcataatcggcgagagcggggttggcaagagtagtctgttactccgatttacagacgatactttcgatcctgagttagccgcaactattggtgtcgacttcaaggtaaagacgatttctgtggacgggaacaaagccaagctagctatatgggaaaatcgggaagtggatcggaatgaaggcctgaagtttgccaggaaacactctatgctattcatcgaagcctctgccaagacttgcgatggcgtgcagtgtgctttcgaggagttggtagagaaaatcatccaaacccctggtctctgggaatccgagaatcagaataagggtgtgaaattgagtcatcgggaagaaggacaagggggaggagcgtgtgggggatattgttcagtgttatag

SEQ ID NO: 90443 - DNA, 1718 bp, Artificial Sequence
  derived and/or modified sequence
actctgctgaagggctgagaggcgcacccgggcggccagctgggctcggagcggaacggggtcaggatggacgaggacgtgctaaccaccctgaagatcctcatcatcggcgagagtggggtgggcaagtccagcctgctcttgaggttcacagatgatacgtttgatccagaacttgcagcaacaataggtgttgactttaaggtgaaaacaatttcagtggatggaaataaggctaaacttgcaatatgggaaaatcgtgaagtcgatagaaatgaaggcctgaaatttgcacgaaagcattccatgttatttatagaggcaagtgcaaaaacctgtgatggtgtacaatgtgcctttgaagaacttgttgaaaagatcattcagacccctggactgtgggaaagtgagaaccagaataaaggagtcaaactgtcacacagggaagaaggccaaggaggaggagcctgtggtggttattgctctgtgttataaactctgggaaattccatctcttgcatatttgatcagatagtgacatctttctgtatataaactctttaactgctattttagggaccttgcagtttgcacataattgttttatatcatagcagtaaatatttgcaagaaatcccactcatcgaccccgggtaaaatgttatggtaagcatgcacagtttgcagtctacagtttttttatgtagcacaaaataggtgtacctttataagtacattcaattttatgatttacatttatcatgtaatttttaaaaaaatccatctatctaggatatgttgatacaaagtctgcttttgctattctttttgcttaaatactcctatcattttctgaattacttggtatttagaactcctagcaccacggggaagaatagaggtatcatcaaacgtggcaaattttctttcaggaataataaagagcatgattccacagcttttctgggatgtttgagattcttttttagtactaagcaaaattctcatcacagaatgtagcccaggccaatttataactaaatctctatttgttcagatgatgcttctaaaacagcattgataggttaaagaagcttggtatttttaatttacttcaatgattagctcagttgcttaactggagttttaatcctgtgatatgtacattggattcatgactgtgcagcatttttagttatgtggtgtttggcagaatgacaataaggttttcccccattttggtttcaggaggacatgaatagtgtgtttattgtaactcctcatacacttttaaaaccaacatcttttttcataaatgttggtagtgtttgtccaggtaccttaactgtagcttgtgtaatgttgatgaatatctgtatcttacggcttccataatggctagttgatattcaaaaacctatttctgtgttttgaggggtggggaaaaaaaacactaagtgataatttgaaaaaggcatattgcttccagattctgatgtgtgagggaaaatactgtcacaatgaaaatcttgacaatttacttaacaagtaaccagtagttcatcaaaaccaacttgtacagactaataaatctttttcacagtattcagttttctcacctcttgctattgtatattgtagatttttttcattcatgtgttatttaatttacactgatctctgctattttaaccccccaaataagttatttgtccttt

SEQ ID NO: 90444 - DNA, 429 bp, Artificial Sequence
  derived and/or modified sequence
atggacgaggacgtgctgaccaccctgaagatcctgatcatcggcgagagcggcgtgggcaagagcagcctgctgctgagattcaccgacgacaccttcgaccccgagctggccgccaccatcggcgtggacttcaaggtgaagaccatcagcgtggacggcaacaaggccaagctggccatctgggagaacagagaggtggacagaaacgagggcctgaagttcgccagaaagcacagcatgctgttcatcgaggccagcgccaagacctgcgacggcgtgcagtgcgccttcgaggagctggtggagaagatcatccagacccccggcctgtgggagagcgagaaccagaacaagggcgtgaagctgagccacagagaggagggccagggcggcggcgcctgcggcggctactgcagcgtgctgtag

SEQ ID NO: 90445 - DNA, 909 bp, Artificial Sequence
  derived and/or modified sequence
atgaagattatccacgaggccggctatagtgaagaggagtgcaagcagtacaaggccgtagtctattccaataccatccagtccataatcgctataatacgtgccatgggtcggctgaaaatcgatttcggcgactcagctcgggctgatgacgccaggcagctgttcgtgctcgccggcgccgccgaggaaggattcatgacggcagaactggcgggcgtcataaagcgcctctggaaagacagcggagtgcaggcatgctttaacagatccagagagtatcagttaaacgatagcgccgcttactatctgaacgaccttgaccggatcgctcaacctaattacataccaacacagcaggacgtgctgagaacccgggtcaagaccacaggaattgtggagactcattttactttcaaggatctacattttaaaatgttcgacgtgggtggacagcggagtgagcggaaaaaatggattcattgctttgagggtgtaacagcgattattttctgtgtcgccctgtccgactatgatctcgtgttagctgaagatgaagaaatgaatcggatgcacgagagcatgaagctattcgattctatatgtaacaacaaatggttcactgacacatcgatcatcctgtttctgaataagaaggacctttttgaggagaaaatcaagaaatctcccctaaccatttgttatcccgagtacgccggcagcaacacgtacgaagaagccgccgcctacatacagtgtcagttcgaggatctgaataaacgcaaagacactaaagaaatctacacacatttcacgtgcgccactgacactaaaaatgtgcaattcgtgttcgacgccgttaccgacgtgatcatcaagaataacctgaaggattgcggcctattttag

SEQ ID NO: 90446 - DNA, 909 bp, Artificial Sequence
  derived and/or modified sequence
atgaagatcatccatgaagctggctacagcgaggaggagtgcaagcagtacaaggctgtggtgtacagcaacaccatccagagcatcatcgccatcatccgggccatgggccgcctgaagattgactttggagacagcgcccgggcagatgatgcccggcagctgtttgtgctggccggggctgctgaggagggcttcatgacagctgagctggccggggtcatcaagaggctgtggaaggacagcggcgtgcaggcctgcttcaacagaagccgggagtaccagctgaatgattctgctgcctactacctgaatgacctggaccgcatcgcccagcccaactacatccccacccagcaggatgtgctgcggaccagggtgaagaccaccggcatcgtggagacccacttcaccttcaaggacctgcacttcaagatgtttgatgtgggcggccagaggtctgagaggaagaagtggatccactgctttgaaggagtgacagccatcatcttctgtgtggccctgagtgactatgacctggtgctggccgaggatgaggagatgaacaggatgcatgagagcatgaagctgtttgacagcatctgcaacaacaagtggttcacagacaccagcatcatcctcttcctgaacaagaaggacctgtttgaggagaagatcaagaagagccccctgaccatctgctacccagaatatgccggcagcaacacctatgaggaggccgccgcctacatccagtgccagtttgaggacctgaacaagaggaaggacaccaaggagatctacacccacttcacctgtgccacagacaccaagaatgtgcagtttgtgtttgatgctgtgacagatgtgatcatcaagaacaacctgaaggactgtggcctcttctag

SEQ ID NO: 90447 - DNA, 909 bp, Artificial Sequence
  derived and/or modified sequence
atgaagatcatccacgaggccggctacagcgaggaggagtgcaagcaatacaaagccgtggtctatagtaacacaatccagtcaatcatcgcaataataagagcaatggggcggctcaaaatcgacttcggcgacagcgcccgggccgatgatgcgcggcaactgtttgtgctggctggagctgccgaggaggggttcatgacggccgaactcgcaggagtcattaagcgtttatggaaagactccggtgtacaggcctgcttcaatagatcccgggagtatcagttgaacgactctgccgcttattacctaaatgatctggaccgcatcgcacagccaaactacattccaacccaacaggatgtactcagaacccgcgttaagacgacaggaatcgtcgaaacgcatttcacttttaaggaccttcacttcaagatgttcgatgtgggaggacagaggagtgagaggaaaaagtggatccattgttttgaaggggttacagctatcatattctgcgtggcactgtccgattacgacctggtcctggcagaggatgaagagatgaaccggatgcatgagagcatgaagctgttcgattcaatctgtaacaacaagtggtttactgacacgtccattatattatttttgaataaaaaagacctgtttgaagaaaagattaagaaatcccccctgacaatttgctaccccgaatacgcggggtcaaacacctatgaggaggctgccgcctatatccagtgccagttcgaagacttaaacaaacggaaagacactaaagaaatttacacccacttcacatgtgccaccgataccaaaaacgtccagttcgtgttcgacgccgtcaccgacgtcatcattaagaataacttgaaggactgtggcctgttctag

SEQ ID NO: 90448 - DNA, 909 bp, Artificial Sequence
  derived and/or modified sequence
atgaagattatccacgaggccggttattcagaggaggaatgtaaacagtataaggcggtggtttattccaacaccatacagagtatcatagctatcatccgggctatgggccgtttgaagatcgatttcggagactctgctagggcagacgatgctagacagctctttgtgctcgcaggcgctgccgaggaaggcttcatgacagccgagttggccggtgtgattaaacggttatggaaagattccggcgtccaggcctgctttaatcgaagcagagagtatcagctgaacgactctgccgcttactaccttaacgacctggatagaatcgctcagcccaactacatacccacacaacaggatgttctgcgcacaagggttaagacaactggcattgttgagacccattttacattcaaagacctccactttaagatgttcgacgtgggcggtcagcgctcggaaagaaaaaaatggatccattgttttgaaggggtgactgccattattttttgtgtcgccttgagcgattatgacctagtcctcgcggaagatgaggagatgaatcggatgcatgagtctatgaaattatttgacagtatctgcaacaacaagtggtttaccgataccagcatcatcctgttcctaaacaagaaggatctcttcgaggagaaaatcaaaaagtcccccctcaccatatgttaccccgaatatgcaggttccaacacatacgaggaagctgccgcatacatccagtgtcagttcgaagatctcaacaagcgaaaagataccaaagagatctacacacacttcacatgcgccacagataccaagaatgtgcagttcgtttttgacgcggtcactgatgtcattatcaaaaacaatctgaaggactgtgggctattctag

SEQ ID NO: 90449 - DNA, 909 bp, Artificial Sequence
  derived and/or modified sequence
atgaagatcatccacgaggccggctacagcgaggaggagtgcaagcagtacaaggccgtggtgtacagcaacaccatccagagcatcatcgccatcatcagagccatgggcagactgaagatcgacttcggcgacagcgccagagccgacgacgccagacagctgttcgtgctggccggcgccgccgaggagggcttcatgaccgccgagctggccggcgtgatcaagagactgtggaaggacagcggcgtgcaggcctgcttcaacagaagcagagagtaccagctgaacgacagcgccgcctactacctgaacgacctggacagaatcgcccagcccaactacatccccacccagcaggacgtgctgagaaccagagtgaagaccaccggcatcgtggagacccacttcaccttcaaggacctgcacttcaagatgttcgacgtgggcggccagagaagcgagagaaagaagtggatccactgcttcgagggcgtgaccgccatcatcttctgcgtggccctgagcgactacgacctggtgctggccgaggacgaggagatgaacagaatgcacgagagcatgaagctgttcgacagcatctgcaacaacaagtggttcaccgacaccagcatcatcctgttcctgaacaagaaggacctgttcgaggagaagatcaagaagagccccctgaccatctgctaccccgagtacgccggcagcaacacctacgaggaggccgccgcctacatccagtgccagttcgaggacctgaacaagagaaaggacaccaaggagatctacacccacttcacctgcgccaccgacaccaagaacgtgcagttcgtgttcgacgccgtgaccgacgtgatcatcaagaacaacctgaaggactgcggcctgttctag

SEQ ID NO: 90450 - protein, 161 aa, Artificial Sequence
  derived and/or modified sequence
MDEDVLTTLKILIIGESGVGKSSLLLRFTDDTFDPELAATIVYDVTRRDTFVKLDNWLNELETYCTRNDIVNMLVGNKIDKENREVDRNEGLKFARKHSMLFIEASAKTCDGVQCAFEELVEKIIQTPGLWESENQNKGVKLSHREEGQGGGACGGYCSVL

SEQ ID NO: 90451 - protein, 184 aa, Artificial Sequence
  derived and/or modified sequence
MDEDVLTTLKILIIGESGVGKSSLLLRFTDDTFDPELAATDTAGQERFRTLTPSYYRGAQGVILVYDVTRRDTFVKLDNWLNELETYCTRNDIVNMLVGNKIDKENREVDRNEGLKFARKHSMLFIEASAKTCDGVQCAFEELVEKIIQTPGLWESENQNKGVKLSHREEGQGGGACGGYCSVL

SEQ ID NO: 90452 - DNA, 486 bp, Artificial Sequence
  derived and/or modified sequence
atggatgaagacgttctgacaactctaaagatcttaattatcggggagagcggtgttggtaagtcatccctgctgctgcgctttaccgacgacacatttgaccccgagctggctgctactattgtgtatgatgtgactcgccgcgacacattcgtgaaactcgacaactggctgaatgaactcgagacctactgtacccgcaacgatatcgtgaacatgcttgtagggaataaaattgacaaggagaaccgagaggtggataggaacgagggcctcaagtttgcgagaaaacactcaatgctcttcattgaagccagcgccaagacatgcgatggcgttcagtgtgctttcgaggagctcgtcgagaaaattatccagaccccggggctgtgggaaagcgagaaccagaataaaggggtgaagctgtctcatagggaagaagggcaaggggggggtgcatgcggtggctattgctccgttctgtag

SEQ ID NO: 90453 - DNA, 555 bp, Artificial Sequence
  derived and/or modified sequence
atggatgaggacgtgcttacaaccttgaaaatcctgatcatcggtgagtctggtgtgggcaaaagctcactccttctaaggtttacagatgacactttcgaccctgaactggcagcgactgacactgctggacaggagcgtttccgaaccttgacaccatcctattacagaggcgcacaaggggtgattttggtatacgatgtcaccaggagagatacctttgttaaacttgacaattggttgaatgagctggaaacctactgtacacggaatgacatcgtgaacatgctcgttggaaataaaattgataaagagaaccgggaggttgatcgcaatgagggtttaaagtttgcgagaaaacacagcatgctgttcatcgaggcgagcgccaagacctgtgatggcgtccagtgcgcattcgaggaattagtagagaagatcattcagactcctggcctgtgggagagcgaaaatcagaacaagggcgtgaagctaagccacagagaggagggacaggggggcggggcatgcggcgggtactgttccgtcctgtag

SEQ ID NO: 90454 - DNA, 486 bp, Artificial Sequence
  derived and/or modified sequence
atggatgaagatgtgctgaccaccctgaagatcctgatcatcggggagagcggcgtgggcaagagcagcctgctgctgcgcttcacagatgacacctttgatcctgagctggccgccaccatcgtgtatgatgtgacccggcgggacacctttgtgaagctggacaactggctgaatgagctggagacctactgcaccagaaatgacatcgtgaacatgctggtgggcaacaagattgacaaggagaaccgggaggtggacagaaatgaaggcctgaagtttgccaggaagcacagcatgctgttcatcgaggccagcgccaagacctgtgatggagtgcagtgtgcctttgaggagctggtggagaagatcatccagaccccaggcctgtgggagagcgagaaccagaacaagggcgtgaagctgagccaccgggaggagggccagggcggcggggcctgtggcggctactgcagcgtgctgtag

SEQ ID NO: 90455 - DNA, 555 bp, Artificial Sequence
  derived and/or modified sequence
atggatgaagatgtgctgaccaccctgaagatcctgatcatcggggagagcggcgtgggcaagagcagcctgctgctgcgcttcacagatgacacctttgatcctgagctggccgccacagacacagctggccaggagcgcttccgcaccctgacccccagctactacagaggagcccagggcgtcatcctggtgtatgatgtgacccggcgggacacctttgtgaagctggacaactggctgaatgagctggagacctactgcaccagaaatgacatcgtgaacatgctggtgggcaacaagattgacaaggaaaatcgggaggtggacagaaatgaaggcctgaagtttgccaggaagcacagcatgctgttcatcgaggccagcgccaagacctgtgatggagtgcagtgtgcctttgaggagctggtggagaagatcatccagaccccaggcctgtgggagagcgagaaccagaacaagggcgtgaagctgagccaccgggaggagggccagggcggcggggcctgtggcggctactgcagcgtgctgtag

SEQ ID NO: 90456 - DNA, 486 bp, Artificial Sequence
  derived and/or modified sequence
atggacgaggacgtgctgaccaccctgaagatcctgatcatcggcgaaagcggggtggggaaatcttctttactccttcgatttacggacgacactttcgacccagaactggccgcaactatagtgtacgacgttacccggagagacaccttcgtgaagctcgacaattggttaaatgagcttgagacgtactgtacccggaacgacatcgtgaacatgctggtcggcaataaaattgataaagagaacagggaggtggatcgaaatgaaggccttaaattcgcaagaaaacattccatgctgtttatcgaggctagcgccaagacatgcgacggcgtccagtgtgcattcgaggagttagtggaaaaaattattcaaacaccaggactctgggagagtgagaaccagaataaaggagtgaagctttcacacagggaagaaggccaaggagggggcgcctgcggggggtactgttctgtgctctag

SEQ ID NO: 90457 - DNA, 555 bp, Artificial Sequence
  derived and/or modified sequence
atggacgaggacgtgctgaccaccctgaagatcctgatcatcggcgagtccggagtgggcaagtccagtctcttgctccgcttcaccgacgacacttttgatcctgagctggcagctactgacacggcggggcaggaacgctttcggactctgacacctagttactatagaggggcacagggggtcattctcgtgtatgatgtcacaaggagggacacgtttgtgaagctggataattggctgaacgaactggagacgtattgcacaaggaacgacattgtcaacatgctagtcggaaacaaaatagataaagagaacagggaggttgatcggaacgagggccttaagtttgcaaggaaacactctatgctgttcatcgaagcatcagccaaaacctgcgacggagtccagtgcgccttcgaagagctggtggagaaaatcatccaaacccccgggctgtgggagagcgaaaaccagaacaaaggagtaaagctatcccaccgagaggagggccagggagggggtgcctgcggaggatattgcagcgtgctgtag

SEQ ID NO: 90458 - DNA, 486 bp, Artificial Sequence
  derived and/or modified sequence
atggacgaggatgtgttaaccaccttaaaaatactcatcattggcgagtcaggagtcggcaagtcctccctgttgctgcgttttactgatgacaccttcgaccccgagctggcagcaaccatcgtgtacgatgtcacaagacgagacactttcgtcaagttagacaattggctgaacgaactggagacatactgcaccaggaacgatattgttaacatgcttgtggggaacaagatcgacaaggagaatagggaggtggacaggaacgagggcctgaaatttgctaggaaacacagcatgctttttatcgaggcatcagcaaagacatgcgatggagttcagtgtgcatttgaagaactcgtggagaagattatccaaacacccggattatgggagagcgaaaaccagaataagggtgttaaattgagccatagagaagagggccagggcggaggagcgtgcgggggttattgctctgtcctgtag

SEQ ID NO: 90459 - DNA, 555 bp, Artificial Sequence
  derived and/or modified sequence
atggacgaggatgttttgactaccctgaagatcctaatcattggagagtcaggggtgggcaagagctcccttctgctgaggttcacagacgacacattcgacccagaattggccgcaaccgacactgccggtcaagaacggttccggactctgacacccagctattacaggggagctcagggcgttatcttggtgtacgatgtgacaaggcgcgacacattcgtgaagctcgacaactggctgaatgaactggaaacctactgcaccagaaatgatatcgtgaatatgctggtaggtaataagattgacaaggagaatagggaggtagatcgaaacgaaggattgaagtttgcgagaaaacattccatgcttttcatcgaggcttctgccaaaacttgtgacggcgtgcagtgcgcgttcgaggaactggtggaaaaaatcatccaaaccccagggctttgggaatcagaaaatcaaaacaagggcgttaagttatcccaccgtgaggagggtcagggcggtggtgcttgtggaggctactgcagtgttttgtag

SEQ ID NO: 90460 - DNA, 617 bp, Artificial Sequence
  derived and/or modified sequence
cacccgggcggccagctgggctcggagcggaacggggtcaggatggacgaggacgtgctaaccaccctgaagatcctcatcatcggcgagagtggggtgggcaagtccagcctgctcttgaggttcacagatgatacgtttgatccagaacttgcagcaacaatagtttatgatgtcacaagaagagatacatttgttaaactggataattggttaaatgaattggaaacatactgtacaagaaatgacatagtaaacatgctagttggaaataaaatcgataaggaaaatcgtgaagtcgatagaaatgaaggcctgaaatttgcacgaaagcattccatgttatttatagaggcaagtgcaaaaacctgtgatggtgtacaatgtgcctttgaagaacttgttgaaaagatcattcagacccctggactgtgggaaagtgagaaccagaataaaggagtcaaactgtcacacagggaagaaggccaaggaggaggagcctgtggtggttattgctctgtgttataaactctgggaaattccatctcttgcatatttgatcagatagtgacatctttctgtatataaactctttaactgctattttagggaccttg

SEQ ID NO: 90461 - DNA, 2379 bp, Artificial Sequence
  derived and/or modified sequence
gaggcgcacccgggcggccagctgggctcggagcggaacggggtcaggatggacgaggacgtgctaaccaccctgaagatcctcatcatcggcgagagtggggtgggcaagtccagcctgctcttgaggttcacagatgatacgtttgatccagaacttgcagcaacagatactgctggtcaagagaggtttagaacattaactcccagctattatagaggtgcacagggtgttatattagtttatgatgtcacaagaagagatacatttgttaaactggataattggttaaatgaattggaaacatactgtacaagaaatgacatagtaaacatgctagttggaaataaaatcgataaggaaaatcgtgaagtcgatagaaatgaaggcctgaaatttgcacgaaagcattccatgttatttatagaggcaagtgcaaaaacctgtgatggtgtacaatgtgcctttgaagaacttgttgaaaagatcattcagacccctggactgtgggaaagtgagaaccagaataaaggagtcaaactgtcacacagggaagaaggccaaggaggaggagcctgtggtggttattgctctgtgttataaactctgggaaattccatctcttgcatatttgatcagatagtgacatctttctgtatataaactctttaactgctattttagggaccttgcagtttgcacataattgttttatatcatagcagtaaatatttgcaagaaatcccactcatcgaccccgggtaaaatgttatggtaagcatgcacagtttgcagtctacagtttttttatgtagcacaaaataggtgtacctttataagtacattcaattttatgatttacatttatcatgtaatttttaaaaaaatccatctatctaggatatgttgatacaaagtctgcttttgctattctttttgcttaaatactcctatcattttctgaattacttggtatttagaactcctagcaccacggggaagaatagaggtatcatcaaacgtggcaaattttctttcaggaataataaagagcatgattccacagcttttctgggatgtttgagattcttttttagtactaagcaaaattctcatcacagaatgtagcccaggccaatttataactaaatctctatttgttcagatgatgcttctaaaacagcattgataggttaaagaagcttggtatttttaatttacttcaatgattagctcagttgcttaactggagttttaatcctgtgatatgtacattggattcatgactgtgcagcatttttagttatgtggtgtttggcagaatgacaataaggttttcccccattttggtttcaggaggacatgaatagtgtgtttattgtaactcctcatacacttttaaaaccaacatcttttttcataaatgttggtagtgtttgtccaggtaccttaactgtagcttgtgtaatgttgatgaatatctgtatcttacggcttccataatggctagttgatattcaaaaacctatttctgtgttttgaggggtggggaaaaaaaacactaagtgataatttgaaaaaggcatattgcttccagattctgatgtgtgagggaaaatactgtcacaatgaaaatcttgacaatttacttaacaagtaaccagtagttcatcaaaaccaacttgtacagactaataaatctttttcacagtattcagttttctcacctcttgctattgtatattgtagatttttttcattcatgtgttatttaatttacactgatctctgctattttaaccccccaaataagttatttgtcctttaaggttggttactataatacccctcagtaagattccagtattaatttctgggcagtttgttctctgtatacaattgcaaatgataagcatttttgtgagtgaccacctttgcaatatgtttgttaatttacttcatgttgggttctttctgaaatgtacatctttacatataaaaacctcacattctacttgatttacacttcctagtctacattacatgtggttgaaggttttatacattctatatgcttttactaaatatacaagatttactactagaaatttggagaaagaacactaacacatgtacttgtgatttgttcatgttatattaaaacttgagatttgtgtatttatgtagagtctgtattgacaagactgttgttttttgctccttgagctatataataatctgtgtattggattgttgtcttgatttggtctaaatttgaatatatatgagttacttgaatataacaaaaatgaattttgtttgatagatttatattgtaacctttttctagttcttgaataaatatagcctgctttccct

SEQ ID NO: 90462 - DNA, 486 bp, Artificial Sequence
  derived and/or modified sequence
atggacgaggacgtgctgaccaccctgaagatcctgatcatcggcgagagcggcgtgggcaagagcagcctgctgctgagattcaccgacgacaccttcgaccccgagctggccgccaccatcgtgtacgacgtgaccagaagagacaccttcgtgaagctggacaactggctgaacgagctggagacctactgcaccagaaacgacatcgtgaacatgctggtgggcaacaagatcgacaaggagaacagagaggtggacagaaacgagggcctgaagttcgccagaaagcacagcatgctgttcatcgaggccagcgccaagacctgcgacggcgtgcagtgcgccttcgaggagctggtggagaagatcatccagacccccggcctgtgggagagcgagaaccagaacaagggcgtgaagctgagccacagagaggagggccagggcggcggcgcctgcggcggctactgcagcgtgctgtag

SEQ ID NO: 90463 - DNA, 555 bp, Artificial Sequence
  derived and/or modified sequence
atggacgaggacgtgctgaccaccctgaagatcctgatcatcggcgagagcggcgtgggcaagagcagcctgctgctgagattcaccgacgacaccttcgaccccgagctggccgccaccgacaccgccggccaggagagattcagaaccctgacccccagctactacagaggcgcccagggcgtgatcctggtgtacgacgtgaccagaagagacaccttcgtgaagctggacaactggctgaacgagctggagacctactgcaccagaaacgacatcgtgaacatgctggtgggcaacaagatcgacaaggagaacagagaggtggacagaaacgagggcctgaagttcgccagaaagcacagcatgctgttcatcgaggccagcgccaagacctgcgacggcgtgcagtgcgccttcgaggagctggtggagaagatcatccagacccccggcctgtgggagagcgagaaccagaacaagggcgtgaagctgagccacagagaggagggccagggcggcggcgcctgcggcggctactgcagcgtgctgtag

SEQ ID NO: 90464 - protein, 274 aa, Artificial Sequence
  derived and/or modified sequence
MARTTTTSSRIITGPSFLSGSTQCAGSVPTGAAYCQFMDMLFPGCISLKKVKFQAKLEHEYIHNFKLLQASFKRMNVDKVIPVEKLVKGRFQDNLDFIQWFKKFYDANYDGKEYDPVEARQGQDAIPPPDPGEQIFNLPKKSHHANSPTAGAAKSSPAAKPGSTPSRPSSAKRASSSGSASKSDKDLETQVIQLNEQVHSLKLALEGVEKERDFYFGKLREIELLCQEHGQENDDLVQRLMDILYASEEHEGHTEEPEAEEQAHEQQPPQQEEY

SEQ ID NO: 90465 - DNA, 825 bp, Artificial Sequence
  derived and/or modified sequence
atggcgcgcactactaccacatcatcccggattataacagggccctccttcctatccggaagtacacagtgcgcgggttcggtgcccactggagcagcatactgtcagtttatggacatgctgtttccgggttgtattagcttaaaaaaggtgaagttccaggccaagctagagcacgagtacatccacaactttaagcttctacaggctagcttcaagaggatgaacgtcgataaggtgatacctgtcgagaagttagttaagggccgatttcaagacaacctagattttatccagtggttcaaaaaattttatgatgccaactatgacggcaaggagtacgacccggtcgaagcgaggcagggacaggatgctatcccgccgcctgatccaggagagcagatttttaacctgcccaaaaagagccaccatgccaactcacctacagcaggcgcagccaaaagctctcctgccgccaaacccggatccacaccttcccggccaagcagcgccaaaagagcaagtagctctggcagcgcttctaaaagtgacaaggatctggaaacacaggtcattcagttaaacgaacaggtacactctctaaaactggcactcgagggtgtcgaaaaagagagagacttttatttcggaaagctccgggaaatagagttactctgccaagaacatggacaggaaaacgacgacctggtccaaaggcttatggatatcctgtatgcttctgaagagcacgagggtcatactgaagagcctgaggcagaagagcaggctcacgagcaacagccgcctcaacaggaagagtactag

SEQ ID NO: 90466 - DNA, 825 bp, Artificial Sequence
  derived and/or modified sequence
atggcccggaccaccaccaccagcagccgcatcatcaccggccccagcttcctgagcggcagcacccagtgtgccggctctgtgcccaccggggccgcctactgccagttcatggacatgctgtttcctggctgcatcagcctgaagaaggtgaagttccaggccaagctggagcacgagtacatccacaacttcaagctgctgcaggccagcttcaagaggatgaatgtggacaaggtgattcctgtggagaagctggtgaagggccgcttccaggacaacctggacttcatccagtggttcaagaagttctatgatgccaactatgatggcaaggagtatgaccctgtggaggcccggcagggccaggatgccatccccccaccagaccctggagagcagatcttcaacctgcccaagaagagccaccacgccaacagccccacagctggggccgccaagagcagccctgctgccaagccaggcagcacccccagccggcccagcagcgccaagagggccagcagcagcggcagcgccagcaagagtgacaaggacctggagacccaggtgatccagctgaatgagcaggtgcacagcctgaagctggccctggagggcgtggagaaggagcgggacttctactttgggaagctgcgggagattgagctgctgtgccaggagcacggccaggagaatgatgacctggtgcagaggctgatggacatcctgtatgccagcgaggagcacgagggccacacagaggagcctgaggccgaggagcaggcccacgagcagcagcccccccagcaggaggagtactag

SEQ ID NO: 90467 - DNA, 2401 bp, Artificial Sequence
  derived and/or modified sequence
gagagctgggagaaggcagtgagcgagcaggcggcaggcacggtccgtgcggagcaggcgagcgagcgggaagacgcagccaccttcctcaccagccagcccacagcggtttgttccccttctcgggagtgcgccaatgcctgggccgacccaaaccctgtccccaaatggcgagaacaacaacgacatcatccaggataataacgggaccatcattcctttccggaagcacacagtgcgcggggagcgttcctacaggagcggcctattgccaattcatggacatgctcttccctggctgcattagtttgaagaaagtaaaatttcaagcaaagctggaacatgaatatattcacaattttaaacttctgcaagcatcatttaagcgaatgaacgttgataaggtaattccagtggagaagctagtgaaaggacgtttccaggacaacctggattttattcaatggtttaagaaattctatgatgctaactacgatgggaaggagtatgatcctgtagaggcacgacaagggcaagatgcaattcctcctcctgaccctggtgaacagatcttcaacctgccaaaaaagtctcaccatgcaaactcccccacagcaggtgcagctaaatcaagtccagcagctaaaccaggatccacaccttctcgaccctcatcagccaaaagggcttcttccagtggctcagcatccaaatccgataaagatttagaaacgcaggtcatacagcttaatgaacaggtacattcattaaaacttgcccttgaaggcgtggaaaaggaaagggatttctactttgggaagttgagagagatcgagctactctgccaagaacacgggcaggaaaatgatgacctcgtgcagagactaatggacatcctgtatgcttcagaagaacacgagggccacacagaagagccggaagcagaggagcaagcccacgaacagcagcccccgcagcaggaagagtactgacccaccccggctgctcttgacacttccattgtgtgtgggaacgtttcttctggagaattggaacatgtgtggccccaagctcaacagaaaccagttgttcccaatctgccgttaccatcaacgcactgttgcatatgccagccactgcgcttggttcccattttctttgccaaggtgtattagcggacggccctctggccacctacccgagagatcgtagggtcacatacatccaacttcaccacttggctgcttgagattggttctgctcttttcttcatttctttccagaacaactctttcccaccccaacaccactgccaccacccctctttttatcctggtgtgaaacaatggtaatttgatatatggtatttatattggcatttttcaacccagtgtcactagatgtcacacacatttgtggtgctttgatgtttgcaagtctaacctctgaacataaatttggtcaaataattggaacaaagggaaacagatacttgatatgaaagccataatgacggtgacttgtgtcgtgggggaaaacataaggtcattttctccctctactcacaatactaaagggaaaaaatggattcaaagctaggatttcagggcccagcagtgttcctccatcagcatgttagacaactacacagtatgttgttagttttgaaagacattcactcaaggaaaacaccatctcaactttgcccgctcaccatgtcccttgcccccatgtagcccatttcccaggttatgctcttttctttctcagggtcctctttggtgggcagccactccccgagatgttgccatcagttttctgcagtccaaagagggtatggttaggtacgggtcttcctgcctcattcctcttcctctttgtgtaggtttcagccacaaaactgtcattcactctaggggacccctactaaagggtaacttcaggtgtgcagccctgagctccaaggctctgcaccatgccacacacttgctgtaaggctagaagtgaagaccttattaataggagcataattgcgagggagaatcatggttctgcagtctggtgtagacactggaataacagcacagaaaaatctatgactcccaatatcttctagaataaagaattttccctctttaacacaagggccctccttgtcattgaccttagctaaaccatggcaattcataaatagaggaaacattaatgaattaaaagcattccttattttttaactaatatttgtacattttcttagtctctttccaagtctttgcctcttttttttctttatttttattttttcctttgacagatggtatcccttcctggatcattcatttcaccttggtttctaactttaggtttactttcacttgttatttgacttagcaggtgcaac

SEQ ID NO: 90468 - DNA, 825 bp, Artificial Sequence
  derived and/or modified sequence
atggcccggaccaccaccaccagcagccggatcatcaccggcccctctttcctaagtgggagtacgcagtgcgctggtagcgttcctaccggcgccgcctattgtcagtttatggatatgttattcccagggtgtatctccctgaagaaggtgaaattccaagccaagcttgagcacgaatacatccataattttaagctgctacaggcgtcattcaaacgcatgaatgtggacaaagtgattccagttgagaaactggtcaaaggacgctttcaggacaacctggactttatccagtggttcaagaaattttatgatgctaattatgatggtaaagagtatgacccagtagaagccagacagggccaggatgccatccccccaccagatcccggcgagcagatttttaacctccctaaaaaaagccaccacgctaatagtccaaccgccggggccgccaaatcttctcctgccgcaaagcctgggtcaactccatcaagaccttcgtccgcaaaacgagcctcatcttctggtagtgccagcaagtctgacaaggatctggagacccaggtcatccagctgaacgaacaggtccattcactcaagttggctctcgaaggcgtagaaaaggagcgtgacttttacttcgggaagctgagagaaatcgaactgttgtgtcaggagcacgggcaagaaaacgatgatctcgtacagaggctcatggacatcctgtacgcctccgaagagcatgaaggccacacggaggagccggaggccgaggaacaggcccacgagcagcagcccccgcagcaggaggagtattag

SEQ ID NO: 90469 - DNA, 825 bp, Artificial Sequence
  derived and/or modified sequence
atggccagaactacgactacctccagcagaattattaccggacccagcttcctctccggctccacacagtgtgctggtagcgtgcctacgggagccgcttactgtcagttcatggacatgctgtttcccggatgcattagcttaaagaaggtgaagttccaagctaaacttgagcatgagtacatccacaacttcaaactcctgcaagctagctttaagcggatgaacgtggataaagtgattccagtcgagaagctggtgaagggccgattccaggataacctggattttatacagtggtttaaaaagttctacgacgccaattacgacggcaaagaatacgaccccgtcgaggcccgacaggggcaagacgctataccccctcccgaccctggagagcagatatttaatttgcctaaaaagtcccaccacgccaactccccaaccgctggggctgccaaatcaagccctgcggcaaagcccggtagtacaccatcccgtccgtcctctgccaaaagagccagcagttcgggtagtgccagcaaatcagacaaggatctggagactcaagtgatacaactgaatgaacaggtgcatagtctgaaattagcacttgaaggcgtggaaaaagaacgggatttttacttcggaaaactgagggagattgaacttctttgtcaagaacacggtcaggaaaatgatgacttggttcagcgactgatggatattctgtacgcctcggaggaacatgagggccacacagaagaaccagaggctgaggagcaggcccatgagcagcagccgccacagcaggaggagtactag

SEQ ID NO: 90470 - DNA, 825 bp, Artificial Sequence
  derived and/or modified sequence
atggccagaaccaccaccaccagcagcagaatcatcaccggccccagcttcctgagcggcagcacccagtgcgccggcagcgtgcccaccggcgccgcctactgccagttcatggacatgctgttccccggctgcatcagcctgaagaaggtgaagttccaggccaagctggagcacgagtacatccacaacttcaagctgctgcaggccagcttcaagagaatgaacgtggacaaggtgatccccgtggagaagctggtgaagggcagattccaggacaacctggacttcatccagtggttcaagaagttctacgacgccaactacgacggcaaggagtacgaccccgtggaggccagacagggccaggacgccatccccccccccgaccccggcgagcagatcttcaacctgcccaagaagagccaccacgccaacagccccaccgccggcgccgccaagagcagccccgccgccaagcccggcagcacccccagcagacccagcagcgccaagagagccagcagcagcggcagcgccagcaagagcgacaaggacctggagacccaggtgatccagctgaacgagcaggtgcacagcctgaagctggccctggagggcgtggagaaggagagagacttctacttcggcaagctgagagagatcgagctgctgtgccaggagcacggccaggagaacgacgacctggtgcagagactgatggacatcctgtacgccagcgaggagcacgagggccacaccgaggagcccgaggccgaggagcaggcccacgagcagcagcccccccagcaggaggagtactag

SEQ ID NO: 90471 - protein, 434 aa, Artificial Sequence
  derived and/or modified sequence
MEGAELAGKILSTWLTLVLGFILLPSVFGVSLGISEIYMKILVKTLEWATIRIEKGTPKESILKNSASVGIIQRDESPMEKGLSGLRGRDFELSDVFYFSKKGLEAIVEDEVTQRFSSEELVSWNLLTRTNVNFQYISLRLTMVWVLGVIVRYCVLLPLRVTLAFIGISLLVIGTTLVGQLPDSSLKNWLSELVHLTCCRICVRALSGTIHYHNKQYRPQKGGICVANHTSPIDVLILTTDGCYAMVGQVHGGLMGIIQRAMVKACPHVWFERSEMKDRHLVTKRLKEHIADKKKLPILIFPEGTCINNTSVMMFKKGSFEIGGTIHPVAIKYNPQFGDAFWNSSKYNMVSYLLRMMTSWAIVCDVWYMPPMTREEGEDAVQFANRVKSAIAIQGGLTELPWDGGLKRAKVKDIFKEEQQKNYSKMIVGNGSLS

SEQ ID NO: 90472 - DNA, 1305 bp, Artificial Sequence
  derived and/or modified sequence
atggagggcgcagaactcgccggaaaaatcttatctacctggctaacccttgtgctgggatttatcttgcttccctcagtcttcggcgttagcctaggaatcagcgagatttacatgaagatcctcgtcaaaactctcgagtgggccaccatcagaatcgagaagggcacgcccaaagaatcaattcttaagaattcggcaagtgttggcataattcaacgagatgagtcccccatggaaaaagggttgagcgggctcagaggacgggacttcgagctgagcgacgttttttatttttccaagaaaggactagaggcgattgtcgaagatgaggtgactcagcgattttctagtgaggagctagtttcttggaaccttctgacccgtaccaatgtcaacttccagtatatttcgctccggctaaccatggtttgggttctgggcgtgatcgtccggtattgtgtgctactaccattacgtgtgaccttggcttttatcggcatctcactgttggtcattggcaccacactagtaggccagctgcctgacagtagccttaaaaattggttgtccgagctggtgcacctcacttgttgtagaatatgtgtccgcgctctttccgggactatccattaccacaataaacagtataggccacaaaaaggaggtatctgcgtggccaatcataccagtcccattgatgtgctgatcctgaccactgatggctgctacgcaatggtgggccaggtacacggtggcctgatgggcataatccagcgagcgatggtcaaggcttgcccccacgtgtggtttgaacgttctgaaatgaaggaccggcatcttgtgacaaagcgcctgaaggagcacattgcggataaaaagaagcttccaattctcattttccctgaaggcacctgtataaacaacacgtctgtgatgatgtttaagaaaggttcattcgaaatcgggggcaccatccaccctgtcgcaattaaatacaacccacagtttggagatgccttttggaatagtagcaaatacaacatggtctcctatctcctcaggatgatgacttcctgggcaattgtgtgtgacgtttggtacatgccgccaatgactagggaagaaggagaagatgccgtgcagtttgctaatcgcgtcaagagcgccatcgcgattcaaggagggttgactgaacttccctgggacggaggcctcaagagagccaaagtaaaggacatctttaaggaagagcagcagaaaaattacagcaagatgatcgtcggtaacgggagcttatcctag

SEQ ID NO: 90473 - DNA, 1305 bp, Artificial Sequence
  derived and/or modified sequence
atggaaggagccgagcttgccggtaagattctttcgacttggctgaccttagtactcggctttatattgttaccctcggttttcggtgtgtctctagggatttcggaaatctacatgaaaatactggtcaagactctcgaatgggccaccattcgaattgagaagggaacccccaaagaatccattcttaagaacagtgcatccgtcggcatcatccagagagatgagagcccaatggagaagggcctctccgggttacgtggacgggattttgaattgtctgacgtcttctatttctctaagaaaggactggaggctattgttgaagacgaagtgacccaacggttttcctcggaggagctggtgtcctggaatcttctgactcggacaaacgtgaacttccagtacatatctctgagactgaccatggtgtgggttttgggggtgatagtgagatactgcgttttgttacccctacgggttacattggccttcataggcatctcactgctggtcatcggtaccaccctcgtgggccagcttcctgactcttccctgaaaaactggctatccgaactggttcatctcacatgctgccgaatatgtgtaagagctcttagcggaactatccactatcacaataaacaatatagacctcagaagggtggcatctgtgtcgccaatcacaccagcccaattgacgtgttaatactcactacggacggttgttacgctatggtggggcaggtgcacggcggccttatgggtatcatccagcgagcaatggtgaaagcttgtcctcacgtttggttcgagcggagcgagatgaaagaccggcacttggtcactaaacgcctgaaggagcatatcgccgacaaaaagaagctgccaatacttattttcccagagggtacatgcataaataatacaagcgtgatgatgtttaagaagggctcattcgagattggcgggaccattcatcccgtagcaattaaatacaatccacaatttggcgacgcattttggaactcttccaagtacaacatggtaagttacctcctccgcatgatgacctcatgggcgatcgtgtgcgatgtgtggtacatgcctccgatgaccagggaggagggcgaggacgctgtacagtttgcgaatagagttaaatccgccattgctattcagggaggcctgactgaactgccatgggacgggggcctcaaacgagctaaggtcaaagacatctttaaagaagaacaacaaaagaattattccaagatgatcgttgggaacggctccctgtcctag

SEQ ID NO: 90474 - DNA, 1305 bp, Artificial Sequence
  derived and/or modified sequence
atggagggcgctgagctggccggcaagatcctgagcacctggctgaccctggtgctgggcttcatcctgctgcccagcgtgtttggagtgtccctgggcatcagcgagatctacatgaagatcctggtgaagaccctggagtgggccaccatcagaattgagaagggcacccccaaggagagcatcctgaagaacagcgcctctgtgggcatcatccagagagatgagagccccatggagaagggcctgagcggcctgcggggccgggactttgagctgagtgatgtgttctacttcagcaagaagggcctggaggccatcgtggaggatgaggtgacccagcgcttcagcagcgaggagctggtgtcctggaacctgctgaccaggaccaacgtgaacttccagtacatcagcctgcggctgaccatggtgtgggtgctgggcgtcatcgtgcgctactgtgtgctgctgcccctgcgggtgaccctggccttcatcggcatcagcctgctggtgattggcaccaccctggtgggccagctgcctgacagcagcctgaagaactggctgtctgagctggtgcacctgacctgctgccgcatctgtgtgcgggccctgagcggcaccatccactaccacaacaagcagtaccggccccagaagggcggcatctgtgtggccaaccacaccagccccattgatgtgctgatcctgaccacagatggctgctacgccatggtgggccaggtgcatggaggcctgatgggcatcatccagagggccatggtgaaggcctgcccccacgtgtggtttgagaggtctgagatgaaggacagacacctggtgaccaagaggctgaaggagcacatcgctgacaagaagaagctgcccatcctgatcttccctgagggcacctgcatcaacaacacctctgtgatgatgttcaagaagggcagctttgagatcggcggcaccatccaccctgtggccatcaagtacaacccccagtttggagatgccttctggaacagcagcaagtacaacatggtgtcctacctgctgaggatgatgacctcctgggccatcgtgtgtgatgtgtggtacatgccacccatgacccgggaggagggggaggatgctgtgcagtttgccaacagagtgaagagcgccatcgccatccagggcggcctgacagagctgccctgggatggcggcctgaagagggccaaggtgaaggacatcttcaaggaggagcagcagaagaactacagcaagatgattgtgggcaatggcagcctgtcctag

SEQ ID NO: 90475 - DNA, 1305 bp, Artificial Sequence
  derived and/or modified sequence
atggagggcgccgagctggccggcaagatcctgagcacctggctgacgctcgttctcggatttattctgctgccttccgtctttggagtgagtttaggcataagcgaaatctacatgaagatactcgtaaaaaccctggagtgggcaactattaggatcgaaaaaggcacgcctaaggagagcattttaaagaacagcgctagcgtgggaattattcagagggatgaatcaccaatggaaaaagggctgtccggactaaggggacgtgacttcgaattgagcgatgtcttttacttttcaaaaaagggactcgaggctatagtggaagacgaagtaacgcagaggttcagctccgaagagctggttagctggaatctgctgactcgtaccaatgttaatttccagtacatctccctgcggctcacaatggtgtgggtgttaggtgtgatagttcgatactgtgtactgctgccactgagggtcactctggcgttcatcggcattagcctgctggtgattggtactacactcgttggccaactccccgacagctctctgaagaattggttgtccgagctcgtgcatctcacctgttgcagaatctgcgtgagagctctgtccggaactatccattaccataacaagcagtaccgcccacaaaaaggaggcatctgtgtggcgaaccacactagtccaattgacgtcctcattcttaccacagatgggtgttacgcaatggtgggacaggttcatggtggcttaatgggtataattcagagggctatggtgaaggcttgcccacatgtgtggttcgaaagaagcgagatgaaagatcgacatctggtaacaaagagactgaaggagcacatagctgataagaagaaactgcctattctgattttccctgaggggacttgtattaataatacatctgttatgatgtttaagaaagggtcgtttgagatcgggggcacaatacaccccgtggcaattaagtacaatcctcaatttggcgacgcattctggaattcttcgaagtataatatggtctcgtacctgctccgcatgatgacaagttgggccatagtttgcgacgtgtggtacatgccacctatgacgagggaggagggggaagacgcagtgcagtttgcaaacagagtaaaatctgccattgccatacagggaggcctgactgaactgccctgggacggcggcttgaaacgtgccaaggtaaaggatatcttcaaggaggagcagcagaaaaactactctaaaatgatagttgggaatggatcactgagctag

SEQ ID NO: 90476 - DNA, 1305 bp, Artificial Sequence
  derived and/or modified sequence
atggagggcgccgagctggccggcaagatcctgagcacctggctgacgctcgtcctgggattcattctgctacccagtgtgttcggtgtatccttggggattagtgaaatctatatgaagatcctcgtgaagaccctcgagtgggccactattagaattgagaagggcacccctaaggagtccattctaaagaatagcgctagcgtcggaatcatccagcgcgatgaatcacccatggagaaaggcctgagtggattacgaggaagagattttgaactgtcagatgtgttttacttctcaaagaaaggtctggaagccatcgtggaggacgaggtcacccaaagattctcatctgaagaacttgtctcctggaatttgctcacccggacgaatgttaactttcaatatatttcattacgactgaccatggtttgggtccttggcgtaatcgtcaggtactgtgtcctgctgcccctccgggttacactggccttcattggaatcagcctgctcgtgattggtaccacacttgtggggcagcttccagactcgtcgctgaagaattggttatcagagctcgtccatctgacatgttgccggatctgtgtccgggctctgtccgggaccatccattatcataataaacagtacagaccccagaagggaggcatctgcgtcgcgaatcacacttcccccatcgatgtcctgatcttgaccacggacgggtgctacgctatggttgggcaggtccacggcggccttatgggtattatacagagagccatggtgaaagcgtgtccacatgtgtggttcgagcgcagcgagatgaaagatcgacatctggtgacaaaaaggttaaaggagcatatagccgataaaaagaaactccccatattaatatttcctgaaggaacttgcattaacaatacctctgtgatgatgttcaaaaaggggtcgtttgagattggcggaacaatacatcctgttgccatcaaatacaacccccagtttggagatgccttctggaatagtagtaagtacaacatggtgtcttacttacttagaatgatgacttcatgggccatcgtgtgtgatgtctggtacatgcctcctatgacccgcgaggagggcgaggacgctgtacagttcgctaacagggtcaaatccgccatcgcaatccaaggcggtctgacagagttaccatgggacggcgggttgaagagggcaaaggtgaaggacatctttaaggaagaacaacagaagaactatagcaagatgattgtcggcaacggttccctgtcatag

SEQ ID NO: 90477 - DNA, 1305 bp, Artificial Sequence
  derived and/or modified sequence
atggagggtgccgaactcgctggcaaaatcctatcaacatggcttacactggtcctgggatttattctcctcccctccgttttcggagtctcattgggcatcagcgaaatctatatgaagatcctggtcaaaaccctggagtgggcaaccattcggatagagaaagggacccctaaagaaagcattctgaagaactctgctagcgttggaataatacagcgcgacgaaagtcctatggagaaagggttgtctggtttgaggggacgagattttgagctcagcgacgtattctactttagcaagaaaggactagaggcaatcgttgaagatgaagtgacccaacgcttttcaagcgaggaattggtatcttggaacctcctcaccagaaccaacgtgaacttccagtacatttcgttacgcctcaccatggtgtgggttctaggtgtgattgttcggtattgcgtgttacttccacttagagttaccctggcattcatcgggatcagccttctggtaattggaaccaccctcgtcggccagcttccagacagctctcttaagaattggcttagcgagctcgtgcacttgacctgttgtcgaatttgcgtgagagctctttcaggaacgatccattaccacaataagcagtacaggcctcagaaagggggaatttgtgtcgcgaatcacacttcaccaatagacgtcctcatcctgacgaccgacgggtgttacgcgatggtgggacaggtccatggcggactgatggggatcatccaacgtgctatggtgaaagcctgtccacatgtgtggtttgaacgttcagagatgaaagaccggcacctggtaaccaaacgactgaaggaacacatcgctgacaagaagaagcttcccatactgatctttccagagggcacgtgcataaacaatacgtccgtaatgatgtttaagaagggctcttttgaaatcgggggtacaattcatcctgtagctatcaagtacaaccctcagtttggcgacgcattttggaactcatccaaatacaacatggtcagctaccttctgcgaatgatgacaagttgggcaatcgtgtgtgacgtctggtacatgccccctatgacacgagaggagggcgaagacgcggttcagttcgccaatagggtcaaaagcgcgatcgccatccagggcggactgacagaactgccatgggacggtggcctgaaaagagctaaggtcaaggacatatttaaagaggagcagcagaagaactatagcaagatgatcgtgggcaatgggtctctaagctag

SEQ ID NO: 90478 - DNA, 1305 bp, Artificial Sequence
  derived and/or modified sequence
atggagggggctgagcttgccggaaaaattctgtctacctggcttacccttgtgttaggctttattctgctgccctccgtgttcggtgtgtctcttggtattagtgagatttacatgaaaatactggtgaagacgctggagtgggctactattcgcatcgagaaaggaacccccaaggaaagtattctgaagaatagcgcctcggtgggtataatccagcgtgatgagtccccaatggaaaaggggctgagcggcttgcgtgggagagacttcgagttgagcgatgtgttttatttttcgaagaaagggcttgaagctattgtagaagacgaggttacccaacgcttctcttcagaggaattggtatcttggaacctgctgacgcggacaaatgttaattttcaatacatatcacttcggctcactatggtttgggtactcggcgtgatcgttcgatattgtgtcttgctgcccctgagagtgacgctagctttcatcgggatctctttattagtgattgggactacgctcgtgggacagctgccagactcatctttaaaaaattggctgtctgagcttgtgcatctcacatgctgcagaatttgcgtaagggcattaagcgggaccattcactatcacaacaagcagtacagaccccagaaaggcggtatttgtgtggctaatcacacttcgcccatagacgtgctgattttaactactgatggttgctacgctatggtcggacaagtccatggcggactgatgggcataattcaacgcgctatggtgaaggcctgcccgcacgtgtggttcgaacggtctgagatgaaagatcggcacctggtgactaagcgcctgaaagaacatatagccgataaaaagaagctgccaattctgatttttccagaaggtacctgtatcaataatactagcgtcatgatgtttaagaaagggagcttcgagatcggcggaacaattcacccggtcgcaataaagtacaacccccagtttggcgacgcattctggaattcctccaaatataacatggttagttatctgctccgcatgatgacaagctgggcaatcgtctgcgacgtctggtacatgcccccaatgacccgggaggagggagaggacgccgtgcaatttgcaaatcgggttaagtctgctatcgccatccagggcggactgaccgaactcccttgggatgggggtctcaaaagagctaaagtgaaggatattttcaaggaagaacagcagaagaactacagcaagatgatcgtggggaatgggagcttgagttag

SEQ ID NO: 90479 - DNA, 2625 bp, Artificial Sequence
  derived and/or modified sequence
gttaactggcaggggcgaggaggagcccagggaggaaggaaggatattgccgtaattctgaaagtttttttccttcctctcttcccttcgcagaggtgagtgccgggctcggcgctctgctcctggagctcccgcgggactgcctggggacagggactgctgtggcgctcggccctccactgcggacctctcctgagtgggtgcgccgagtcatggagggcgcagagctggccgggaagatcctttccacctggctgacgctggttctcggcttcatccttttaccttcggtcttcggagtgtctctgggcatctccgagatctacatgaagatcctagtgaaaactttagagtgggccacaatacgaattgaaaaaggaaccccaaaggagtcgattcttaaaaactctgcttctgttggtattatccaaagagatgagtcacccatggaaaaagggctctctggtctacgaggaagggactttgagctgtctgacgtgttttatttctccaagaagggattggaagccattgtagaagatgaagtgacccagaggttttcctcagaggagctagtgtcatggaatctcctcacaagaaccaatgtaaatttccagtacatcagtctgcggctcactatggtgtgggtgctgggcgtcatagtgcgctattgtgtcctactgcctctgagggttaccttggctttcattgggatcagtttgctggttataggaactacactggttgggcagctgccagacagcagcctcaaaaactggctgagtgaactggtccatctgacttgctgccggatctgtgtgcgagccctctctggtaccattcattatcataacaagcagtacagaccccagaagggaggcatttgtgttgccaaccatacttcccccattgatgttttaatcttgacaacggatggatgttatgctatggttggccaggttcatggcggcttgatgggaattattcagagagctatggtcaaggcttgtcctcatgtctggtttgaacgctcagaaatgaaggatcgacacctggttactaagagactaaaagaacatattgctgataagaagaaactacccatactaatttttcctgaaggaacttgcatcaacaatacttcagtcatgatgtttaaaaaggggagctttgaaattggaggaaccatacatccagttgcaattaagtataaccctcagttcggtgatgcattttggaacagtagtaaatacaacatggtgagctacctgcttcgaatgatgaccagctgggccatcgtctgtgacgtgtggtacatgccccccatgaccagagaggaaggagaagatgcagtccagtttgctaacagggttaagtctgctattgctatacaaggaggcctgactgaacttccctgggatggaggactaaagagagcaaaggtgaaggacatctttaaggaagagcagcagaaaaattacagcaagatgattgtgggcaatggatctctcagctaagaggacggatgacagcctttagatctagaactagcccttagaaatggaatggctttttttgttttgttttgttttattgttttgtttttattattgttaatcttttctacagaatgattgtctctacctctttatgccagaggcagaacctacaggtgccctttttggcttttgttgttgttgtaacattagccccatggattgtaaggtggtttactgagttaaaacagattctgcttttgtaaaatgatggcatcactgtggactgaatgaaatatttgtatagaaaaaagtgcttgaaaagtgtgtttggaactcatcgatagggtaattctccaaaaatgcccaaactctttttctgtaattagccttgccactttcttcagtcacttaaatggtgagattacacatcagtgcaagatgaccattatggttatggtctactgcaaggttgaaaggaaaaatggaggattgtatttaggaaaagggacaactttgtggccacctgctctgaaagtcaaaaggaaatgtaaattagtgtcattagtgtgttggaagagaaatactattcagtaagcttcgccaaagaaaagtgagtcaaagttaatgtgtgtgcgcatttatatgtaggcagctcgtagaccacattttaaccagcaactggtaacaaagagcttagttttccttgtttgaatgctgtagatctgtacctagtacccctcccatctactgatttgtttgtttttgtaaccaaacacattttcagatagaaggagccttaaaaaaaaaaaatcacattgagtaacttcagtatgaatgaatgagagtgtgtggagctacccctcaccctccacccctttgtgctttttattcccgaattttcccagtctcttaaacagaaaaatgactgatataattatcttttggaaactgagccttaattttttttagagggggaaataagttttccccaactcacacagcataagcaatgtttgacagcaatataatgccgttgtaaactactgagagtattgtatctgttctggtaaccatgtacagaatgtgaaactgtcttatgaatataaataaattctatatttctaaa

SEQ ID NO: 90480 - DNA, 2631 bp, Artificial Sequence
  derived and/or modified sequence
agcttccagcacagcccgcggcccggtgccagctccgccggcgaccggtgtgccaaagtgcggtgctcccgcagggaacctggctcggggagggcctccaggtgagtgccgggctcggcgctctgctcctggagctcccgcgggactgcctggggacagggactgctgtggcgctcggccctccactgcggacctctcctgagtgggtgcgccgagtcatggagggcgcagagctggccgggaagatcctttccacctggctgacgctggttctcggcttcatccttttaccttcggtcttcggagtgtctctgggcatctccgagatctacatgaagatcctagtgaaaactttagagtgggccacaatacgaattgaaaaaggaaccccaaaggagtcgattcttaaaaactctgcttctgttggtattatccaaagagatgagtcacccatggaaaaagggctctctggtctacgaggaagggactttgagctgtctgacgtgttttatttctccaagaagggattggaagccattgtagaagatgaagtgacccagaggttttcctcagaggagctagtgtcatggaatctcctcacaagaaccaatgtaaatttccagtacatcagtctgcggctcactatggtgtgggtgctgggcgtcatagtgcgctattgtgtcctactgcctctgagggttaccttggctttcattgggatcagtttgctggttataggaactacactggttgggcagctgccagacagcagcctcaaaaactggctgagtgaactggtccatctgacttgctgccggatctgtgtgcgagccctctctggtaccattcattatcataacaagcagtacagaccccagaagggaggcatttgtgttgccaaccatacttcccccattgatgttttaatcttgacaacggatggatgttatgctatggttggccaggttcatggcggcttgatgggaattattcagagagctatggtcaaggcttgtcctcatgtctggtttgaacgctcagaaatgaaggatcgacacctggttactaagagactaaaagaacatattgctgataagaagaaactacccatactaatttttcctgaaggaacttgcatcaacaatacttcagtcatgatgtttaaaaaggggagctttgaaattggaggaaccatacatccagttgcaattaagtataaccctcagttcggtgatgcattttggaacagtagtaaatacaacatggtgagctacctgcttcgaatgatgaccagctgggccatcgtctgtgacgtgtggtacatgccccccatgaccagagaggaaggagaagatgcagtccagtttgctaacagggttaagtctgctattgctatacaaggaggcctgactgaacttccctgggatggaggactaaagagagcaaaggtgaaggacatctttaaggaagagcagcagaaaaattacagcaagatgattgtgggcaatggatctctcagctaagaggacggatgacagcctttagatctagaactagcccttagaaatggaatggctttttttgttttgttttgttttattgttttgtttttattattgttaatcttttctacagaatgattgtctctacctctttatgccagaggcagaacctacaggtgccctttttggcttttgttgttgttgtaacattagccccatggattgtaaggtggtttactgagttaaaacagattctgcttttgtaaaatgatggcatcactgtggactgaatgaaatatttgtatagaaaaaagtgcttgaaaagtgtgtttggaactcatcgatagggtaattctccaaaaatgcccaaactctttttctgtaattagccttgccactttcttcagtcacttaaatggtgagattacacatcagtgcaagatgaccattatggttatggtctactgcaaggttgaaaggaaaaatggaggattgtatttaggaaaagggacaactttgtggccacctgctctgaaagtcaaaaggaaatgtaaattagtgtcattagtgtgttggaagagaaatactattcagtaagcttcgccaaagaaaagtgagtcaaagttaatgtgtgtgcgcatttatatgtaggcagctcgtagaccacattttaaccagcaactggtaacaaagagcttagttttccttgtttgaatgctgtagatctgtacctagtacccctcccatctactgatttgtttgtttttgtaaccaaacacattttcagatagaaggagccttaaaaaaaaaaaatcacattgagtaacttcagtatgaatgaatgagagtgtgtggagctacccctcaccctccacccctttgtgctttttattcccgaattttcccagtctcttaaacagaaaaatgactgatataattatcttttggaaactgagccttaattttttttagagggggaaataagttttccccaactcacacagcataagcaatgtttgacagcaatataatgccgttgtaaactactgagagtattgtatctgttctggtaaccatgtacagaatgtgaaactgtcttatgaatataaataaattctatatttctaaa

SEQ ID NO: 90481 - DNA, 1305 bp, Artificial Sequence
  derived and/or modified sequence
atggagggcgccgagctggccggcaagatcctgagcacctggctgaccctggtgctgggcttcatcctgctgcccagcgtgttcggcgtgagcctgggcatcagcgagatctacatgaagatcctggtgaagaccctggagtgggccaccatcagaatcgagaagggcacccccaaggagagcatcctgaagaacagcgccagcgtgggcatcatccagagagacgagagccccatggagaagggcctgagcggcctgagaggcagagacttcgagctgagcgacgtgttctacttcagcaagaagggcctggaggccatcgtggaggacgaggtgacccagagattcagcagcgaggagctggtgagctggaacctgctgaccagaaccaacgtgaacttccagtacatcagcctgagactgaccatggtgtgggtgctgggcgtgatcgtgagatactgcgtgctgctgcccctgagagtgaccctggccttcatcggcatcagcctgctggtgatcggcaccaccctggtgggccagctgcccgacagcagcctgaagaactggctgagcgagctggtgcacctgacctgctgcagaatctgcgtgagagccctgagcggcaccatccactaccacaacaagcagtacagaccccagaagggcggcatctgcgtggccaaccacaccagccccatcgacgtgctgatcctgaccaccgacggctgctacgccatggtgggccaggtgcacggcggcctgatgggcatcatccagagagccatggtgaaggcctgcccccacgtgtggttcgagagaagcgagatgaaggacagacacctggtgaccaagagactgaaggagcacatcgccgacaagaagaagctgcccatcctgatcttccccgagggcacctgcatcaacaacaccagcgtgatgatgttcaagaagggcagcttcgagatcggcggcaccatccaccccgtggccatcaagtacaacccccagttcggcgacgccttctggaacagcagcaagtacaacatggtgagctacctgctgagaatgatgaccagctgggccatcgtgtgcgacgtgtggtacatgccccccatgaccagagaggagggcgaggacgccgtgcagttcgccaacagagtgaagagcgccatcgccatccagggcggcctgaccgagctgccctgggacggcggcctgaagagagccaaggtgaaggacatcttcaaggaggagcagcagaagaactacagcaagatgatcgtgggcaacggcagcctgagctag

SEQ ID NO: 90482 - protein, 763 aa, Artificial Sequence
  derived and/or modified sequence
MSRRKISSESFSSLGSDYLETSPEEEGECPLSRLCWNGSRSPPGPLEPSPAAAAAAAAPAPTPAASAAAAAATAGARRVQRRRRVNLDSLGESISRLTAPSPQTIQQTLKRTLQYYEHQVIGYRDAEKNFHNISNRCSYADHSNKEEIEDVSGILQCTANILGLKFEEIQKRFGEEFFNICFHENERVLRAVGGTLQDFFNGFDALLEHIRTSFGKQATLESPSFLCKELPEGTLMLHYFHPHHIVGFAMLGMIKAAGKKIYRLDVEVEQVANEKLCSDVSNPGNCSCLTFLIKECENTNIMKNLPQGTSQVPADLRISINTFCRAFPFHLMFDPSMSVLQLGEGLRKQLRCDTHKVLKFEDCFEIVSPKVNATFERVLLRLSTPFVIRTKPEASGSENKDKVMEVKGQMIHVPESNSILFLGSPCVDKLDELMGRGLHLSDIPIHDATRDVILVGEQAKAQDGLKKRMDKLKATLERTHQALEEEKKKTVDLLYSIFPGDVAQQLWQGQQVQARKFDDVTMLFSDIVGFTAICAQCTPMQVISMLNELYTRFDHQCGFLDIYKVETIGDAYCVAAGLHRKSLCHAKPIALMALKMMELSEEVLTPDGRPIQPQRSELLFSFPVSIQLVPDQHQSETDLGTEKMRIGIHSGSVLAGVVGVRMPRYCLFGNNVTLASKFESGSHPRRINVSPTTYQLLKREESFTFIPRSREELPDNFPKEIPGICYFLEVRTGPKPPKPSLSSSRIKKVSYNIGTMFLRETSL

SEQ ID NO: 90483 - DNA, 2292 bp, Artificial Sequence
  derived and/or modified sequence
atgagtcgtagaaaaatttcgagcgaaagttttagcagcctgggatcagattatctcgagacctcccccgaggaggaaggcgagtgccccctctctcgcctgtgttggaatgggagccggtccccccctggccccctggaaccctcacccgccgctgctgccgctgccgctgcaccagcccccacacccgcagcctctgcagcagctgccgccgccaccgccggcgctcgccgcgttcagaggcggaggcgggtgaatctcgactctctgggtgaaagcataagccgtttgacagcaccctcccctcagaccattcagcagacactgaagcgcaccctgcagtattatgagcaccaagtgattggatatcgcgacgccgaaaagaactttcacaacatttcaaaccggtgtagttacgccgatcactccaacaaggaagaaatcgaggacgtctctggtatcctgcaatgcactgctaatatcttaggattaaagtttgaggaaatacaaaagaggttcggcgaagagtttttcaacatctgttttcacgagaatgagcgagtcctccgggcggtggggggaactctccaggatttcttcaatggctttgatgcccttctcgagcacataagaacatctttcggtaagcaggccactctcgagtcgccctcattcctctgcaaggagttgcctgaagggacattgatgctgcactacttccacccacaccacattgtgggcttcgctatgctgggaatgatcaaggccgcgggcaaaaaaatttaccggctggatgtcgaggtcgaacaggttgccaacgagaaactctgttccgacgtcagcaaccccggaaattgttcttgtctgaccttcctaatcaaggagtgtgagaacactaacatcatgaagaatctgccgcagggtacctctcaagttccggccgacctaaggattagcatcaacacattttgtcgggctttcccattccatctgatgttcgatccttcaatgagtgtgctacagctgggagagggcctccgtaagcagcttagatgtgacacacataaggttctaaagtttgaagattgcttcgagatcgtttctccaaaggtcaatgccaccttcgagcgagttctgctccgcctgtctaccccttttgtgattcgaaccaaaccagaagcttcgggatctgagaacaaagataaagtcatggaagtcaaagggcagatgattcacgttccggaaagcaactccattctgtttctcggctctccgtgcgtggataaactcgatgagctgatgggacgcggccttcacctcagtgatatccctattcatgacgcaacccgggatgtaatccttgtcggagagcaggccaaggcgcaagacggtcttaagaaacggatggacaaactgaaggccaccctggagcgcacccaccaggcactggaagaagagaagaagaagactgtggatttgctgtactctatcttcccaggggatgtggcccagcagctgtggcagggccagcaggtccaggccagaaagttcgacgatgtaacaatgctgttttctgacattgtaggatttactgcaatctgcgctcagtgtacaccaatgcaagtgatatccatgctgaacgagctctatactaggtttgatcaccaatgcggcttcctagacatttataaagttgagaccataggggacgcttactgcgtggccgctggactacatcgaaaaagcctctgtcatgcaaaaccgattgcattaatggcactgaagatgatggaactgtctgaggaagtccttacccccgatgggcgcccaatccagcctcagcggtccgaactgctattcagcttccccgtatccattcagctcgttcccgaccagcaccaatccgaaaccgacctgggtacagaaaagatgcgaataggcatccatagtggatccgtgctcgccggcgttgttggcgtgcgaatgcctagatattgtcttttcgggaataatgtgacgttggcctccaaatttgagtccgggagtcaccctaggcgaatcaacgtgagcccaaccacataccagctcttaaagagggaagagtctttcacattcatacccaggagtcgtgaagagcttccagacaactttcccaaggaaatcccgggaatctgctactttctagaagtgagaaccgggccgaaacctcccaagccatcattgagttcgagccggattaagaaggtttcctataacataggcacaatgtttctgagagagacttctctgtag

SEQ ID NO: 90484 - DNA, 3047 bp, Artificial Sequence
  derived and/or modified sequence
tgggccgcagccctccccgccccgccgaccgcggtcacacactctcggagcctccccgtgagcgggagcgcggcgcacggcgatgcgccgaggcgggcgctgaggcggcgccgcgcgagcagcagcagaggcggcggcggcccccagcccagcccggcgccgccgccgagcccgggccccaaggtgcggcggcgccccaagttcccgccatgagcagccggctcggggggctccgcggccccggggactcccgccccgccgggcgcgaccgcagcgccccgcggccccgacgcgcttaacgttgtcgcttgccggtcccgccaccgccgcctccgccgccgctcgcgtcctcgccgccaccgcctcggccgctgcagctccgccggcagcatgtctcgaaggaagatttcgtccgagtccttcagctccctgggctccgactacctggagaccagcccggaggaggagggggagtgccccctgtctaggctctgctggaatggcagccggagcccgcccgggccgctggagcccagcccggccgcagctgccgctgccgccgccccggccccgaccccggctgcttctgccgccgccgccgctgccactgccggggccaggagggtgcagcgccggaggcgggtcaacctggactcgctgggcgagagcatcagccgcctgacggcgccctcgcctcagacgatacagcagactctcaagaggacactgcagtattatgaacatcaagttattggttacagggatgcagaaaagaatttccacaatatctctaacagatgctcctatgcagaccactccaacaaagaagaaattgaagatgtctcaggaattcttcagtgtactgctaatatactcggtttgaagtttgaggaaattcaaaaaagatttggtgaagagttctttaatatatgctttcatgagaatgagagagtccttcgagctgtaggtggcactttgcaggacttttttaacggctttgatgctttgttggaacacattagaacttcttttggaaaacaggccactctggagtcaccatctttcctatgcaaagagctccctgaaggtactctcatgctccactacttccaccctcaccatattgtggggtttgcaatgctggggatgattaaggctgcaggaaagaagatctatcggctggatgtggaagtggaacaggttgcaaatgagaagctatgctctgatgtttcaaacccaggcaattgtagctgtcttactttccttatcaaagaatgtgaaaatactaatatcatgaagaaccttccacagggaacctcccaagttcctgcggacctcagaattagcatcaacaccttctgtagagccttccctttccacttgatgtttgatcccagcatgtcagtccttcagttgggggaaggtctaaggaagcagcttcgatgtgacactcacaaagtgctcaagtttgaggactgcttcgagattgtatctccaaaggttaatgccacctttgaaagggtcctgctgcgactgtctaccccgtttgtgattagaaccaagcctgaggcttctggctctgaaaataaagacaaggtgatggaagtcaaaggacaaatgatccatgttccagaatcaaattccattttatttttgggctctccatgtgtggacaagttggatgaactcatgggccgagggctacatctctcagacatccctatccatgatgccacccgagatgtcattttggttggtgagcaggcaaaggcccaagatgggttgaagaaaaggatggataaattaaaggcaactttagaaagaactcaccaggccctggaagaagagaaaaagaagacagtggatcttctatattctattttccctggtgatgtagcccagcaattatggcaagggcagcaagtacaggccagaaagtttgatgatgtcaccatgctcttttcagacattgttggcttcacagccatatgtgcccagtgtactcccatgcaagtaatcagcatgctgaatgaactgtacaccagatttgaccaccagtgtggatttttggatatttataaggtggaaacaataggtgatgcctactgtgttgcagcagggctccacagaaaaagcctctgccatgctaaacccattgctctgatggccttgaagatgatggaactttcagaagaggtgctgacacctgatggaagaccgattcagccccagaggagtgaactccttttctcctttcctgtttccatccagctggttccagatcagcatcaaagtgaaacggatttgggtactgaaaagatgaggataggaattcactcaggctccgtgctggctggagttgttggggtgcgaatgccacgttattgcctgtttggaaataatgtcacactggcaagcaaattcgagtcgggaagtcaccctcggcgcatcaatgtcagcccaaccacttaccaattattaaaacgagaagaaagtttcacattcattccgcggtctcgtgaagagcttccagacaactttccaaaggaaattcctgggatctgctatttcctggaggtaaggactggtccaaagccaccaaagccttctctttcttcgtcgagaataaaaaaggtttcctacaacatcggcaccatgttcctccgggagacaagcctctgagacctgctacagatcaaagactcctccaaaaagcacaagcccagaacatgggtcaccaatggggggtggaaagagattgtgtctctttcattgctttgttgagaacaagcagcaaaatttctgtattatgtcaggcaataatcctactaaaaggtggaggtgaccgctgtcaataaaaagccggaggatgagggaaataagatgtgtccattcatatgagtggttttggtcatatatatacacatatattttaattacaagtgtgggtcccctttcagaactaaccaataaatagattccatgttttcttgtttatcacacatacaagtatctttccctatatatttgtaccacttttgagagcc

SEQ ID NO: 90485 - DNA, 2292 bp, Artificial Sequence
  derived and/or modified sequence
atgagcaggaggaagatcagcagcgagagcttcagcagcctgggcagtgactacctggagaccagccctgaggaggagggggagtgccccctgagccggctgtgctggaatggcagccgcagccccccaggccccctggagcccagccctgctgctgctgctgctgctgctgccccagcccccaccccagctgccagcgctgctgctgctgctgccacagctggggccaggagagtgcagaggagaagaagagtgaacctggacagcctgggggagagcatcagccggctgacagcccccagcccccagaccatccagcagaccctgaagaggaccctgcagtactatgagcaccaggtgattggctacagagatgctgagaagaacttccacaacatcagcaaccgctgcagctatgctgaccacagcaacaaggaggagattgaagatgtgtctggcatcctgcagtgcacagccaacatcctgggcctgaagtttgaggagatccagaagagatttggagaggagttcttcaacatctgcttccatgaaaatgaaagagtgctgcgggctgtgggcggcaccctgcaggacttcttcaatggatttgatgccctgctggagcacatccgcaccagctttgggaagcaggccaccctggagagccccagcttcctgtgcaaggagctgcctgagggcaccctgatgctgcactacttccacccccaccacatcgtgggctttgccatgctgggcatgatcaaggctgctgggaagaagatctaccgcctggatgtggaggtggagcaggtggccaatgagaagctgtgcagtgatgtgagcaaccctggcaactgcagctgcctgaccttcctgatcaaggaatgtgagaacaccaacatcatgaagaacctgccccagggcaccagccaggtgcctgctgacctgcgcatcagcatcaacaccttctgccgggccttccccttccacctgatgtttgaccccagcatgtctgtgctgcagctgggggagggcctgaggaagcagctgcgctgtgacacccacaaggtgctgaagtttgaggactgctttgagatcgtgagccccaaggtgaatgccacctttgagcgggtgctgctgcggctgagcacccccttcgtcatccgcaccaagccagaggccagcggcagcgagaacaaggacaaggtgatggaggtgaagggccagatgatccacgtgcctgagagcaacagcatcctcttcctgggcagcccctgtgtggacaagctggatgagctgatgggccggggcctgcacctgagtgacatccccatccatgatgccaccagagatgtgatcctggtgggggagcaggccaaggcccaggacggcctgaagaagaggatggacaagctgaaggccaccctggagaggacccaccaggccctggaggaggagaagaagaagacagtggacctgctgtacagcatcttccctggagatgtggcccagcagctgtggcagggccagcaggtgcaggccaggaagtttgatgatgtgaccatgctgttcagtgacatcgtgggcttcaccgccatctgtgcccagtgcacccccatgcaggtgatctccatgctgaatgagctgtacaccaggtttgaccaccagtgtggcttcctggacatctacaaggtggagaccatcggagatgcctactgtgtggccgccggcctgcacaggaagagcctgtgccacgccaagcccatcgccctgatggccctgaagatgatggagctgtctgaggaggtgctgaccccagatggccggcccatccagccccagaggtctgagctgctcttctccttccctgtgtccatccagctggtgcctgaccagcaccagagcgagacagacctgggcacagagaagatgagaattggcatccacagcggctctgtgctggccggcgtggtgggcgtgaggatgccccgctactgcctgtttggaaataatgtgaccctggccagcaagtttgagagcggcagccacccccggcgcatcaacgtgagccccaccacctaccagctgctgaagcgggaggagagcttcaccttcatccccaggagccgggaggagctgcctgacaacttccccaaggagatccctggcatctgctacttcctggaggtgaggacaggccccaagccacccaagcccagcctgagcagcagccgcatcaagaaggtgtcctacaacatcggcaccatgttcctgcgggagaccagcctgtag

SEQ ID NO: 90486 - DNA, 2292 bp, Artificial Sequence
  derived and/or modified sequence
atgagccggcggaagatcagcagcgagagcttcagcagcctgggctcagattaccttgaaactagtccggaagaggaaggcgaatgtccacttagtcgcctctgttggaacggcagtaggtcacctcccggcccattagagcccagccctgctgcggccgcagccgccgcggcccccgctccaaccccagctgcatctgccgccgcagcggctgccacggccggagcacgccgggtgcaacgaagaagacgcgtgaatttggactccctaggtgagagcatcagcaggctgactgcaccaagcccccagactattcagcagaccttaaaacggactcttcagtattatgagcaccaggtgattgggtatcgggatgccgaaaagaatttccacaacatcagtaaccgatgcagctatgcagatcactcaaataaagaagaaatcgaagatgtctctggcatcttgcagtgcaccgctaacattctgggtctgaaatttgaggagatccagaagagatttggtgaggagttttttaatatctgtttccatgagaacgagagagtgctgcgggcagtagggggtaccttgcaggatttttttaacggctttgatgccctgttggaacacatccggacatcttttggtaagcaggcgacactggagtcaccaagcttcctgtgcaaagagcttcccgaggggaccttaatgctccactactttcacccccaccatattgttgggttcgctatgctgggaatgattaaggccgcaggaaaaaagatttaccggctggacgtggaggtggagcaggtggctaatgaaaagctttgtagcgacgtgtccaatccaggaaattgttcatgcctgacgttcttgattaaggagtgcgagaatacaaatattatgaagaacttgccacagggaacctcccaggtgcctgccgatttgagaataagcattaacaccttttgccgagcgtttccctttcatctgatgttcgatccatctatgagcgttctccagctaggggaaggccttcggaaacagttgcgctgcgatactcataaagtgctgaagtttgaagactgttttgagattgtgtcccctaaggtcaacgctacctttgaacgtgttctgctccgtctgagcactccgttcgtaattaggacgaaacccgaggctagtggaagcgaaaataaggacaaggttatggaggtgaaaggacagatgatccatgtacctgagtccaatagcatcctcttccttggcagcccctgcgtggacaagctggatgaactaatggggcggggcctgcacctgtctgatatccccatccatgacgccacacgcgacgttatcctggtgggggaacaggcgaaggcgcaagatgggctgaaaaagagaatggataaactgaaggcaacactggaacggacgcaccaggccttggaggaggagaagaagaaaacagtcgacctgctttattctatcttccccggagatgttgcacagcaactctggcaagggcaacaggtccaggccaggaagttcgacgatgtcaccatgctttttagcgacatcgtggggttcacagccatctgcgcgcagtgtaccccaatgcaagtgatcagtatgttgaatgaactgtatacccgcttcgatcaccagtgtgggttcctggacatatataaggttgagaccatcggcgatgcctattgcgtagcagcaggcctgcaccgaaagtcactgtgtcacgctaagcccattgctttaatggccctcaagatgatggaactgagtgaggaagtgctgaccccagacggacgaccaattcaaccacagcgatccgagctcctgttttctttcccagtctctatccagctggtgccagaccagcatcaaagcgaaacagacttgggaacggagaaaatgcgtatcggcattcatagcggcagcgtgctggcaggtgtcgtcggcgtgcgtatgccccgctactgtttgttcggtaacaatgtcacactggcaagtaagtttgaatccggctcccacccgaggaggatcaatgtttcgccgaccacttaccaattgttaaagcgagaggaaagtttcacttttattcctcggtcgcgagaggaactgcctgacaattttccaaaggagattcccggaatatgctacttcctagaagtccgcacaggcccgaagccccccaagccctccttatcctcttcccgaatcaagaaggtgagttataacatcggaacaatgttcttacgtgaaaccagtctgtag

SEQ ID NO: 90487 - DNA, 2292 bp, Artificial Sequence
  derived and/or modified sequence
atgtcccgtaggaaaatcagcagcgaatctttcagttccctgggtagtgactacctcgaaacttcccccgaggaagagggtgaatgtcctctaagtcgtctgtgctggaacgggagtcgctcaccccctggacccctggagccatcaccggcagctgccgcagcagccgctgctcctgccccaacccctgccgcaagcgcagcagccgcagctgcaaccgcaggcgctcgcagagtgcagcgtcgcaggagggtgaatctagattccctgggcgagagcatcagcaggctgactgcgccttccccacagacaatacagcagaccctgaagaggacgttgcagtactatgaacaccaagtcattggatatagggacgccgaaaagaatttccacaacattagcaacaggtgttcttacgccgatcactccaacaaggaagagatcgaggacgtgtcaggcatcttacagtgcactgccaacatcctcgggctgaagttcgaagaaatacaaaagcgtttcggagaggagtttttcaacatatgcttccacgagaatgagagagtactgcgcgctgtgggcggtacgctgcaagatttctttaacggtttcgatgccctactggaacacatccgcaccagcttcggtaaacaagccacccttgaaagcccttccttcctgtgtaaggagttaccggaaggaacattgatgctgcattactttcacccacaccatatcgtgggcttcgctatgctgggcatgatcaaggctgccggaaaaaaaatataccggcttgatgtggaggttgagcaagtggctaatgagaaattgtgctctgacgtgtccaatccagggaactgcagctgccttaccttcctgattaaagaatgcgagaacacaaatatcatgaagaatcttccacaagggacctcccaggtccctgccgacctcaggatctcaattaatacattctgtcgggcattcccttttcacctcatgttcgatccatcaatgtccgtgcttcagttgggggagggactgaggaagcaactcagatgcgatacgcataaagtgctaaagtttgaagactgtttcgaaatcgtctcacccaaagtcaacgcgacttttgagcgagtcctgctccggctgtctacaccatttgtgatccggactaagcctgaggcaagtggctctgaaaataaggacaaagtgatggaggttaagggccagatgattcatgtgcctgaatccaatagcatcctgttccttggttccccttgcgttgataagttggacgaattaatgggacgtggcctgcatttaagcgatatccccatccatgatgccactcgagatgttatcctggtgggtgagcaggcgaaagctcaggacggcttgaaaaagcgtatggacaagctcaaggccacactcgagagaactcatcaagctttggaagaagaaaaaaaaaaaacagtcgacttgctctacagcatatttccaggagacgtagcccagcaactgtggcagggacagcaggtccaggccagaaaattcgacgacgtcacaatgctgttcagtgatatcgttggattcacagccatctgtgcccagtgcacccctatgcaggtgatctcaatgctcaacgagctatatacccggttcgaccatcaatgcggtttcctagatatttacaaagtagagaccataggcgatgcttactgtgtggcggcaggattacatcgtaagagcttgtgtcacgccaagcccattgccctcatggctctgaagatgatggagctgagtgaagaggtcttgactcccgatgggaggccaattcagccacagagatccgaactcctattcagctttccagtgtcgatacagctagtcccggaccagcatcagtccgagacagatctgggcaccgagaaaatgagaatagggatacattcaggctcagtactggccggtgtggtgggtgtccgcatgcctcggtactgcctgtttggaaataacgtgaccctggcatccaagttcgagtctggttcccaccctcggagaatcaacgtttcccctaccacataccagcttctaaaaagagaagagtccttcaccttcattcctcgcagccgcgaggagctgccagataactttcctaaagagatccctggcatttgttattttctggaagtgaggacaggtccgaaacccccaaagccatctctctcctcgtcgcgaatcaagaaggttagttacaacatcggtaccatgttcctgagggagaccagcctctag

SEQ ID NO: 90488 - DNA, 2292 bp, Artificial Sequence
  derived and/or modified sequence
atgagcagaagaaagatcagcagcgagagcttcagcagcctgggcagcgactacctggagaccagccccgaggaggagggcgagtgccccctgagcagactgtgctggaacggcagcagaagcccccccggccccctggagcccagccccgccgccgccgccgccgccgccgcccccgcccccacccccgccgccagcgccgccgccgccgccgccaccgccggcgccagaagagtgcagagaagaagaagagtgaacctggacagcctgggcgagagcatcagcagactgaccgcccccagcccccagaccatccagcagaccctgaagagaaccctgcagtactacgagcaccaggtgatcggctacagagacgccgagaagaacttccacaacatcagcaacagatgcagctacgccgaccacagcaacaaggaggagatcgaggacgtgagcggcatcctgcagtgcaccgccaacatcctgggcctgaagttcgaggagatccagaagagattcggcgaggagttcttcaacatctgcttccacgagaacgagagagtgctgagagccgtgggcggcaccctgcaggacttcttcaacggcttcgacgccctgctggagcacatcagaaccagcttcggcaagcaggccaccctggagagccccagcttcctgtgcaaggagctgcccgagggcaccctgatgctgcactacttccacccccaccacatcgtgggcttcgccatgctgggcatgatcaaggccgccggcaagaagatctacagactggacgtggaggtggagcaggtggccaacgagaagctgtgcagcgacgtgagcaaccccggcaactgcagctgcctgaccttcctgatcaaggagtgcgagaacaccaacatcatgaagaacctgccccagggcaccagccaggtgcccgccgacctgagaatcagcatcaacaccttctgcagagccttccccttccacctgatgttcgaccccagcatgagcgtgctgcagctgggcgagggcctgagaaagcagctgagatgcgacacccacaaggtgctgaagttcgaggactgcttcgagatcgtgagccccaaggtgaacgccaccttcgagagagtgctgctgagactgagcacccccttcgtgatcagaaccaagcccgaggccagcggcagcgagaacaaggacaaggtgatggaggtgaagggccagatgatccacgtgcccgagagcaacagcatcctgttcctgggcagcccctgcgtggacaagctggacgagctgatgggcagaggcctgcacctgagcgacatccccatccacgacgccaccagagacgtgatcctggtgggcgagcaggccaaggcccaggacggcctgaagaagagaatggacaagctgaaggccaccctggagagaacccaccaggccctggaggaggagaagaagaagaccgtggacctgctgtacagcatcttccccggcgacgtggcccagcagctgtggcagggccagcaggtgcaggccagaaagttcgacgacgtgaccatgctgttcagcgacatcgtgggcttcaccgccatctgcgcccagtgcacccccatgcaggtgatcagcatgctgaacgagctgtacaccagattcgaccaccagtgcggcttcctggacatctacaaggtggagaccatcggcgacgcctactgcgtggccgccggcctgcacagaaagagcctgtgccacgccaagcccatcgccctgatggccctgaagatgatggagctgagcgaggaggtgctgacccccgacggcagacccatccagccccagagaagcgagctgctgttcagcttccccgtgagcatccagctggtgcccgaccagcaccagagcgagaccgacctgggcaccgagaagatgagaatcggcatccacagcggcagcgtgctggccggcgtggtgggcgtgagaatgcccagatactgcctgttcggcaacaacgtgaccctggccagcaagttcgagagcggcagccaccccagaagaatcaacgtgagccccaccacctaccagctgctgaagagagaggagagcttcaccttcatccccagaagcagagaggagctgcccgacaacttccccaaggagatccccggcatctgctacttcctggaggtgagaaccggccccaagccccccaagcccagcctgagcagcagcagaatcaagaaggtgagctacaacatcggcaccatgttcctgagagagaccagcctgtag

SEQ ID NO: 90489 - DNA, 1425 bp, Artificial Sequence
  derived and/or modified sequence
atggcctacaacaaggcccccagacccttcggcagcgtgagcagccccaaggtgaccagcatccccagccccagcagcgccttcacccccgcccacgccaccaccagcagccacgccagccccagccccgtggccgccgtgaccccccccctgttcgccgccagcggcctgcacgccaacgccaacctgagcgccgaccagagccccagcgccctgagcgccggcaagaccgccgtgaacgtgcccagacagcccaccgtgaccagcgtgtgcagcgagaccagccaggagctggccgagggccagagaagaggcagccagggcgacagcaagcagcagaacggcccccccagaaagcacatcgtggagagatacaccgagttctaccacgtgcccacccacagcgacgccagcaagaagagactgatcgaggacaccgaggactggagacccagaaccggcaccacccagagcagaagcttcagaatcctggcccagatcaccggcaccgagcacctgaaggagagcgaggccgacaacaccaagaaggccaacaacagccaggagcccagcccccagctggccagcagcgtggccagcaccagaagcatgcccgagagcctggacagccccaccagcggcagacccggcgtgaccagcctgaccgccgccgccgccttcaagcccgtgggcagcaccggcgtgatcaagagccccagctggcagagacccaaccagggcgtgcccagcaccggcagaatcagcaacagcgccacctacagcggcagcgtggcccccgccaacagcgccctgggccagacccagcccagcgaccaggacaccctggtgcagagagccgagcacatccccgccggcaagagaacccccatgtgcgcccactgcaaccaggtgatcagaggccccttcctggtggccctgggcaagagctggcaccccgaggagttcaactgcgcccactgcaagaacaccatggcctacatcggcttcgtggaggagaagggcgccctgtactgcgagctgtgctacgagaagttcttcgcccccgagtgcggcagatgccagagaaagatcctgggcgaggtgatcagcgccctgaagcagacctggcacgtgagctgcttcgtgtgcgtggcctgcggcaagcccatcagaaacaacgtgttccacctggaggacggcgagccctactgcgagaccgactactacgccctgttcggcaccatctgccacggctgcgagttccccatcgaggccggcgacatgttcctggaggccctgggctacacctggcacgacacctgcttcgtgtgcagcgtgtgctgcgagagcctggagggccagaccttcttcagcaagaaggacaagcccctgtgcaagaagcacgcccacagcgtgaacttctag

SEQ ID NO: 90490 - DNA, 1425 bp, Artificial Sequence
  derived and/or modified sequence
atggcctacaacaaggctcctcggcccttcggcagtgtgtcaagccccaaggtgacttccatcccaagcccatcctccgcctttacacccgcacacgccacaacctcctcacacgctagcccgagtcccgtagctgcagtcacaccccctctgttcgctgcttcagggttacatgccaatgccaacttgagcgctgatcagtctccctccgctctgagtgccggaaaaactgctgtcaacgtgccccgccagcccacggtgacttccgtgtgttctgagacatcacaagaattagcagaaggacagcgtagggggtcacagggcgactctaagcagcagaatggtcccccacgaaaacatattgtggagcgttacacagaattttatcatgtgcccacacactccgacgctagcaagaagcgtctgattgaagacactgaagactggcgacctcggactggcacaacacaaagtcgttcctttcggattctagctcagattaccggcacagaacatcttaaggaaagcgaagctgacaacaccaaaaaagcaaataacagccaggaaccctccccgcagctggccagtagtgtagcaagcacccggtccatgcctgagtcattggactcccccacttctgggaggcccggagtcacaagtctgaccgccgccgccgctttcaagccagtggggagcacgggggtgatcaagagtcccagctggcagcgtcccaatcaaggagtaccttctaccgggcgaatctctaatagcgctacatattctgggtctgtagcacccgcgaactcggctctggggcagacacagccgtcggatcaggatacactggtgcagagagccgagcatattcccgccggcaaaaggacacctatgtgtgcgcactgcaaccaagtaataaggggacccttcctcgtggccttggggaagtcctggcaccctgaggaattcaactgtgcacactgtaagaacaccatggcgtacattggtttcgtggaggagaagggggccctgtactgtgaactgtgctatgagaagtttttcgcccccgagtgtggccgatgtcagaggaagatcctgggagaagttatctctgctctgaaacagacgtggcacgtgtcatgttttgtgtgtgtggcctgtggaaagccaatccgcaacaacgtcttccatctcgaagatggcgagccctactgtgaaaccgattattatgccctttttggcaccatttgtcatgggtgtgagtttcctatcgaggccggggacatgtttctggaggcgttagggtatacctggcacgacacttgctttgtgtgttctgtttgctgcgaatccctcgaaggacaaacgtttttctcgaagaaggataaacccctgtgtaagaagcacgcacattctgtgaatttctag

SEQ ID NO: 90491 - DNA, 1425 bp, Artificial Sequence
  derived and/or modified sequence
atggcctacaacaaggccccccggcccttcggctctgtgagcagccccaaggtgaccagcatccccagccccagcagcgccttcaccccagcccacgccaccaccagcagccacgccagccccagccctgtggccgctgtgaccccacccctgtttgctgccagcggcctgcacgccaatgccaacctgtctgctgaccagagccccagcgccctgtctgctgggaagacagctgtgaatgtgccccggcagcccaccgtgacctctgtgtgcagcgagaccagccaggagctggccgagggccagaggcggggcagccagggcgacagcaagcagcagaatggcccccccaggaagcacatcgtggagcgctacacagagttctaccacgtgcccacccacagtgatgccagcaagaagaggctgattgaggacacagaggactggaggcccaggacaggcaccacccagagccgctccttccgcatcctggcccagatcaccggcacagagcacctgaaggagagcgaggccgacaacaccaagaaggccaacaacagccaggagcccagcccccagctggccagctctgtggccagcaccaggtccatgcctgagagcctggacagccccaccagcggccggcctggggtgaccagcctgacagctgctgctgccttcaagcctgtgggcagcactggagtcatcaagagccccagctggcagaggcccaaccagggcgtgcccagcacaggccgcatcagcaacagcgccacctacagcggctctgtggccccagccaacagcgccctgggccagacccagcccagcgaccaggacaccctggtgcagagagctgagcacatcccagctgggaagaggacccccatgtgtgcccactgcaaccaggtgatccggggccccttcctggtggccctgggcaagtcctggcaccctgaggagttcaactgtgcccactgcaagaacaccatggcctacatcggctttgtggaggagaagggggccctgtactgtgagctgtgctatgagaagttctttgccccagaatgtggccgctgccagaggaagatcctgggggaggtgatcagcgccctgaagcagacctggcacgtgtcctgctttgtgtgtgtggcctgtgggaagcccatcagaaataatgtgttccacctggaggatggagagccctactgtgaaacagactactatgccctgtttggcaccatctgccacggctgtgagttccccattgaagctggggacatgttcctggaggccctgggctacacctggcatgacacctgctttgtgtgcagcgtgtgctgtgagagcctggagggccagaccttcttcagcaagaaggacaagcccctgtgcaagaagcacgcccacagcgtgaacttctag

SEQ ID NO: 90492 - DNA, 1425 bp, Artificial Sequence
  derived and/or modified sequence
atggcctacaacaaggccccccggcccttcggcagcgtgagcagcccgaaagtgaccagtattccctcaccctcaagtgctttcactcccgctcatgcaactacctcatctcacgccagtccctctccagtagcagctgtcactccacctttgttcgcggcctccggtctccacgccaacgccaacctatctgccgaccagtctccgtcagcattgagtgctgggaaaacagccgtcaatgtgcccagacaacccactgtaacatccgtctgctccgagaccagccaggagttagcagagggtcaacggcgcggctcccagggggattccaaacagcagaatggaccccctcgcaagcacatcgtggagcgctatactgaattctatcacgttcctacacactcagatgccagcaagaagcgccttatcgaagacaccgaggattggagacctaggacggggaccacacagagtcggtctttccggattctggcacaaatcacaggtaccgagcatcttaaagagtctgaggccgacaataccaaaaaggcaaacaatagccaggagccctccccccagctggcctccagcgtggcctccacccgttccatgcccgaatccctggactctcccacctcgggcagaccaggcgtgacaagcctgacagcagcagcggcatttaaaccagttggttccacaggcgtgataaagtctcccagctggcagcgccctaaccagggcgtcccaagcaccggtcgaataagtaattccgccacttattcgggtagcgttgcccccgccaactctgcactcgggcaaactcagccctctgatcaggacacgctcgtacagcgtgctgaacacattccagccggcaaaaggactcctatgtgcgcccactgtaaccaggtcattaggggaccctttctggtggccctaggcaagtcatggcaccccgaagaattcaattgtgcccattgcaagaatactatggcatatatcggcttcgtggaggagaaaggagccttgtactgcgagctgtgctatgagaaattttttgcgcccgagtgtggcaggtgtcagagaaagatcctcggcgaggtaattagcgcgctcaaacagacttggcatgtatcctgtttcgtgtgtgtcgcctgtggcaagcccattaggaacaatgtgtttcatctggaagacggtgagccttactgtgagactgactactacgctctctttggcacaatttgtcatggatgtgagttccctattgaggccggggatatgtttttggaggccctgggatacacatggcacgatacctgcttcgtctgttccgtgtgctgtgagagtctggagggtcagacttttttcagcaagaaagacaagccactatgcaagaaacacgcgcattctgttaacttttag

SEQ ID NO: 90493 - DNA, 1425 bp, Artificial Sequence
  derived and/or modified sequence
atggcttataacaaagcccctagacctttcggtagtgtgtcttcccctaaagttaccagcatcccatccccaagctcagcatttacgcctgctcacgctacaacgtcctctcacgcaagcccgtcacctgttgctgctgttacccctcccctgtttgctgcttctgggctgcacgctaatgcaaacctctccgcggaccaatcgccaagtgccctcagcgctggcaaaactgctgtaaacgtccccagacaacctacagtaacatctgtttgttcagaaactagccaggagttggctgaaggccaaagaagagggtcgcagggggatagtaaacagcaaaacggccctccccgtaagcacatagtggaacggtatactgagttctaccacgtacccacccatagcgacgcaagtaagaagcgattaatagaagataccgaggattggagacctcgcaccggaaccacccaaagccgctctttccgaattctagcgcagatcacagggacggaacatctgaaggagtcagaggccgacaacacaaagaaggctaataactcacaggaacctagcccacaactagcctcctcagttgctagcacaagatctatgcctgagtctctggactcaccaaccagcggaagaccaggggtaaccagcttaaccgctgccgctgccttcaagcccgtcggcagcacaggcgtgattaaatcaccatcatggcagcggcctaatcagggtgttccttctacaggcagaattagcaacagtgcgacctacagtgggtctgtggcaccagccaatagcgctctgggccagacgcagccaagtgaccaggacactttagtgcagagagccgagcacatacctgccggaaagaggactcctatgtgcgcacactgcaatcaggtgattagagggccatttctcgttgccctggggaaaagttggcaccctgaagagtttaattgcgctcactgtaaaaacacaatggcttacataggcttcgtggaggaaaaaggggcactatactgcgagctatgctatgagaagttcttcgccccagaatgcggacgctgccagcgcaaaatactcggagaggtcatttccgcgctgaaacagacatggcatgtgtcatgtttcgtctgtgtagcttgcgggaagcccatacgtaataatgtgttccacttggaggatggagaaccatactgtgagaccgactactatgcgcttttcgggaccatatgtcacggttgtgaattccctattgaagctggagacatgttcctcgaggccttggggtatacatggcatgacacctgctttgtgtgcagcgtgtgctgtgagagcttggaaggacagacctttttctccaagaaggataaacctctttgtaaaaaacacgctcactctgtgaatttttag

SEQ ID NO: 90494 - protein, 136 aa, Artificial Sequence
  derived and/or modified sequence
MSNYSVSLVGPAPWGFRLQGGKDFNMPLTISSAGVQWRNLGSPQPPSPEFKRFSCLSLPSSWDYRHVPPRLANFVFLVETKFPYVGQAGLELPTSGDLPTSASQSAKITGVSHRAWPTLFYTLLFFATIYPEIILY

SEQ ID NO: 90495 - protein, 87 aa, Artificial Sequence
  derived and/or modified sequence
SVAQAGVQWHNLGSLQPPPPRFNRFSCLSIPSSWDYRHSPPLLADFCIYLVETGFHHVGQAGLELLTSSDLPTSASQSARITGVSHR

SEQ ID NO: 90496 - protein, 106 aa, Artificial Sequence
  derived and/or modified sequence
FFLSFLHSFFLRQSFALVAQAGVQWHNLGSLQPPPPGFKQFSCLSLLSSWDYRHVPPCPANFVFLVEMGFLHVGQAGLELRTSGDPPTLASQSAGITGVSHRAQPS

SEQ ID NO: 90497 - protein, 93 aa, Artificial Sequence
  derived and/or modified sequence
SVAQAGVQWHNLGSLQPPPPRFNRFSCLSIPSSWDYRHSPPRLADFLFLVETEFCHVGQAALELLTSGDLPTSASQSARITGVSHRTRPSLFY

SEQ ID NO: 90498 - protein, 93 aa, Artificial Sequence
  derived and/or modified sequence
SVAQAGVQWHNLGSLQPPPPRFNRFSCLSIPSSWDYRHSPPLLADFLFLVETEFCHVGQAALELLTSGDLPTSASQSARITGVSHRTRPSLFY

SEQ ID NO: 90499 - protein, 90 aa, Artificial Sequence
  derived and/or modified sequence
QWSDLGSLQPPPPGFKRFSCLNLPTSWDYRHVPPRPANFCFFIEMGFLHVGQTGLELPTSGDPPASASQSAGITGVSHHAWPHFIILLMI

SEQ ID NO: 90500 - DNA, 2504 bp, Artificial Sequence
  derived and/or modified sequence
ctggcccgcactcggcggccgcggcgcgatggaggcgccggccgagctactggccgcgctgcctgcgctggccaccgcgctggcccttctgctcgcctggctactggtgcggcgtggggcggccgcgagcccggagcctgcccgcgcgcccccggaacccgcgcccccggccgaggccaccggggccccggcgccgtcccgcccctgcgcccccgagccggcggcctcgcccgcggggccggaggagcctggagagcccgcggggctgggggagctcggggagcctgcgggaccgggggagcccgaagggccaggggatcccgcggcggcgccagcggaggcggaggagcaggcggtggaggcgaggcaggaagaggagcaggacttggatggtgagaaggggccatcatcggaagggcctgaggaggaggacggagaaggcttctccttcaaatacagccccgggaagctgaggggaaaccagtacaagaagatgatgaccaaagaggagctggaggaggagcagagagttcagaaggaacagctggctgccatcttcaagctcatgaaagacaacaaggagacgtttggcgagatgtccgacggcgacgtgcaggagcagctccggctctacgacatgtagactgcgcccacgggatgcacagcggccatgcctgatgctgtccccacccttgccccatgcccttgttctttccagacttctgtaggcctaattttcccttataaacatagatgcaggcgtacattctataggtacttgccgagttcttgcagtgtgtatattactttgcaggaatcaaaattgttttattcagaagacaaagtccctgacccctctggtttctgcttgctggtgaggttccagctgttattgggctctgaggccctctcctgatccaaatctttttttgtttgtttgagatggagtctcactctgtctcccaggctggagtgcagtggcgtgatcttggctcactgcaacctccacctccctgattcaagcgactctcctgcctcagcctcccgagtagctgggattgcaggcatgcaccatcacacctggctaattttgtattttcagtagagacagcgttttgccatgctggccaggctcgtctcgaactcctgacctcaggtgatccgcccaccttggcctcccaaagtgctgggattacacgcgtgagccaccatgcccggccaatactacactcttattctgccttacgaggatttctggaagcttctgtaactgtagggaagaaagctgtaggggagcatggtttttttgttttgtttttgtttttgagacgaggtctcactgtcacccaggctggagtgcagtggtgccatcatgactcactgcagccttgacctcccaggcgcacaaaatcctcctctcagcctgagtaactgggactacaggtgtgtaccactacatccagctaaaggagagcgtttttttctttttctttttgagacagagtctcactctggcgcctggtcactgtgcccttcaccttctgggttcaagtgattctcctgcctcagcctccctagtagctgggattacaggcatgcaccaccatacccagctaatttctgtatttttagtagagatggagtttcaccatgttggccaggctggtctcgaactcctgacctcaggtgatccacctgcctcggcctcccaaagtgctaggattacaggcgtgagccaccatgcccagctgggagcgttctttcagcaaaaagtctaattcagagactcaccttccatcctggcactaaacaatagtactagaggtaagatctgccaagaatttctctcacttaagcaggatacttactttaaatataattaggcaagacttatttgagtacttgcctaattgtatttaattagaactatgctggatgctgtagacagaagaaataaaatactcaacttggtccctatcttccagcaggttagaggcctttagggaagaaaagcctgtgtgcagggaaagagaacctcaccagaaagtattcaataaaatgccaaagtgatcttacagaacagtgcctgtgacaccggaggggattgttctgtctttgtgagtgaacatacaatgatggggataactggtcctcataccatgcaggtcccatttctgatcaccccactggcaggacaattcacagttcttgagcaaactgagttagggagggtatgctaacgacagaacctatgcaagttcttagaaatattttttgtttgctgaaataaagctcaatcaacacactaccttaaaaaaaaagtggagcagtggcatttccatgcctcatgctcaccatcatgaggttaacttcccgccgtcgcctcttgcctgccaggggtttttcgggagcccctctctgttccactctgattccttttgtttcttgctgaccattcactctctgtgtctgttgttggatccaaatacgagtgtttttctttc

SEQ ID NO: 90501 - DNA, 4541 bp, Artificial Sequence
  derived and/or modified sequence
agtggagggcggtgggggcggggcaagcgcggaggaccagggaccggctccggaccgcgcagttagcgccgcctggcctgggccggacccggtcagggttctcaagctgtcgtccctatggggctgtgttttccttgtcccggggagtccgcgcctcccacgccggacctggaagagaaaagagcaaagcttgcagaggctgcagagagaagacaaaaagaggctgcatctcggggaattttagatgttcaatctgtgcaagaaaagagaaagaaaaaggaaaaaatagaaaaacaaattgctacatccgggcccccaccagaaggtggacttaggtggacagtttcataaagcataacatgagtagaagaatctactgccaataactgtttattatctgcaatcaagtgggcttcatcaatttaatttcttctctttgagtaaatgaagattcagactttgtaatattattgcccttaagtgcaatgctaaaaaaacgttgattttcaagcttagagaatggctagacttttcattaaatactgattttcctacatttgctcttctgcagttagtgggtgatttgctatttttcttagtagttaaaaaatggaactaaatagtgaatatacatacactgcatgtaaacattctgcatatacctctaagattaaaattcgcagttgtcttttcatcctttataaaatgatctaactacttatatttgtgctgcatcgcgttacatctgtttttatttcactatgaagatgtttgattaaacttatggacttagtgcctttaaactgatcatcagggagaatcttgaaaaaatcatttgaagggctgatgtgaaggagcactgtaaatttttataacttagtaatgagtattcttaggcagatgtaaaattttttccaatttatttttatttatgtagcttataaaattaacataccctgttttactttatgataaaggattttttgtttgctgaatttaaaattatatattagtgataccatcagagggcagtgatgttctattgtatattaaattcagctctgtaaggatctttgtagtaattgaatgagttaaactaataatctggatgggttataatgagtagtaatatatttgtccatatttcataagtagtgttaatcttgtgtacttattagagaacgatcataagatttatacagatgtgaaactgcgaaggcaagtatgaatgtatgaaaaaaacatgtaggtactgtacttacaaaaggtctacttcagatataaaaatattaggtaattctatacaatgcatagtcataaaccttaacatttttgttcattagaaacatgaattttatagcattttttgtttctcctatataatacactgaaataaaagaatttgtgttagctattaaggctgatagctcttttaaatggcaaggccacatgttgagccctaaattaaaatttgcagatattaagtgctaatagaaattttaagttaaatcgaccaagttcacttgctttacacaaaggaaactgagccactatcttcatctacccctccaacaaaaattatgttatactgcagtgtattgtacatgttaatttttaaaagtttgaactattatataatacaggtctcttgacttctcatggaaaaattattttttctattatggtgtgaaatattgtgtgaatatctaggcaaaacataacaatttggctcaattttcttctttagaggattcgtgctgtttttgttcataaagggtagtgaaatcattgaactatattttagaatgaaaatttttgattttattaaaatgattttttcaaggcagaaagtaaaaggaatgattgatagcggagtgcatatagagctagagcatatcatccttgaactctgcaaatcctttcttccattttaatatagcaagaacaattttgtctttactacatcttaaagaattagaacttgggttggtgtaagtgacttacttccagggaatcatgccctatttctaccagcaggtcatacccaaatgtcacactatctattgttaaccatgaatgatattcagatctattacttttcgtgaaaagtggaacatgttacttccaaccatggcctgtcaccgtgagtgtgatcagctttctccaaaaccacatgggtcgcaggagctaaggggtggtacccaaatgttaggaacagtgttaggaaagggcaagggaaaagaagtgactggatgtcttatgagaaaccggtaaatgactaaaaaaaaaagcaaatgactaaaaacatgactaaaaaattatatatatatataatatatatattatatatgtgtgtatatatatacacataatatctgcaaattctaatttatatatgtgtgtgtatatacacacacacacatgcacatacacacatacgtccagacatctccctcataaaataaccatcagtttctatgaaaaccttaagtggaagccaatttcccatagtaaataatttaggagaaaattataatgcttaaaatgttgctcaaacccctgacctattactaaactataattggaacagtaaaatgcatatatgtaactatcatatcatgatttaaaattgcttaaaccattgctgcttaatactaatcaaacttaacggctgctaacaaaagttgtgaattattacacggcctctttgtaacgtgctgcatgttttttaaaacatctctgtgtttctgtttgttccactgctggtatttggaatgtaatttaacagttctcacacatggtttggttataaattctgtattgccttttagggatataaatatacatttttttctatgtaaaaattagctttagctgtctctttaacaaaattttatctttactacatcctaaatacttagaacctgagttggtggttagggaaacctcaggaacattttaatcacattgggattcagaagagcaacagaaccaaaggttgtttggtgtgttcatacaatccctggatttataggtggattttctataaaggaaaaatgatgtaattagtatcctgttttttcctaaagaaataatactatcataaaaattctgtctatcctttgtaccccaggaaaatggacatgaactttgaattttccctttctccaaatgtttgactttttattttcactgataagcattatgctatgttcttagaagacaaaagcagctcttgccagttttgaataatttctgcatgaatagaccagtaagaggtaagtagccatgactgcctatatgtgttgagacataaggtatatttctttaacatctccaagcaagcatttcaaattctcttaactactaaacatgctctaagctaattcaaatatagtattgtggcttttttcttcaattttctcaaaagctacagacacaaggcatttgtatgtataacagactttgatgaagttttggttccagtaactcaaaacactaagtttcccatttgatatggctttttattgttctagtctccctcttctagttatgcttcatcttgcaaatattgactttgaatgtgataactattgcctacaaattaagtattcatacattactcctgtggatatcatacttttttgttattatatcctgaattgcattggctttttttggttttgttttgttttttgagatggagtttcactcttgttgcccaggttggagtgcaatggcacaatctcagctcaccgcaacctctgcctcccaggttcaagtgattctcctgcctcagcctccctagtagctgggattgcaggcatgtgccaccacgcctgactaattttgtgtttttagtagagacagggtttctccacgttggtcaggctggtctcgaactcctgacctcaggtgatccctgccgccttggcctcccaaagtgctgggattacaggcatgagccaccgcgcccggcctgcattggctatatttataataccaaatttgtgttgagttttgagttaatgtcttctagttatcaaaacaggtttgatccattctttgcaagtacctctaacttatctcaagtggaactaattagttttgcacacagattggtgctctctaggctatttccctgaaatttatcttgttacataagtcagatatcaaggagttatgctaaactccttttcctatcaaactcctaaaatgcccttttctctgtctatatttcttagacatagttacattataaatgtaacagatatatttaaagtaggttaataccaagtgtctcaggtagaaaattctcagaggttccacaaaaacttctggaactaataaatgactttagtaatcttgcagaatgaaaagtatatgaaagtcaattctatgtttatatgcaagcaatgaaaaatctgtaattgaaagtgggaaaatttaaattacaatatcaacaaataaaatatttaggaaaaataaaactgtagacattaaaaatgacaaaacattgccaataaattaagatctaaatg

SEQ ID NO: 90502 - DNA, 411 bp, Artificial Sequence
  derived and/or modified sequence
atgagcaactacagcgtgagcctggtgggccccgccccctggggcttcagactgcagggcggcaaggacttcaacatgcccctgaccatcagcagcgccggcgtgcagtggagaaacctgggcagcccccagccccccagccccgagttcaagagattcagctgcctgagcctgcccagcagctgggactacagacacgtgccccccagactggccaacttcgtgttcctggtggagaccaagttcccctacgtgggccaggccggcctggagctgcccaccagcggcgacctgcccaccagcgccagccagagcgccaagatcaccggcgtgagccacagagcctggcccaccctgttctacaccctgctgttcttcgccaccatctaccccgagatcatcctgtactag

SEQ ID NO: 90503 - DNA, 411 bp, Artificial Sequence
  derived and/or modified sequence
atgtccaactattccgtgtctctagtcggacctgctccttgggggttcagactgcagggtggaaaggatttcaatatgccactgactattagctctgccggggttcagtggagaaacctcgggtctcctcagccgcctagtcccgagttcaaaaggttttcttgcctgtcactgccgtccagttgggactatagacacgtgcctccaaggctggcaaacttcgtgtttttggtagagacgaagtttccatacgtcggtcaggccgggctggagctccccacatccggtgacttgcctacttcagctagccagagcgctaagataacgggcgtcagccatcgggcgtggcccactcttttttatactctgctgttttttgccaccatatatccagagatcatactgtactag

SEQ ID NO: 90504 - DNA, 411 bp, Artificial Sequence
  derived and/or modified sequence
atgagcaactacagcgtgtccctggtgggccctgccccctggggcttccggctgcagggcggcaaggacttcaacatgcccctgaccatcagcagcgctggggtgcagtggaggaacctgggcagcccccagccccccagccctgagttcaagcgcttcagctgcctgagcctgcccagctcctgggactaccgccacgtgcccccccggctggccaactttgtgttcctggtggagaccaagttcccctacgtgggccaggccggcctggagctgcccaccagcggggacctgcccaccagcgccagccagagcgccaagatcactggagtgagccaccgggcctggcccaccctcttctacaccctgctcttctttgccaccatctacccagagatcatcctgtactag

SEQ ID NO: 90505 - DNA, 411 bp, Artificial Sequence
  derived and/or modified sequence
atgagcaactacagcgtgagcctggtgggccccgccccctggggcttcagactgcagggggggaaggatttcaacatgccacttacaatatcctctgccggggtccagtggcgtaatttaggcagtccacaacctccgagtcccgagttcaagagattctcatgcttgtctcttccttcctcctgggattaccgccacgtgcctccgaggctggctaacttcgttttcctggttgagaccaagttcccctacgtaggtcaagccggcttagaactgcccacctctggcgacctgcctacttccgccagtcaatcggcgaagatcacaggagtgtctcaccgcgcatggccgacgctcttctatacactgcttttcttcgccactatttaccctgaaatcattctctactag

SEQ ID NO: 90506 - DNA, 411 bp, Artificial Sequence
  derived and/or modified sequence
atgagcaattactcagtaagcctcgtagggccagccccttggggtttccggctgcagggcggaaaggattttaatatgccattgacgatcagctccgctggggttcagtggcggaacttgggatctccccagcccccaagcccggagtttaaacggtttagctgtttaagcttgcctagttcttgggattaccgtcacgtgcctcccaggctcgctaactttgtgttcttggtcgagacaaaattcccgtatgtgggtcaggccggtctcgagctgcccactagcggcgatctccctactagtgcatcacagtccgctaaaataacaggcgtgagtcacagggcatggcctaccttgttttacactttgctgttcttcgccacaatctacccagaaattatactgtactag

SEQ ID NO: 90507 - DNA, 1186 bp, Artificial Sequence
  derived and/or modified sequence
gagccaggaggcggaagttcccgcgggcggtggggacggcgccctcaccgcgagtcacttgtcagcccttgtctgaggcggaggcagccccgcgccgcgccggacccgagcatatttcattttctgtcattggactttgagccattagaaccatgagcaactacagtgtgtcactggttggcccagctccttggggtttccggctgcagggcggtaaggatttcaacatgcctctgacaatctctagtgctggagtgcagtggcgcaatctcggctcaccacaacctccatctcccgagttcaagcgattctcctgcctcagcctcccgagtagctgggattacaggcatgtgccaccacgcctggctaattttgtatttttagtagagaccaagtttccctatgttggtcaggctggtcttgaactcccgacctcaggtgatctgcccacctcggcctcccaaagtgctaagattacaggcgtgagccaccgtgcctggcccacactgttttatactttgcttttttttgcaacaatttaccctgagatcattctctattaatatataaggaggtatgtgtgtttttttaaaacaattgtataattttattttataaggaaagtgacatttaaccaatcccctactgaagagtatttgtggcatttccatattactgttacagtggtacagtgaataccaaatataagtacatacatatatatgtgaatatatgtatctacgtcattttgaaaggttgtgccaatttacacttttgtgcaacgcatgaaaatactatttttgtgccagtcttaccaacaaacttggatatttatcaagtgctgtgaatgcatcatctcatttaattatcataccaacatgcaaaatagtgatattattcccattgtatataactgtgctgtgcgctcacatgactgtatggaagagctggctttccaacagttatgctgtgctgcctctttaataattcactttaccttaaatttagttagttgtttctttaatcagatatttagaagattgtcattttggttaataatatatgtgtatgtataaatatatatacacacacatactctgcatcttgtatgtgtatccaacttcattttgaaagattaaaaataagtttgtaacgcctaaatatccttattaaaatactgcaaatc

SEQ ID NO: 90508 - DNA, 578 bp, Artificial Sequence
  derived and/or modified sequence
gtccattgttctcggtgccccacgggcttgagccggggtgaatctggaggggccgggccgagcccgggggcgctttcgcacgcgaagcaaccgctagagcaggacctggtctcccgagaggctggagtgcaatggcctgatctccgctcaccgcatcctctgcctcccgggttcaagcgattctcctgcctcagcctccggagtagctgggattacgggcatgcgccaccacgcctggctaattttgtttttagtagagacgaggtttctccgtgttggtcaggctggtctcgatcttccgacctcaggtgatccgcccgcctcaacctgccaaagtgctaggattacaggtctgagccaccgcgcccggctcgggactacttgttgatatttgaggagggaagtgtcttacctgagagcctggctggagaagactgaggtccaaggcttgaagcctaagtgattgccccaggactgtggatgatggctgcagacatcccgagagtgaccactccgctgagctccttggtccaggtgcctcaagaggaagatagacaggaggaggaggtcaccaccat

SEQ ID NO: 90509 - DNA, 581 bp, Artificial Sequence
  derived and/or modified sequence
gttctcggtgccccacgggcttgagccggggtgaatctggaggggccgggccgagcccgggggcgctttcgcacgcgaagcaaccgctagagcaggacctggtctcccgagagacggagttttgcttttgttgcccaggctggagtgcaatggcctgatctccgctcaccgcatcctctgcctcccgggttcaagcgattctcctgcctcagcctccggagtagctgggattacgggcatgcgccaccacgcctggctaattttgtttttagtagagacgaggtttctccgtgttggtcaggctggtctcgatcttccgacctcaggtgatccgcccgcctcaacctgccaaagtgctaggattacaggtctgagccaccgcgcccggctcgggactacttgttgatatttgaggagggaagtgtcttacctgagagcctggctggagaagactgaggtccaaggcttgaagcctaagtgattgccccaggactgtggatgatggctgcagacatcccgagagtgaccactccgctgagctccttggtccaggtgcctcaagaggaagatagacaggagga

SEQ ID NO: 90510 - DNA, 2082 bp, Artificial Sequence
  derived and/or modified sequence
aaaatgcccagaccagcatccgaaagctggtctcctatacaaagcagaatccctgcctacaaagcagtttcccacctccgactcctccccacggcgaacagcccttctggatccaaccaacccaccaaccccaatagggcccagcacccagagggtccacaatccagagaaggagctacaagccctgtacttgcaagcctcgaacccccaactccaactgacctcccctctgccagagcaagaccacgagtacccgccgagagcggacctggctggctacacaaagccaggcgcccgaccagagggatcctccgggacgtcctccgccaccggggcgtccccgcccagccccgcccggcgcccggcgctcaccagctctcctccccctcctcctagcctgacagacgctccaggtcgtctagcaagccgccctcccccgccgccagcaagaaggtggcgtctcgcagctcctcgttattcgtccgcctcgggtccatccggccccgccgcccgactttgcgctgagacccaaggggaagccccgaggggaccccgcgccgtaggagggagtggaggagccggcgaaccgcgatggagccggggcccagcacagcgcgagcggctcctcggctgttcgtgctgcttccccagcttcttcaccggcacctgcagcttccgcacctcctggtccgcgttcacgttagagttaacgtcctccatcccggccccgctgcctccgccgcccgcggccctctcgctctcgcagcaacaagggaagagccggaggaaagaggcgtccacgccgctcactccagccgaggcccccgcatatagcagggccaggccccgtcgccagggttcccccagcgcgggtcccgaagcaccgctggccacagatgaaccgcctcctcagcgcaggtccgggattcggggaggcagcgccaatatccggtctctgcagccatcttccctccgtccctccgcccaccgagggtcggccctgtaggtgacctcagagcgtcggggatgggcgtggccccgtcgggcgctaagaagacctagcgcagagaggaccgccgagctcccgacggggcggggccaggtgtgtgaggggcggggattggacccggaggggcgtgtctggactgccggcggaagtggaacgcggcctgacctgcgacggaaagccactgcaagcccggaggcgaacagaaggcattccgcgagccgggctgagttggtgaacacggtcctcgttcaccccgcctattggtctgggcgtgtggggtattctccacccacttatacggcgtgtgggaccgacgggcccgtcctgcccggctccggtccggatctcgagtaggcgctcaatgggattcggggagacgtagtttactttgttcagcaaatatttaaccgatgcctattttaatgggagattgtttccgctggcgggagcctcagagaccgcctgtgtcctttaagaaacccgaatttcagacagttaagagaggtctaaggtcaaaataataatcataatttcttcttactggccagatactatgctaagccctttttaattttattattattatattttgtcaccgaggctggagtgcaatggcccgatcttggctctgcaacctccgcctcccggtttaaagcgattctcctgcctcagcctcccgagtaactgggattacaggcgggcgccaccacgcctcgctgatttttgtattttagtagagacggggtttcgccattttggccaggctggtctcgaccctgacctcagggtgatccgctcacctcagccactcaaaagtgctgggattactggcgtcagccaccgcgcgcccggtcgtgctaatcactttgaaaggcattatctcatcggttaaaacatagttttccggacttaaaagtttacagcacactggcgcagaagatggaaaaccgctgcttgcctttctccgtttattgactcacattctgctctttggatcattttcttcggaaaaagttttccaaagtgtgtcttgtgtattaaaagttgtgtattaaaagtatttgaacacgctg

SEQ ID NO: 90511 - DNA, 264 bp, Artificial Sequence
  derived and/or modified sequence
agcgtggcccaggccggcgtgcagtggcacaacctgggcagcctgcagccccccccccccagattcaacagattcagctgcctgagcatccccagcagctgggactacagacacagcccccccctgctggccgacttctgcatctacctggtggagaccggcttccaccacgtgggccaggccggcctggagctgctgaccagcagcgacctgcccaccagcgccagccagagcgccagaatcaccggcgtgagccacagatag

SEQ ID NO: 90512 - DNA, 321 bp, Artificial Sequence
  derived and/or modified sequence
ttcttcctgagcttcctgcacagcttcttcctgagacagagcttcgccctggtggcccaggccggcgtgcagtggcacaacctgggcagcctgcagccccccccccccggcttcaagcagttcagctgcctgagcctgctgagcagctgggactacagacacgtgcccccctgccccgccaacttcgtgttcctggtggagatgggcttcctgcacgtgggccaggccggcctggagctgagaaccagcggcgacccccccaccctggccagccagagcgccggcatcaccggcgtgagccacagagcccagcccagctag

SEQ ID NO: 90513 - DNA, 282 bp, Artificial Sequence
  derived and/or modified sequence
agcgtggcccaggccggcgtgcagtggcacaacctgggcagcctgcagccccccccccccagattcaacagattcagctgcctgagcatccccagcagctgggactacagacacagcccccccagactggccgacttcctgttcctggtggagaccgagttctgccacgtgggccaggccgccctggagctgctgaccagcggcgacctgcccaccagcgccagccagagcgccagaatcaccggcgtgagccacagaaccagacccagcctgttctactag

SEQ ID NO: 90514 - DNA, 303 bp, Artificial Sequence
  derived and/or modified sequence
ttcctgagaagaagcctggccctgagccccagacagtggcacgacctgggcagcctgcagccccccccccccggcttcaagcccttcagctgcctgagcctgctgagcagctgggactacagatgcgcccccccctgccccgccaacttctgcatcctggtggagatgggcttccaccacgtgggccaggccggcctggagctgctgaccagcgacctgcccaccagcgccagccagagagccggcatcaccggcgtgaaccaccacgcctggcccagagacgccttcagcatcagctactag

SEQ ID NO: 90515 - DNA, 282 bp, Artificial Sequence
  derived and/or modified sequence
agcgtggcccaggccggcgtgcagtggcacaacctgggcagcctgcagccccccccccccagattcaacagattcagctgcctgagcatccccagcagctgggactacagacacagcccccccctgctggccgacttcctgttcctggtggagaccgagttctgccacgtgggccaggccgccctggagctgctgaccagcggcgacctgcccaccagcgccagccagagcgccagaatcaccggcgtgagccacagaaccagacccagcctgttctactag

SEQ ID NO: 90516 - DNA, 303 bp, Artificial Sequence
  derived and/or modified sequence
ttcctgagaagaagcctggccctgagccccagacagtggcacgacctgggcagcctgcagccccccgcccccggcttcaagcccttcagctgcctgagcctgctgagcagctgggactacagatgcgcccccccctgccccgccaacttctgcatcctggtggagatgggcttccaccacgtgggccaggccggcctggagctgctgaccagcgacctgcccgccagcgccagccagagagccggcatcaccggcgtgaaccaccacgcctggcccagagacgccttcagcatcagctactag

SEQ ID NO: 90517 - DNA, 273 bp, Artificial Sequence
  derived and/or modified sequence
cagtggagcgacctgggcagcctgcagccccccccccccggcttcaagagattcagctgcctgaacctgcccaccagctgggactacagacacgtgccccccagacccgccaacttctgcttcttcatcgagatgggcttcctgcacgtgggccagaccggcctggagctgcccaccagcggcgacccccccgccagcgccagccagagcgccggcatcaccggcgtgagccaccacgcctggccccacttcatcatcctgctgatgatctag

SEQ ID NO: 90518 - DNA, 588 bp, Artificial Sequence
  derived and/or modified sequence
atgcccaacttcctgggcctgcacagagccagaagcttcaccgtgctgtgcttctggagcaccgccgacgtgctgaacgccagcggccccagaagacagtggcaccccctggccagctgcagcagctggagcagaccccagagccagggcagcacccccggcgtgctgtgcaagaccggcatgggcagagagcccatccccgagacccagtgccacttcgccaacagcatgtgcagcctgcacgtgagcgtgccctacttcggcaacagccccaacatcagcaacttcttcagatggagcctggccctgagccccagacagtggtgcgacctgggcagcctgcagccccccagccccagattcaagggcttcagctgcctgagcctgcccagcagctgggactacagaagagcccccagccccgccaacttctgcatcctggtggagatgggcttccaccacgtgggccaggccgacctggagctgctgaccagcgccgacctgcccaccagcgccagccagagcgccggcatcaccggcgtgagccaccacgcctggccccagaccctgagcctgctgctgtactag

SEQ ID NO: 90519 - DNA, 900 bp, Artificial Sequence
  derived and/or modified sequence
atgcccgagggcagcgtgagcgccatgagaaccagccccaagagcagctggccctggtgctgcagctggagctgcgcctggagcagcagcagccccccctggagaagcccccccagcgccaccggcaccctgtgcagaagctgcagcctggcccccagcggcgacctggaggtgctgaagagccaggagaccggctgcagagaccccctgcagctgcccggcctgctgggcccctgcgccctgagccccatggtgggcagccccagcggcagagtgaagctggtgggcagaagaagcgtggtgcagtgcagcagatgctgcatcgaccccctgatcttcttcgtgttcgtgttcatcctgttctgcttcgtgttcgagatggagagctgcagcgtgacccaggccggcgtgcagtggtgcgacgacctgggcagcctgcagccccccccccccggcttcagctgcctgagcctgcccggcagctgggactacagacacccccccccccaccccgccaacttctgcatcttcagcagagacgaggtgagcacccccacccaggccggcgtgaagctgctgaccgccagcgacctgcccaccctggccagccagagcgtggccatcaccggcgtgagccaccacgcccagcccaaccccctgatcttctgcttcagcagcagcaccgtgagaaaggccttcgacagaggccccagaagatggcagcacggcggcggcctgaccgtgtgggtggtggtgaaggccctggagagccagctgcagagagaggacgtggacctgagagacggccagtgccacctgcacagaagactggaggcccccgcctggggcaacctgctgggcaaggagggcagcaagagaggcaccatgaagcagaactag

SEQ ID NO: 90520 - DNA, 264 bp, Artificial Sequence
  derived and/or modified sequence
tcagtggcccaggccggggttcagtggcacaacctaggctccctgcaacctcccccgccgcgatttaatagattcagctgcctgagtattccgtcatcttgggattaccgccattcgcccccactcctcgccgacttttgcatttatctggtagagaccggcttccaccatgtgggtcaggctgggttagagctgctgactagctccgatttgccgacatcggccagtcagtcagccagaattactggggttagccaccgctag

SEQ ID NO: 90521 - DNA, 321 bp, Artificial Sequence
  derived and/or modified sequence
ttttttcttagttttcttcacagtttttttctaagacaatccttcgcgctcgtggcccaggccggcgtccagtggcataaccttggaagcctacaaccacctcctcctggatttaaacagtttagctgtctgtcactcctgtcctcttgggactaccgacacgtgccaccctgcccagcaaattttgtgtttctagtggagatgggattcttgcacgtcgggcaggcaggactggagctgcgtacatccggagacccccccacactggcctctcaatctgccggtatcaccggggtctctcaccgcgcccagccttcatag

SEQ ID NO: 90522 - DNA, 282 bp, Artificial Sequence
  derived and/or modified sequence
tctgttgcacaagcaggagtccaatggcataacttgggtagcttgcaacctccgccacctagattcaatcgcttctcttgcttaagcatacctagttcatgggattaccgccatagtcccccaagacttgccgattttctatttctcgtggaaactgagttctgccacgtgggccaggccgcgctggagttgttgacttcaggcgatctccctacctcagccagtcagtctgcacgcatcacgggggttagtcatcggacgcgccctagcttattctattag

SEQ ID NO: 90523 - DNA, 303 bp, Artificial Sequence
  derived and/or modified sequence
ttccttagacggtctctcgccctgtccccacgacaatggcacgaccttggaagcctgcagcccccgccccccggcttcaagcccttttcatgtctgagcctgttgtcatcctgggattaccgctgtgccccaccgtgcccggccaacttttgcatcctggttgaaatgggcttccatcacgtgggccaagcgggcctcgaacttctcacctcagaccttcccactagtgcttcccaaagggcaggcattacgggagtgaatcatcatgcctggccaagggacgcgttcagcatctcatattag

SEQ ID NO: 90524 - DNA, 282 bp, Artificial Sequence
  derived and/or modified sequence
agtgttgcacaggcaggggtgcagtggcacaacctcggctcactccagcctcctccaccccgcttcaatagattctcatgtctcagtataccctcttcttgggactaccgccactctcctcccttactggccgactttctgtttctggtcgaaaccgagttctgccatgtgggccaggccgcccttgagctgttgacaagtggagatctgcccacttcagcatcgcaatctgcgcgcatcaccggggtctcacatagaacgagaccttccctgttttactag

SEQ ID NO: 90525 - DNA, 303 bp, Artificial Sequence
  derived and/or modified sequence
tttctgcggaggagcctggcactgtctccgcgccagtggcacgatctaggtagtttacagcctcctgcccccgggtttaaaccgttttcttgcctcagcttgctgtcctcatgggactatagatgcgcccctccttgccccgccaacttttgcattctggtcgagatgggatttcatcacgtgggtcaggccggactggagctgttgacctccgatctgcccgcaagtgcctcccaacgagccggaatcacaggagtgaatcaccacgcttggccgcgggacgctttttctattagttactag

SEQ ID NO: 90526 - DNA, 303 bp, Artificial Sequence
  derived and/or modified sequence
tttctcagaaggtccctggccttatctccacgacagtggcacgatctcggctcactgcagccccccgctccaggatttaaaccattctcctgcttatctctgctgtctagttgggactaccgttgtgcacctccctgccccgccaatttttgcatacttgtggagatgggctttcaccacgtaggtcaagccggtctggagctcctgacatctgacctaccagccagcgcctcgcagagggctggcatcactggggttaaccaccacgcatggcccagggatgccttttctatatcatattag

SEQ ID NO: 90527 - DNA, 273 bp, Artificial Sequence
  derived and/or modified sequence
cagtggtctgacctgggcagcctccagccgccacctccgggattcaaacggttctcctgtctcaacctccccacttcctgggattatcgccatgttcctcctcgccccgctaacttttgtttctttatcgagatggggttcctgcacgtgggtcagaccgggctggagttgcccacctctggagacccccccgcctccgcctctcagtctgccggaatcacaggcgtctctcatcatgcatggccccatttcattatcctcttgatgatttag

SEQ ID NO: 90528 - DNA, 588 bp, Artificial Sequence
  derived and/or modified sequence
atgcccaacttcctcggactgcaccgcgcgcggagcttcacggtcctgtgcttctggtcaaccgcggacgtgctgaatgcatcgggaccaaggcgccagtggcatccactcgcctcttgctcatcttggtctcgcccacaatctcagggatccacccccggcgtgttgtgcaagaccggcatgggtcgggagcccattcctgagacgcagtgtcacttcgccaattcaatgtgctcactgcatgtcagtgtgccgtacttcggcaactcccctaatattagtaacttttttcgctggagcctggctctgtcccccagacagtggtgcgatcttggctcattacagcctccaagtccaaggtttaaaggttttagctgcttgtctctgccatcttcttgggattaccgtagggccccctcgcctgctaatttttgcatattagtggagatgggattccatcatgttggccaggcagacttagaattgctcacaagcgccgacctccctacttctgcatctcagtctgcaggtattactggggtgtctcatcatgcatggccacagaccctgtctctgctcctctactag

SEQ ID NO: 90529 - DNA, 900 bp, Artificial Sequence
  derived and/or modified sequence
atgccagaaggctctgtatccgcaatgcgcacctccccaaagagttcctggccgtggtgttgtagttggagctgtgcttggagctcctccagccctccctggcgctcccctcccagcgcgaccggcactctctgtaggagctgcagcctcgctccaagcggtgacctcgaagtactgaagagtcaggagacaggctgtcgggatccattgcaactgcccggactcctgggtccctgtgccttgagtcccatggtgggtagccctagcggcagagtgaaactggtcggtagacgctccgtggtgcagtgctctaggtgttgtatagatcccttaatcttctttgttttcgttttcatactcttttgttttgtgttcgaaatggagagttgcagcgtgactcaggcaggtgttcagtggtgcgacgacttgggtagcctccagccccctcctcccggcttctcctgtctcagtctcccagggtcatgggattaccgtcacccccccccccatcccgccaacttttgtatcttctccagggacgaagtaagcacacctactcaggctggcgtgaagcttttaactgcatctgacctccctacgctggcaagtcaatctgtggccataacgggagtgtctcatcatgcccagcccaaccctctaatcttttgtttcagttcttctactgttcgcaaggcgtttgaccgagggccccgccgttggcagcatggcggcggtctgacagtgtgggtcgtggtgaaggccctggaatctcagctgcagagggaggatgttgatctgcgggatggccagtgtcacttacacagacggctggaggctcccgcctggggaaacctcctgggtaaagaggggtccaagagagggacaatgaaacagaactag

SEQ ID NO: 90530 - DNA, 1989 bp, Artificial Sequence
  derived and/or modified sequence
cattcttgtaacccaggctggagtgcggtggcgtgatctccgctcactgcaacctctgcctactgggttcaagcgattctcctgcctgattctcccaagtagctgggattacaggtgctcactaccatgttggctaattttttgtatttttagtagagatggggctttaccatgttggtcaggctggtcttgaactcctgacctcaagtgatccgcccacctcggcctcccaaaatgctgagattacaggtgtgagccaccgtgcccagtctaaggcacacaatttgcaaaggaaattgaggctctcgcacaaatccagtccaccctgtacttacacccaacatgcaggaggtgttgactctcatcccttgactcaggacatgtgtgtaattgttaatgtcatcgcaaggccttttgacaagtgtaattgtgacatataccttggcctagcatctgagttatttgttgtttcctgggtccagctcacagtgccatatcactggatccagacccttggtaatgtgattctattctgccttgatacagcccacaggggtcattgtgacatcgctgggcattgcacctaggtgatttgagtctcctcttctgccttggtgctgcccacaggtgtattgtgacatattgctgggcgtatgttatgtgactcttgcttgtgccctaaacacataggccattgtaacattgctgagtgcaacacccaggtgatgtaacgcttcaccctggacctgtctacagagggcattgtaatatatgtcttcaccaatcacccaggaaatgtgactttttattcctccctgttctgtactcacagggggtattgggacatattgggcccagcacctagctgatgtgacttttctttattctaggttctgacaacaaaggagattgtgacatattgctgggcctaacactaaggtgatgttagttatttgctttggctgtgcccttggaaggcattgagacatactgctgtgcccagcaccaagatgatgtaacgtgactcttctgcttcaggcctgccaaaagaaaagattgtgacagatcactggacccagcacctaggtgatatgactctcctcatttgcctgagacctgcatattttagacattgtgatatacaactggaacaaacacctaggggttggaaggctcctgcctgagtccctcccacaggaggccttgtgatgtttttttgtttgttttttgttttctttgagatggagttttgttattgttgcccagactggcatgcggtggcgcaaccttggctcaccgcaacctccgcctcccgggttcaagcagttctcctgcctcaacctcccgagtagctgggattacaggcatctgccaccatgcccggctaattttctatttttaatagagacggggtttctccatgttggtcaggctggtctcaaactcctgaaatcaggtgatccacctgccttggcctcccaaaatgctgggattacagttgtgagccactgcacccagctttgtgatgtatttctgcatccatcatgcaggagataaaactctgtatttttgcctgcattctgcccacagggaagattttgacatattgttgggcccagcaaccagtcgttttgtctgtcatatctgggcccagcacccaagggatctcactcttctacctgtgccctgctttcaggagggattgtaacatccctggtcaagcccccagtgatgtgattctcctgtttgatgcctgccctcagggaggattgtgacatagccctggcccaacacacagttcatgtaactcttgaatttgctctttacatacaggtaggattgtgacatatatctggccaagcgtacagatgtaatgatgactgtcataccttgaagaagccaatagcagagagaatgttgctctcaggcttaggaaaatgaggaagtctttctgtacaaaagtcataaagaattactactctctcacat

SEQ ID NO: 90531 - DNA, 264 bp, Artificial Sequence
  derived and/or modified sequence
tctgtggcccaggccggcgtgcagtggcacaacctgggcagcctgcagcccccaccaccccgcttcaaccgcttcagctgcctgagcatccccagctcctgggactaccgccacagcccccccctgctggccgacttctgcatctacctggtggagaccggcttccaccacgtgggccaggccggcctggagctgctgaccagcagtgacctgcccaccagcgccagccagagcgcccgcatcaccggggtgagccacaggtag

SEQ ID NO: 90532 - DNA, 321 bp, Artificial Sequence
  derived and/or modified sequence
ttcttcctgtccttcctgcacagcttcttcctgcggcagagctttgccctggtggcccaggccggcgtgcagtggcacaacctgggcagcctgcagcccccacctcctggcttcaagcagttcagctgcctgagcctgctgagctcctgggactaccgccacgtgcccccctgcccagccaactttgtgttcctggtggagatgggcttcctgcacgtgggccaggccggcctggagctgcggaccagcggggacccccccaccctggccagccagagcgctggcatcactggagtgagccaccgggcccagcccagctag

SEQ ID NO: 90533 - DNA, 282 bp, Artificial Sequence
  derived and/or modified sequence
tctgtggcccaggccggcgtgcagtggcacaacctgggcagcctgcagcccccaccaccccgcttcaaccgcttcagctgcctgagcatccccagctcctgggactaccgccacagccccccccggctggccgacttcctgttcctggtggagacagagttctgccacgtgggccaggccgccctggagctgctgaccagcggggacctgcccaccagcgccagccagagcgcccgcatcactggagtgagccacaggacccggcccagcctcttctactag

SEQ ID NO: 90534 - DNA, 303 bp, Artificial Sequence
  derived and/or modified sequence
ttcctgcggcgcagcctggccctgagcccccggcagtggcatgacctgggcagcctgcagcccccacctcctggcttcaagcccttcagctgcctgagcctgctgagctcctgggactaccgctgtgccccaccctgcccagccaacttctgcatcctggtggagatgggcttccaccacgtgggccaggccggcctggagctgctgaccagtgacctgcccaccagcgccagccagagagctggcatcaccggggtgaaccaccacgcctggcccagagatgccttcagcatctcctactag

SEQ ID NO: 90535 - DNA, 282 bp, Artificial Sequence
  derived and/or modified sequence
tctgtggcccaggccggcgtgcagtggcacaacctgggcagcctgcagcccccaccaccccgcttcaaccgcttcagctgcctgagcatccccagctcctgggactaccgccacagcccccccctgctggccgacttcctgttcctggtggagacagagttctgccacgtgggccaggccgccctggagctgctgaccagcggggacctgcccaccagcgccagccagagcgcccgcatcactggagtgagccacaggacccggcccagcctcttctactag

SEQ ID NO: 90536 - DNA, 303 bp, Artificial Sequence
  derived and/or modified sequence
ttcctgcggcgcagcctggccctgagcccccggcagtggcatgacctgggcagcctgcagcccccagcccctggcttcaagcccttcagctgcctgagcctgctgagctcctgggactaccgctgtgccccaccctgcccagccaacttctgcatcctggtggagatgggcttccaccacgtgggccaggccggcctggagctgctgaccagtgacctgcctgccagcgccagccagagagctggcatcaccggggtgaaccaccacgcctggcccagagatgccttcagcatctcctactag

SEQ ID NO: 90537 - DNA, 273 bp, Artificial Sequence
  derived and/or modified sequence
cagtggagcgacctgggcagcctgcagcccccacctcctggcttcaagcgcttcagctgcctgaacctgcccacctcctgggactacagacatgtgccccccaggcctgccaacttctgcttcttcatcgagatgggcttcctgcacgtgggccagacaggcctggagctgcccaccagcggggaccccccagccagcgccagccagagcgctggcatcaccggggtgagccaccacgcctggccccacttcatcatcctgctgatgatctag

SEQ ID NO: 90538 - DNA, 588 bp, Artificial Sequence
  derived and/or modified sequence
atgcccaacttcctgggcctgcaccgggcccggagcttcaccgtgctgtgcttctggagcacagcagatgtgctgaatgccagcggcccccggcggcagtggcaccccctggccagctgcagctcctggagccggccccagagccagggcagcaccccaggagtgctgtgcaagacaggcatgggccgggagcccatccctgagacccagtgccactttgccaacagcatgtgcagcctgcacgtgtctgtgccctactttggaaacagccccaacatcagcaacttcttccgctggagcctggccctgagcccccggcagtggtgtgacctgggcagcctgcagccccccagcccccgcttcaagggcttcagctgcctgagcctgcccagctcctgggactaccgccgggcccccagccctgccaacttctgcatcctggtggagatgggcttccaccacgtgggccaggccgacctggagctgctgaccagcgctgacctgcccaccagcgccagccagagcgctggcatcactggagtgagccaccacgcctggccccagaccctgagcctgctgctgtactag

SEQ ID NO: 90539 - DNA, 900 bp, Artificial Sequence
  derived and/or modified sequence
atgcctgagggctctgtgtctgccatgaggaccagccccaagagctcctggccctggtgctgctcctggagctgtgcctggagcagcagcagccccccctggaggagccccccatctgccaccggcaccctgtgccgcagctgcagcctggcccccagcggggacctggaggtgctgaagagccaggagaccggctgccgggaccccctgcagctgcccggcctgctgggcccctgtgccctgagccccatggtgggcagccccagcggccgggtgaagctggtgggcagaagatctgtggtgcagtgcagccgctgctgcatcgaccccctcatcttctttgtgtttgtgttcatcctcttctgctttgtgtttgagatggagagctgcagcgtgacccaggccggcgtgcagtggtgtgatgacctgggcagcctgcagcccccacctcctggcttcagctgcctgagcctgcccggctcctgggactaccgccaccccccaccccacccagccaacttctgcatcttcagcagagatgaggtgtccacccccacccaggccggcgtgaagctgctgacagccagtgacctgcccaccctggccagccagagcgtggccatcactggagtgagccaccacgcccagcccaaccccctcatcttctgcttcagcagcagcacagtgaggaaggcctttgaccggggcccccggcgctggcagcacggcggcggcctgactgtgtgggtggtggtgaaggccctggagagccagctgcagcgggaggatgtggacctgagagatggccagtgccacctgcaccggcggctggaggccccagcctggggcaacctgctgggcaaggagggcagcaagaggggcaccatgaagcagaactag

SEQ ID NO: 90540 - DNA, 264 bp, Artificial Sequence
  derived and/or modified sequence
agcgtggcccaggccggcgtgcagtggcacaacctgggcagcctgcagccacctcctccgagatttaaccggttctcttgcttgtctattccatcgagttgggactatagacatagtcctcctctgttagcagatttctgcatttacctggtcgaaacaggcttccatcacgtgggccaagccgggctggaactactgacaagctcagacctgcccacgtcagcctcccagagtgcacgtattaccggcgtgagccaccggtag

SEQ ID NO: 90541 - DNA, 321 bp, Artificial Sequence
  derived and/or modified sequence
ttcttcctgagcttcctgcacagcttcttcctgcggcagagcttcgctctggtggctcaagctggggtccaatggcacaaccttggaagcctgcagccccccccccccggattcaaacagttctcctgcctcagtcttctctcctcttgggattacagacatgtacctccgtgtcctgccaatttcgtgtttctcgtggagatggggttcctacacgttgggcaggctggcctggaacttcgcacttccggggatcctcccacactcgctagccagtctgcagggattacaggagtctcacacagggctcagccatcctag

SEQ ID NO: 90542 - DNA, 282 bp, Artificial Sequence
  derived and/or modified sequence
agcgtggcccaggccggcgtgcagtggcacaacctgggcagcctgcagccaccacctccccgtttcaaccgcttcagctgcttgtcaattccaagtagctgggattaccgacactctccccctagactggcggactttctgttccttgttgaaaccgaattttgccatgttgggcaggccgcgttagagctactgacaagcggcgaccttcctacatcagctagtcagagcgcaaggatcacaggcgttagccatcggacaagaccgagcctcttttactag

SEQ ID NO: 90543 - DNA, 303 bp, Artificial Sequence
  derived and/or modified sequence
ttcctgcggcggagcctggccctgagcccccggcagtggcacgacttgggaagcctacaaccgccccctcctgggttcaaaccattctcgtgcctctcactcttgtcctcctgggactataggtgtgcaccaccctgtccggctaatttttgcatcttagtggagatggggtttcaccacgtgggacaagctggactggaactgctgacgtcagatctgccaactagcgcaagccaaagggccgggatcactggggttaatcaccacgcgtggccaagagacgcattctctatttcttactag

SEQ ID NO: 90544 - DNA, 282 bp, Artificial Sequence
  derived and/or modified sequence
agcgtggcccaggccggcgtgcagtggcacaacctgggcagcctgcagccacccccgcccagatttaaccgcttctcttgcttgtccattccgagcagttgggactaccggcacagccccccccttctcgcagattttctgttcctcgtggagactgaattctgtcacgtcgggcaagctgctctcgagctcctgaccagcggggatcttccgaccagcgcttcccagtctgctaggatcactggagttagccatagaacccgacctagcttgttttactag

SEQ ID NO: 90545 - DNA, 303 bp, Artificial Sequence
  derived and/or modified sequence
ttcctgcggcggagcctggccctgagcccccggcagtggcacgacctgggctctctccaacctccagctccaggtttcaaaccattctcctgcctctctcttttgtcttcctgggattaccgctgcgcacccccctgcccagcaaatttctgtatcttggttgaaatggggtttcaccacgtgggccaggctggcctcgaacttctgacttccgacctaccggccagtgcttcacagcgggccggtataacaggggtgaatcaccacgcttggccgagggacgcattttcgatctcttattag

SEQ ID NO: 90546 - DNA, 303 bp, Artificial Sequence
  derived and/or modified sequence
ttcctgcggcggagcctggccctgagcccccggcagtggcacgacctcgggagcttgcagcccccagcccctggctttaagcccttcagctgcctgagtctcctatctagctgggattataggtgcgcccctccatgccccgcgaacttttgcatcttagttgaaatgggattccaccatgtgggtcaagctggcttagaactcctgacctccgatctgccagcgtccgccagccagagagcggggatcaccggcgtgaatcatcatgcatggccccgagacgctttcagcatttcctattag

SEQ ID NO: 90547 - DNA, 273 bp, Artificial Sequence
  derived and/or modified sequence
cagtggagcgacctgggcagcctgcagccccccccccccggcttcaaacggtttagttgtctgaacctcccgacctcatgggactaccgacatgtccccccccggcccgccaacttttgttttttcatagaaatgggttttcttcacgtggggcagacaggtcttgaactcccaacatcaggcgatcctccggcaagtgcctctcagtctgcaggcattacaggagtatcacaccatgcttggcctcactttatcatcctgttgatgatctag

SEQ ID NO: 90548 - DNA, 588 bp, Artificial Sequence
  derived and/or modified sequence
atgcccaacttcctgggcctgcaccgggcccggagcttcaccgtgctgtgcttttggagcactgctgatgtcctcaacgcctccggccccagacgccagtggcatcccctagcctcctgctcaagttggtccagacctcaatcccaaggctccactcccggcgtcctctgcaagacaggtatgggccgagagccgatccccgagactcagtgtcatttcgcaaactctatgtgcagtctgcacgtctctgtgccatatttcgggaactcccctaacatctctaacttcttccgatggtccctggccctaagtcccaggcaatggtgcgacctaggcagtcttcaacccccgagccctcggttcaaagggttctcttgcttatctctcccgtctagctgggactatcgtagggcgccttctcccgccaacttctgcatacttgtggaaatggggttccaccatgtcggacaagccgacctggagctcctgactagcgccgacctacctaccagtgcatcacagagcgctggtatcaccggtgtttcacaccacgcttggccgcaaaccctctcgcttcttctctactag

SEQ ID NO: 90549 - DNA, 900 bp, Artificial Sequence
  derived and/or modified sequence
atgcccgagggcagcgtgagcgccatgcggaccagccccaagagctcttggccctggtgttgctcatggtcctgcgcttggtcatccagtagccccccatggagaagccccccatccgctaccgggaccctgtgtcgatcttgcagcctggccccatctggagatctggaggttcttaagtctcaggaaactgggtgcagagatcctctgcagctgcctgggcttcttggtccttgcgctctgtccccaatggtgggcagtcctagcggacgcgtgaagttggtaggcagaaggtccgtcgtccagtgttccaggtgttgcattgacccgctgattttttttgtgtttgtattcatcctgttctgtttcgtgttcgaaatggagtcctgcagcgtgactcaggccggcgtgcagtggtgtgatgacttgggatccctacagccgcctcctcctggattttcctgcctcagtcttcctggttcttgggattacagacaccctccgcctcaccccgcaaatttttgtattttcagtagagacgaagtttcaacccctacccaggccggggtgaagctactcacagcatccgaccttccaacattagctagccagagtgtagccatcaccggcgtctcccaccacgcacagcctaatcctcttatcttttgtttcagttcttccacggtgcgcaaagcctttgatcgggggcctcgccgatggcagcacggcggcggcctgacagtgtgggtcgtggttaaggctctcgaatcccaattgcagcgggaagatgtggatctgcgggacggtcaatgtcacttgcacagacgcctggaggccccagcctgggggaatcttcttggtaaagagggtagcaaacgagggaccatgaagcagaattag

SEQ ID NO: 90550 - DNA, 1381 bp, Artificial Sequence
  derived and/or modified sequence
agacagcctcagagctggtggggagacagcatgccactggaaaaattcgtagacatggaattcctggatcaaatgatactaagggggacttgcctggaagcagacttgtgtccgcagtatacaaactcaccctttaatgcacacactgaccagataacacaaacacatttacccccacagcacctagactcttctcacagtacacacacttgccttccagtacacagacatatccaaaggcacaccgacaagcaccacagcaaaaagatgttccccagaacacatggacaccccaatccccgtatcattagactctcccagaggcacgtatgtactgcttaatgcagagactcacctgaggcacactgatgcaccccgcatgacacagacttgcccccccataaggactctactatgacacacagacaatcccaacatcacacactgttcccacatcacacgaacccattttaggaaacacacagcatacagacttaccccatagaacacggcttccccgacaagcacacatactctcaaggccagtagactcaccccacagcacacagactttctctagagtgtacagcttcttcccacagcaaacagactctccccagggcacacagacacccctgacatcacatactctcaccacagaccatagactcgtcctagagcacagggactcttgccaatgaaacagactttcccgagaatagactcatgagacagcttgaagacccgcatcatgacacaaagactctcccacaacagacagactcaccccattgtgtacagacaagcaccataggccacagaccatcacctcaggacacagacttgcccagcaccacacagacactctgcagagcacgtagagtcaccccgcaaagcacagactaaacccatactacagagactctccctatagctttcagacaagtttaccccaccacagagacatgcaacggtacatcttacaacatatatcactccttgatgcacacaattgtgccacagcacacaaacttgtcctacagtgcacaaattcatgtcacaaaagacacactcaccacacaatacaaatacttgctccagccggacgcggtggctcacgcctgttatcccagcactttgggaggcctaggcaggtggatcacctgacgttgggagttcgagaccagtctcaccaacatggagaaaccccgtctccactaaaaatacaaaattagccgggcatggtggtgcatgcctgtaatctcagctgctccggaggctgaggcaggagaatcgcttgaacccaagaggcggaggttgcagtgagccaagattgtgccactgcactccagcctgggcaacaagggcaaaactttgcctc

SEQ ID NO: 90551 - DNA, 264 bp, Artificial Sequence
  derived and/or modified sequence
tctgtggcccaggccggtgtgcagtggcacaatctgggttctctccagcccccaccccctagattcaaccgcttctcttgtctctccattccgtccagctgggactaccgccactcccctcccctactggcagacttctgtatctacctcgtcgagactggattccaccacgtgggccaagcaggactagaactactcacctcgtcagacctaccaacaagtgctagccagtcggcaagaatcacaggcgtgtctcatagatag

SEQ ID NO: 90552 - DNA, 321 bp, Artificial Sequence
  derived and/or modified sequence
ttcttcctgagcttcctccactcctttttcctccgccagtcatttgcactggttgcccaagcaggagtccagtggcataacctcggatctctgcagccaccacctcctggcttcaaacagttttcctgcctgagtctgttgtccagctgggactacagacacgtacctccctgtcccgcaaacttcgttttcctggttgaaatgggtttcctccacgtgggacaggctggactcgagctgagaacaagcggcgatcccccaacactggcatcacagtcagctgggatcacaggtgtgagccacagggcgcagcctagttag

SEQ ID NO: 90553 - DNA, 282 bp, Artificial Sequence
  derived and/or modified sequence
agcgtggcccaggctggggtccaatggcacaatctgggttcactgcaacctccaccccctagattcaacagatttagctgtctgtctatcccctcatcatgggattacaggcactccccccctcggcttgctgactttttgttcctcgtggagaccgaattctgtcacgtaggacaggccgctttagaattgctgacttctggggatttgccaacgagcgcgtctcagtcagcacgaatcactggtgtcagtcaccgtacaagaccttcactgttttactag

SEQ ID NO: 90554 - DNA, 303 bp, Artificial Sequence
  derived and/or modified sequence
tttttgcggaggtctctggcattatcccccaggcagtggcatgacctaggaagcttacagccaccccctcctggatttaaacccttctcctgtctgtccctgttatctagctgggattatcggtgcgccccaccatgtccagccaatttttgtattctggtggaaatgggttttcatcatgttggacaagccggtctggagcttctaacaagcgacctaccgacctctgcatcacagcgagcgggaatcaccggggtgaatcaccacgcctggccacgggacgccttctcaatcagctactag

SEQ ID NO: 90555 - DNA, 282 bp, Artificial Sequence
  derived and/or modified sequence
agtgtggcccaagctggcgttcagtggcacaacctcggtagcctacagcctcctcccccacgattcaataggttttcctgcttgagcatcccctcatcgtgggattataggcactcccctcctttgttagcagattttttgtttttagtggagactgagttttgccatgtcggccaggccgcactcgagctgctgacctcaggcgatctcccaaccagtgcgtcccaatctgcccgaattacaggcgtgagccacagaacccgaccttcattgttctattag

SEQ ID NO: 90556 - DNA, 303 bp, Artificial Sequence
  derived and/or modified sequence
ttcctgcgtcgaagtttggctttgagtccaagacagtggcacgatctaggaagtcttcagcccccagcccctggtttcaagccattttcatgcctgtcgctccttagctcgtgggactacaggtgcgctccaccttgccccgctaacttctgtattttggtagagatgggctttcaccacgtcggtcaggctgggctcgagctgctgactagcgacctacccgctagtgccagccagcgggctggcattacaggtgtaaaccaccatgcgtggccgcgtgacgcctttagtatttcttactag

SEQ ID NO: 90557 - DNA, 303 bp, Artificial Sequence
  derived and/or modified sequence
tttctcagacggtcacttgcgctgagtcccagacagtggcatgacctgggttccctgcagccacccgcacctggattcaagcccttttcctgcttgagtcttctgtcgagttgggactaccgctgcgcaccgccttgcccagccaacttctgtattcttgtcgagatgggcttccaccatgtcggacaagccggactggaactcctgacttctgacctgcctgcttccgcttctcagcgggctggcattacaggcgttaaccatcatgcctggccacgtgacgctttctcgatctcctactag

SEQ ID NO: 90558 - DNA, 273 bp, Artificial Sequence
  derived and/or modified sequence
cagtggtccgatttggggagcctgcagccccctccgccagggtttaaacgcttctcttgtctaaatctgcctacctcatgggactaccggcacgtgcctccgcgtccagccaacttttgcttttttatcgagatgggcttcctgcacgtgggccagactgggctcgagcttcctaccagtggggatcccccagcctctgcaagtcaatcagcagggattacaggggtttcacaccacgcctggcctcactttattattcttctcatgatctag

SEQ ID NO: 90559 - DNA, 588 bp, Artificial Sequence
  derived and/or modified sequence
atgcccaatttccttggcctccatcgagcacggtccttcactgtgctgtgcttctggagcacagctgacgtcttgaacgccagtggacccagacgacagtggcacccactcgctagttgctcgagttggagccgtcctcagagccaaggaagtaccccgggagttctgtgcaaaaccggcatgggaagggagcccatacctgaaacccagtgtcacttcgccaactctatgtgtagtctccacgtgtcagttccatatttcggcaatagtccgaacatctcaaatttcttcagatggagcttggcactttccccaagacagtggtgtgacctgggtagtctgcaaccaccatcccctagattcaagggatttagttgtttgagcctaccgagcagctgggattatcgcagggctccctccccagccaacttctgtattcttgtcgagatgggcttccaccacgttggccaggccgatctggagcttctgactagcgccgatctaccgacctccgcctcgcagtccgccggtataaccggggtgagccatcatgcgtggcctcagaccctcagtctcctgttatactag

SEQ ID NO: 90560 - DNA, 900 bp, Artificial Sequence
  derived and/or modified sequence
atgccagagggcagtgtttccgccatgcgaaccagcccaaagtccagctggccgtggtgttgtagctggtcgtgtgcttggtcatctagttcccccccatggaggtcaccacccagcgctactgggaccctgtgtcgaagttgttcactagcgccttccggtgacctggaagttctcaagagccaggagactggctgccgggatcccctgcagctgcccggtctgctcggaccctgcgccttatcgccaatggtgggcagcccctctggacgcgtcaagcttgttgggagacgatctgtggtgcaatgctctaggtgctgcatagacccccttatattctttgtgttcgtctttatcctgttctgctttgtgttcgagatggagagttgcagtgttacgcaggctggggtgcagtggtgcgacgacctcggctcacttcagcctccccctcctggcttttcctgcctgtcgctgccaggatcttgggactataggcaccctccacctcacccagctaatttctgtatcttttccagagacgaagtgagtacacccacccaggcgggtgttaagttgctgaccgctagcgatctgcctacgctggcgtctcaatctgttgccattacaggggttagccatcatgcgcagcctaatccgctgatcttttgcttctcatccagcacagtccgaaaggctttcgatcgtggccctcggaggtggcagcatggtggcggtctcaccgtgtgggtggtggttaaggccctcgagtcccaattgcagagggaggacgtggatctgagggacgggcagtgtcacctacatcgccgactggaggcgccagcttggggcaatctgcttggtaaggagggatcgaagaggggaactatgaagcaaaattag

SEQ ID NO: 90561 - DNA, 1921 bp, Artificial Sequence
  derived and/or modified sequence
tttcttctggtcaatccatctagtgttaatggttctgaaacatggattttattgtgtcgtatttctgcctgagtagtcaagcattcttctttgcctacagaataaattctgcattttttttgactcattttcagactctttcaccatctagtcagaggctgtaaactagtggcctgtgggccagtataatcctacatccccttttccccccatcattttcctttatcttctagtagaaatcttctcgttccagttaagttgttcctctttattttcccgataggaaatactgtattctcctcttgaagcatgtgctctggctctttccctctattatttgtcttctgtgtaaattatcttcacttgtcctagaaacctcctcatacacactgatatttaataaagatagccctcttttgtgaatttgcttgaaaatggaagcattagaagtaggtaaagttatgagccaaggaaataagttattcattgaacaaatattgagctgtaatataatattatatcatattatgtaacaaaatattgagtacctattatgtggtggactgtgttatctgattggggctgttacaatgatcaagaaagactatgttcctccctcattgagcttatatcccattgcaatcaatatgcaaaaataagtaggttgacagcctgccttcagagtgcttttataaacatcttacttgatctgaacagcaatcctgaagtacttgagaaaacagaagttcagctggtctcgaactcctggcctctagtgatctgcttgcctcaggctcccatagtgctgggactacaggtgtgagccaccacgcccggcctggcttcattgatttttccaattgtagtaataatcatgctcattgcttataattcaaccagtactagaaagttcaaacaaccctcatagtaatatagatttgtaaattccaaaattcgtattttattatgtctttctttgccaccttctcttttctccacttggtatatcaagaacatcatttttaaaggctaaatagacactgtatggctattccatagctgaatcaaccaaacctctgttgagaggctcttaaaatgtttcttcttgtataaaaaacaacattgttaaactttattctccatttatctttttataattatttcactcttaattccttagaaatagaattccttagtcaaattatcaggtttattcagtagtcatggtttgtgcaaaacctggtcttctgggagggataagtaagaaaaatggaccatttttctaatgaagcttaagagtttatttggggaaataacattcacttttggaatttcaaaagaaaagttaaaaattcttgacgatttaactttgttacctttgttagtaaaacaatataaaatgctgtggagctataagttaccaggatcaggtatagttatttggtccacatttcatgcagtaatggattcagaatggagaagacaaaatgcagaactgaacttaattacaaataagcattttttaaaaaatctacaatctaagcatttagatgtaaaaatattaaaaaccaagaataagcttgtggaaggaatttaattatgaagtaaactacttgtctttttttgagatggagtttcgctcttgttgcccaggctggagtgcaatggtgtgatcttggctcaccgcaacctctgccccccaggttcaagctattctgcctcagcctcccgagtagttgggattacaggcatgcaccaccacgcccggctaattttgtatttttttagtagagacgaggtttctccatgttggtcaggctgttctcaaactcccaacctcaggtgatctgcccgcctcggcctcacaaagtgctggaattataggcgtgagcaactgcacccagcaactacttgttaaatt

SEQ ID NO: 90562 - DNA, 1718 bp, Artificial Sequence
  derived and/or modified sequence
agaaggggtgggtctctcacctgttcctggctcccactaactttgaggagttcacagccccagccactcctccccactgcagccagtgtctccgtagcaactgctccacatgggccactgctgccatcatagagcggtccttgcaggtgcctttcttgtacctcagcactcctgggggtcattagaagccctagcaacactgctcaccacactatagctccagaggccctagcagtcctgctcccacagatcccacttctgacaccatctattaaaagaaaatcttcagctgaattaaatttaaaggaacttaattgagcaatgaatgattcacgaatcaggcagcccccagaatcacagcagattcagtgagactccagcacagctacatggtggaagatttatagacaataaagggaacgtgatgtacagaaatctgaagtgaggagtgaggtccagaagcaactgggtccgttacagttctcagcagtgaggtccagaaacaactggactggttacagtgctcagcatttgccttatttgaacacagctgaacactcagtagtgtgtgagtggcagaagtttggctgttgggattggccaggactcagctatagttacaggtgcatactccaaagttaggttatcagtctttctacctattaagttaggttgcagtttgtccacagggactcaaatctagaagtacagagtccttcccaggccatatttagttcactgtaacagttcctattatgacctcactgacagttctttttctctgaattttcctttcttctcaacagcttgtccaaatgttccattggtccctgttcatcccgccctgcagctctccttgactgattctgccctttgtggtttgcagtcctgtttctctacagcttggaccccttcaatctttccatcataggtttaactctctgttgaattcttatttgtagctacgcaaatgttaccttaagctaaaaaaattcaaagtgaaagccacatcctcctctcttcccttatgtgtatggtattactaccatgcagccagtgacccaaaatgggattttttctgggcttttcttgcttagattcaggctcatctggtgtcaagccttgttacttttgtttccttgttcttttatttttaattttttttcttttgagacagagtttcactcttgttgcccaggctagagtgcagtggtgtgatcccggctcactgcagcctccacctcccgggttcaagcaattctcctgcctcagctcctgagtagctggtattacaggcatttgccaccacgcctggctaattttgtatttttagtagagatggggtttctctgttttgatcagggtggtctcgagctcccgacctcaggtgatctgcccacctcggcctcccaaagtgctgggattacaggcctgagccaccgtgcctggcctgcttgttgttttcatctcatcctgatttctgaatacaggagaggagctgagttggtgttcactaacaagcacagaagctttgttacatttacagtgtcattcttggcaaaacctgaatggtatgtttgtggggtgatgaggttcagtcccctgtgacctgtgcatctggccaacactgtggtgacatccttaggaatccatggggagagacaaagcattcaggagttagtgggtcacgtttgacaagggccaataaagaaatatgc

SEQ ID NO: 90563 - DNA, 393 bp, Artificial Sequence
  derived and/or modified sequence
agtgcctgtatgtgtgtatgtgtgtgtgtatgtatgtatatatatatatatatatatatatttttttttttttttttttttttttttttgaatatttttaagcaggcaccaccacgccagaatcaggttaggcggccaggcgcagtggctcacacttgtaatcccagcactgtgggaggccatggcgggcagatcacgagaggtcaggagtttgagaccagcctggccaacatgggtgaaaccccatctctactaaaaatacaaacctggccgggcgtggtagcacacgcctgtaatcccagctactcaggagggaggctgaggcaggaaaattgcttgaacctgggaggcggaggttgcggtgagatcgcactccagcctggacaacaagaa

SEQ ID NO: 90564 - DNA, 393 bp, Artificial Sequence
  derived and/or modified sequence
agtgcctgtatgtgtgtatgtgtgtgtgtatgtatatatatatatatatatatatatatattttttttttttttttttgaatttttaactaaattaataaaacagctggtgatgattaagaatcaggttaggcggccaggcgcagtggctcacacttgtaatgccagcactgtgggaggccatggcgggcagatcacgagaggtcaggagtttgagaccagcctggccaacatgggtgaaaccccatctctactaaaaatacaaacctggccgggcgtggtagcacacgcctgtaatcccagctactcaggagggaggctgaggcaggaaaattgcttgaacctgggaggcggaggttgcggtgagatcgcactccagcctggacaacaagaa

SEQ ID NO: 90565 - DNA, 261 bp, Artificial Sequence
  derived and/or modified sequence
tctgtcgcccaggctggagtgcagtggcacaatctcggctcactgcaacctccacctcccagattcaaccgattctcctgcctcagcatcccgagtagctgggattataggcactcgccaccactcctggctgatttttgtatttatttagtagagacggggtttcaccatgttggccaggctggtctcgaactcctgacctcaagtgatctgcccacctcagcctcccaaagtgctaggattacaggcgtgagccaccgc

SEQ ID NO: 90566 - DNA, 396 bp, Artificial Sequence
  derived and/or modified sequence
tgtatgtgtgtatgtgtgtgtgtatgtatatatatatatatatatatatatatatcccagccaatttatatctttttattattattattattattatttttgagacagagtctgatgattaagaatcaggttaggcggccaggcgcagtggctcacacttgtaatcccagcactgtgggaggccatggcgggcagatcacgagaggtcaggagtttgagaccagcctggccaacatgggtgaaaccccatctctactaaaaatacaaacctggccgggcgtggtagcacacgcctgtaatcccagctactcaggagggaggctgaggcaggaaaattgcttgaacctgggaggcggaggttgcggtgagatcgcactccagcctggacaacaagaa

SEQ ID NO: 90567 - DNA, 318 bp, Artificial Sequence
  derived and/or modified sequence
tttttcctttcctttttgcatagtttttttttgagacagagttttgctcttgttgcccaggctggagtgcaatggcacaatctcggctcactgcaacctccacctcccgggttcaagcaattctcctgcctcagcctcctgagtagctgggattacaggcatgtgccaccatgcccggctaattttgtatttttagtagagatggggtttctccatgttggtcaggctggtctcgaactccgaacctcaggtgatccgcccaccttggcctcccaaagtgctgggattacaggcgtgagccaccgtgcccagcccagt

SEQ ID NO: 90568 - DNA, 396 bp, Artificial Sequence
  derived and/or modified sequence
tgtatgtgtgtatgtgtgtgtgtatgtatgtatatatatatatatatatatatatcccagccaatttatatctttttattattattattattattatttttgagacagagtctgatgattaagaatcaggttaggcggccaggcgcagtggctcacacttgtaatcccagcactgtgggaggccatggcgggcagatcacgagaggtcaggagtttgagaccagcctggccaacatgggtgaaaccccatctctactaaaaatacaaacctggccgggcgtggtagcacacgcctgtaatcccagctactcaggagggaggctgaggcaggaaaattgcttgaacctgggaggcggaggttgcggtgagatcgcactccagcctggacaacaagaa

SEQ ID NO: 90569 - DNA, 279 bp, Artificial Sequence
  derived and/or modified sequence
tctgtcgcccaggctggagtgcagtggcacaatctcggctcactgcaacctccacctcccagattcaaccgattctcctgcctcagcatcccgagtagctgggattataggcactcgccaccacgcctggctgattttttatttctagtagaaacagagttttgccatgttggccaggctgccctcgaactcctgacctcaggtgatctgcccacctcagcctcccaaagtgctaggattacaggtgtgagccaccgcacccggcccagtttattttac

SEQ ID NO: 90570 - DNA, 300 bp, Artificial Sequence
  derived and/or modified sequence
tttttgagacgaagtctcgctctgtcgcccaggcaatggcacgatctcggctcactgcaacctccgcctcccgggttcaagccattctcctgcctcagccttctgagtagctgggattacaggtgcgcaccaccatgcccggctaatttttgtattttagtagagatggggtttcaccatgttggccaggctggtctcgaactcctgacatcggatctgcccacctcggcctcccaaagggctgggattacaggtgtaaaccaccacgcctggccaagagatgcattttcaataagttac

SEQ ID NO: 90571 - DNA, 279 bp, Artificial Sequence
  derived and/or modified sequence
tctgtcgcccaggctggagtgcagtggcacaatctcggctcactgcaacctccacctcccagattcaaccgattctcctgcctcagcatcccgagtagctgggattataggcactcgccaccactcctggctgattttttatttctagtagaaacagagttttgccatgttggccaggctgccctcgaactcctgacctcaggtgatctgcccacctcagcctcccaaagtgctaggattacaggcgtgagccaccgcacccggcccagtttattttac

SEQ ID NO: 90572 - DNA, 168 bp, Artificial Sequence
  derived and/or modified sequence
gtaattggctgggtgtggtggctcacgcctgtaatcccagcactttgggaggccgaggcaggtggatcacctgagatcagaagttcaagaccagcctggccaacatggggaaacccgtctctactaaaaatacaaaaattagccaggcgtggtggtgcacacctgtag

SEQ ID NO: 90573 - DNA, 300 bp, Artificial Sequence
  derived and/or modified sequence
tttttgagacgaagtctcgctctgtcgcccaggcaatggcacgatctcggctcactgcaacctccggctcccgggttcaagccattctcctgcctcagccttctgagtagctgggattacaggtgcgcaccaccatgcccggctaatttttgtattttagtagagatggggtttcaccatgttggccaggctggtctcgaactcctgacatcggatctccccgcctcggcctcccaaagggctgggattacaggtgtaaaccaccacgcctggccaagagatgcattttcaataagttac

SEQ ID NO: 90574 - DNA, 270 bp, Artificial Sequence
  derived and/or modified sequence
caatggagtgatctcggctcactgcaacctccgcctcctgggttcaagcgattctcatgcctcaaccttccgactagctgggattacaggcatgtgccaccacgcccggctaatttttgttttttcatagagatggggtttctgcatgttggtcagactggtcttgaactcccaacctcaggtgatccgcctgcctcggcctcccaaagtgctgggattacaggagtgagccaccacgcctggcctcattttattattttattaatgatt

SEQ ID NO: 90575 - DNA, 1688 bp, Artificial Sequence
  derived and/or modified sequence
agcctgacagacgctccaggtcgtctagcaagccgccctcccccgccgccagcaagaaggtggcgtctcgcagctcctcgttattcgtccgcctcgggtccatccggccccgccgcccgactttgcgctgagacccaaggggaagccccgaggggaccccgcgccgtaggagggagtggaggagccggcgaaccgcgatggagccggggcccagcacagcgcgagcggctcctcggctgttcgtgctgcttccccagcttcttcaccggcacctgcagcttccgcacctcctggtccgcgttcacgttagagttaacgtcctccatcccggccccgctgcctccgccgcccgcggccctctcgctctcgcagcaacaagggaagagccggaggaaagaggcgtccacgccgctcactccagccgaggcccccgcatatagcagggccaggccccgtcgccagggttcccccagcgcgggtcccgaagcaccgctggccacagatgaaccgcctcctcagcgcaggtccgggattcggggaggcagcgccaatatccggtctctgcagccatcttccctccgtccctccgcccaccgagggtcggccctgtaggtgacctcagagcgtcggggatgggcgtggccccgtcgggcgctaagaagacctagcgcagagaggaccgccgagctcccgacggggcggggccaggtgtgtgaggggcggggattggacccggaggggcgtgtctggactgccggcggaagtggaacgcggcctgacctgcgacggaaagccactgcaagcccggaggcgaacagaaggcattccgcgagccgggctgagttggtgaacacggtcctcgttcaccccgcctattggtctgggcgtgtggggtattctccacccacttatacggcgtgtgggaccgacgggcccgtcctgcccggctccggtccggatctcgagtaggcgctcaatgggattcggggagacgtagtttactttgttcagcaaatatttaaccgatgcctattttaatgggagattgtttccgctggcgggagcctcagagaccgcctgtgtcctttaagaaacccgaatttcagacagttaagagaggtctaaggtcaaaataataatcataatttcttcttactggccagatactatgctaagccctttttaattttattattattatattttgtcaccgaggctggagtgcaatggcccgatcttggctctgcaacctccgcctcccggtttaaagcgattctcctgcctcagcctcccgagtaactgggattacaggcgggcgccaccacgcctcgctgatttttgtattttagtagagacggggtttcgccattttggccaggctggtctcgaccctgacctcagggtgatccgctcacctcagccactcaaaagtgctgggattactggcgtcagccaccgcgcgcccggtcgtgctaatcactttgaaaggcattatctcatcggttaaaacatagttttccggacttaaaagtttacagcacactggcgcagaagatggaaaaccgctgcttgcctttctccgtttattgactcacattctgctctttggatcattttcttcggaaaaagttttccaaagtgtgtcttgtgtattaaaagttgtgtattaaaagtatttgaacacgctg
